(19) United States
(12) Patent Application Publication
(10) Pub. No.: US 2024/0327476 A1
(43) Pub. Date: Oct. 3, 2024

(54) MODIFIED POLYNUCLEOTIDES FOR THE PRODUCTION OF PROTEINS ASSOCIATED WITH HUMAN DISEASE

(71) Applicant: ModernaTx, Inc., Cambridge, MA (US)

(72) Inventors: Antonin DE FOUGEROLLES, Waterloo (BE); Justin GUILD, Framingham, MA (US)

(21) Appl. No.: 18/634,220

(22) Filed: Apr. 12, 2024

Related U.S. Application Data
(63) Continuation of application No. 16/665,985, filed on Oct. 28, 2019.
Application No. 16/665,985 is a continuation of application No. 16/400,825, filed on May 1, 2019, now abandoned.
Application No. 16/400,825 is a continuation of application No. 15/440,523, filed on Feb. 23, 2017, now abandoned.
Application No. 15/440,523 is a continuation of application No. 15/060,707, filed on Mar. 4, 2016, now Pat. No. 9,782,462.
Application No. 15/060,707 is a continuation of application No. 13/791,910, filed on Mar. 9, 2013, now abandoned.
(60) Provisional application No. 61/737,155, filed on Dec. 14, 2012.
(60) Provisional application No. 61/737,152, filed on Dec. 14, 2012.
(60) Provisional application No. 61/737,147, filed on Dec. 14, 2012.
(60) Provisional application No. 61/737,139, filed on Dec. 14, 2012.
(60) Provisional application No. 61/737,135, filed on Dec. 14, 2012.
(60) Provisional application No. 61/737,134, filed on Dec. 14, 2012.
(60) Provisional application No. 61/737,130, filed on Dec. 14, 2012.
(60) Provisional application No. 61/737,213, filed on Dec. 14, 2012.
(60) Provisional application No. 61/737,203, filed on Dec. 14, 2012.
(60) Provisional application No. 61/737,191, filed on Dec. 14, 2012.
(60) Provisional application No. 61/737,184, filed on Dec. 14, 2012.
(60) Provisional application No. 61/737,174, filed on Dec. 14, 2012.
(60) Provisional application No. 61/737,168, filed on Dec. 14, 2012.
(60) Provisional application No. 61/737,160, filed on Dec. 14, 2012.
(60) Provisional application No. 61/712,490, filed on Oct. 11, 2012.
(60) Provisional application No. 61/709,303, filed on Oct. 3, 2012.
(60) Provisional application No. 61/696,381, filed on Sep. 4, 2012.
(60) Provisional application No. 61/681,712, filed on Aug. 10, 2012.
(60) Provisional application No. 61/681,658, filed on Aug. 10, 2012.
(60) Provisional application No. 61/681,661, filed on Aug. 10, 2012.
(60) Provisional application No. 61/681,648, filed on Aug. 10, 2012.
(60) Provisional application No. 61/681,649, filed on Aug. 10, 2012.
(60) Provisional application No. 61/681,650, filed on Aug. 10, 2012.
(60) Provisional application No. 61/681,654, filed on Aug. 10, 2012.
(60) Provisional application No. 61/681,675, filed on Aug. 10, 2012.
(60) Provisional application No. 61/681,687, filed on Aug. 10, 2012.
(60) Provisional application No. 61/681,696, filed on Aug. 10, 2012.
(60) Provisional application No. 61/681,704, filed on Aug. 10, 2012.
(60) Provisional application No. 61/681,720, filed on Aug. 10, 2012.
(60) Provisional application No. 61/681,645, filed on Aug. 10, 2012.
(60) Provisional application No. 61/681,647, filed on Aug. 10, 2012.
(60) Provisional application No. 61/681,742, filed on Aug. 10, 2012.
(60) Provisional application No. 61/681,667, filed on Aug. 10, 2012.
(60) Provisional application No. 61/668,157, filed on Jul. 5, 2012.
(60) Provisional application No. 61/648,244, filed on May 17, 2012.
(60) Provisional application No. 61/648,286, filed on May 17, 2012.
(60) Provisional application No. 61/618,961, filed on Apr. 2, 2012.
(60) Provisional application No. 61/618,866, filed on Apr. 2, 2012.
(60) Provisional application No. 61/618,862, filed on Apr. 2, 2012.
(60) Provisional application No. 61/618,953, filed on Apr. 2, 2012.
(60) Provisional application No. 61/618,945, filed on Apr. 2, 2012.
(60) Provisional application No. 61/618,935, filed on Apr. 2, 2012.
(60) Provisional application No. 61/618,922, filed on Apr. 2, 2012.
(60) Provisional application No. 61/618,957, filed on Apr. 2, 2012.
(60) Provisional application No. 61/618,896, filed on Apr. 2, 2012.
(60) Provisional application No. 61/618,885, filed on Apr. 2, 2012.
(60) Provisional application No. 61/618,878, filed on Apr. 2, 2012.
(60) Provisional application No. 61/618,873, filed on Apr. 2, 2012.
(60) Provisional application No. 61/618,870, filed on Apr. 2, 2012.
(60) Provisional application No. 61/618,868, filed on Apr. 2, 2012.
(60) Provisional application No. 61/618,911, filed on Apr. 2, 2012.
(60) Provisional application No. 61/737,224, filed on Dec. 14, 2012.

(30) Foreign Application Priority Data
Dec. 14, 2012 (WO) PCT/US12/69610

(51) Int. Cl. C07K 14/47; A61K 9/00; A61K 9/127; A61K 9/14; A61K 9/50; A61K 9/51; A61K 31/7088; A61K 31/7115; A61K 38/00; A61K 38/17; A61K 38/18; A61K 38/19; A61K 38/21; A61K 38/36; A61K 38/44; A61K 38/45; A61K 38/48; A61K 39/395; A61K 47/10; A61K 47/34; A61K 47/54; A61K 48/00; C07K 14/005; C07K 14/435; C07K 14/475; C07K 14/485; C07K 14/505; C07K 14/515; C07K 14/525; C07K 14/535; C07K 14/56; C07K 14/565; C07K 14/62; C07K 14/705; C07K 14/745; C07K 14/75; C07K 16/00; C07K 16/28; C07K 16/32; C07K 19/00; C12N 9/00; C12N 9/02; C12N 9/10; C12N 9/16; C12N 9/24; C12N 9/42; C12N 9/64; C12N 9/88; C12N 15/11; C12N 15/52; C12N 15/67; C12N 15/85; C12N 15/87; C12N 15/88; C12P 13/04; C12P 21/00

(52) U.S. Cl. CPC C07K 14/47; A61K 9/1271; A61K 9/1272; A61K 9/1277; A61K 9/14; A61K 9/145; A61K 9/5031; A61K 9/5123; A61K 9/5146; A61K 9/5153; A61K 31/7088; A61K 31/7115; A61K 38/17; A61K 38/1767; A61K 38/177; A61K 38/1816; A61K 38/1866; A61K 38/1891; A61K 38/191; A61K 38/193; A61K 38/212; A61K 38/215; A61K 38/36; A61K 38/363; A61K 38/44; A61K 38/45; A61K 38/4833; A61K 38/4846; A61K 39/3955; A61K 47/10; A61K 47/34; A61K 47/54; A61K 47/542; A61K 47/543; A61K 48/0033; A61K 48/005; A61K 48/0066; A61K 48/0075; C07K 14/005; C07K 14/435; C07K 14/4705; C07K 14/4713; C07K 14/485; C07K 14/505; C07K 14/515; C07K 14/525; C07K 14/535; C07K 14/56; C07K 14/565; C07K 14/62; C07K 14/705; C07K 14/745; C07K 14/75; C07K 16/00; C07K 16/2887; C07K 16/32; C07K 19/00; C12N 9/0069; C12N 9/1051; C12N 9/16; C12N 9/2402; C12N 9/2445; C12N 9/644; C12N 9/6451; C12N 9/88; C12N 9/93; C12N 15/11; C12N 15/52; C12N 15/67; C12N 15/85; C12N 15/87; C12N 15/88; C12P 13/04; C12P 21/00; C12P 21/005; C12Y 113/12007; C12Y 304/21005; C12Y 603/02019; A61K 9/0019; A61K 38/00; A61K 48/00; C07K 14/475; C12N 2840/00; C12N 2840/85; C12Y 304/21022

(57) ABSTRACT

The invention relates to compositions and methods for the preparation, manufacture and therapeutic use of polynucleotides, primary transcripts and mmRNA molecules.

### REFERENCE TO SEQUENCE LISTING

[0001] The instant application contains a “lengthy” Sequence Listing which has been submitted via CD-R in lieu of a printed paper copy, and is hereby incorporated by reference in its entirety. This contains a sequence listing text file as part of the originally filed subject matter as follows: File name: M310.17-2030.1310USCON10_SL.txt; File size: 674,697,216 bytes; Date created: Feb. 9, 2016. These CD-Rs are labeled “CRF,” “Copy 1,” and “Copy 2,” respectively, and each contain only one identical file, as identified immediately above. The machine-readable format of each CD-R is IBM-PC and the operating system of each compact disc is MS-Windows.

### FIELD OF THE INVENTION

[0002] The invention relates to compositions, methods, processes, kits and devices for the design, preparation, manufacture and/or formulation of polynucleotides, primary constructs and modified mRNA molecules (mmRNA).

### BACKGROUND OF THE INVENTION

[0003] There are multiple problems with prior methodologies of effecting protein expression. For example, introduced DNA can integrate into host cell genomic DNA at some frequency, resulting in alterations and/or damage to the host cell genomic DNA. Alternatively, the heterologous deoxyribonucleic acid (DNA) introduced into a cell can be inherited by daughter cells (whether or not the heterologous DNA has integrated into the chromosome) or by offspring.

[0004] In addition, assuming proper delivery and no damage or integration into the host genome, there are multiple steps which must occur before the encoded protein is made. Once inside the cell, DNA must be transported into the nucleus where it is transcribed into RNA. The RNA transcribed from DNA must then enter the cytoplasm where it is translated into protein. Not only do the multiple processing steps from administered DNA to protein create lag times before the generation of the functional protein, each step represents an opportunity for error and damage to the cell. Further, it is known to be difficult to obtain DNA expression in cells as DNA frequently enters a cell but is not expressed or not expressed at reasonable rates or concentrations. This can be a particular problem when DNA is introduced into primary cells or modified cell lines.

[0005] In the early 1990's Bloom and colleagues successfully rescued vasopressin-deficient rats by injecting in vitro-transcribed vasopressin mRNA into the hypothalamus (Science 255:996-998; 1992). However, the low levels of translation and the immunogenicity of the molecules hampered the development of mRNA as a therapeutic and efforts have since focused on alternative applications that could instead exploit these pitfalls, i.e. immunization with mRNAs coding for cancer antigens.

[0006] Others have investigated the use of mRNA to deliver a polypeptide of interest and shown that certain chemical modifications of mRNA molecules, particularly pseudouridine and 5-methyl-cytosine, have reduced immunostimulatory effect.

[0007] These studies are disclosed in, for example, Ribostem Limited in United Kingdom patent application serial number 0316089.2 filed on Jul. 9, 2003 now abandoned, PCT application number PCT/GB2004/002981 filed on Jul. 9, 2004 published as WO2005005622, United States patent application national phase entry Ser. No. 10/563,897 filed on Jun. 8, 2006 published as US20060247195 now abandoned, and European patent application national phase entry serial number EP2004743322 filed on Jul. 9, 2004 published as EP1646714 now withdrawn; Novozymes, Inc. in PCT application number PCT/US2007/88060 filed on Dec. 19, 2007 published as WO2008140615, United States patent application national phase entry Ser. No. 12/520,072 filed on Jul. 2, 2009 published as US20100028943 and European patent application national phase entry serial number EP2007874376 filed on Jul. 7, 2009 published as EP2104739; University of Rochester in PCT application number PCT/US2006/46120 filed on Dec. 4, 2006 published as WO2007064952 and U.S. patent application Ser. No. 11/606,995 filed on Dec. 1, 2006 published as US20070141030; BioNTech AG in European patent application serial number EP2007024312 filed Dec. 14, 2007 now abandoned, PCT application number PCT/EP2008/01059 filed on Dec. 12, 2008 published as WO2009077134, European patent application national phase entry serial number EP2008861423 filed on Jun. 2, 2010 published as EP2240572, U.S. patent application national phase entry Ser. No. 12/735,060 filed Nov. 24, 2010 published as WO20110065103, German patent application serial number DE 10 2005 046 490 filed Sep. 28, 2005, PCT application PCT/EP2006/0448 filed Sep. 28, 2006 published as WO2007036366, national phase European patent EP1934345 published Mar. 21, 2012 and national phase U.S. patent application Ser. No. 11/992,638 filed Aug. 14, 2009 published as 20100129877; Immune Disease Institute Inc. in U.S. patent application Ser. No. 13/088,009 filed Apr. 15, 2011 published as US20120046346 and PCT application PCT/US2011/32679 filed Apr. 15, 2011 published as WO20110130624; Shire Human Genetic Therapeutics in U.S. patent application Ser. No. 12/957,340 filed on Nov. 20, 2010 published as US20110244026; Sequitur Inc. in PCT application PCT/US1998/019492 filed on Sep. 18, 1998 published as WO1999014346; The Scripps Research Institute in PCT application number PCT/US2010/00567 filed on Feb. 24, 2010 published as WO2010098861, and United States patent application national phase entry Ser. No. 13/203,229 filed Nov. 3, 2011 published as US20120053333; Ludwig-Maximillians University in PCT application number PCT/EP2010/004681 filed on Jul. 30, 2010 published as WO2011012316; Cellscript Inc. in U.S. Pat. No. 8,039,214 filed Jun. 30, 2008 and granted Oct. 18, 2011, U.S. patent application Ser. No. 12/962,498 filed on Dec. 7, 2010 published as US20110143436, Ser. No. 12/962,468 filed on Dec. 7, 2010 published as US20110143397, Ser. No. 13/237,451 filed on Sep. 20, 2011 published as US20120009649, and PCT applications PCT/US2010/59305 filed Dec. 7, 2010 published as WO2011071931 and PCT/US2010/59317 filed on Dec. 7, 2010 published as WO2011071936; The Trustees of the University of Pennsylvania in PCT application number PCT/US2006/32372 filed on Aug. 21, 2006 published as WO2007024708, and United States patent application national phase entry Ser. No. 11/990,646 filed on Mar. 27, 2009 published as US20090286852; Curevac GMBH in German patent application serial numbers DE10 2001 027 283.9 filed Jun. 5, 2001, DE10 2001 062 480.8 filed Dec. 19, 2001, and DE 20 2006 051 516 filed Oct. 31, 2006 all abandoned, European patent numbers EP1392341 granted Mar. 30, 2005 and EP1458410 granted Jan. 2, 2008, PCT application numbers PCT/EP2002/06180 filed Jun. 5, 2002 published as WO2002098443, PCT/EP2002/14577 filed on Dec. 19, 2002 published as WO2003051401, PCT/EP2007/09469 filed on Dec. 31, 2007 published as WO2008052770, PCT/EP2008/03033 filed on Apr. 16, 2008 published as WO2009127230, PCT/EP2006/004784 filed on May 19, 2005 published as WO2006122828, PCT/EP2008/00081 filed on Jan. 9, 2007 published as WO2008083949, and U.S. patent application Ser. No. 10/729,830 filed on Dec. 5, 2003 published as US20050032730, Ser. No. 10/870,110 filed on Jun. 18, 2004 published as US 20050059624, Ser. No. 11/914,945 filed on Jul. 7, 2008 published as US20080267873, Ser. No. 12/446,912 filed on Oct. 27, 2009 published as US2010047261 now abandoned, Ser. No. 12/522,214 filed on Jan. 4, 2010 published as US20100189729, Ser. No. 12/787,566 filed on May 26, 2010 published as US20110077287, Ser. No. 12/787,755 filed on May 26, 2010 published as US20100239608, Ser. No. 13/185,119 filed on Jul. 18, 2011 published as US20110269950, and Ser. No. 13/106,548 filed on May 12, 2011 published as US20110311472 all of which are herein incorporated by reference in their entirety.

[0008] Notwithstanding these reports, which are limited to a selection of chemical modifications including pseudouridine and 5-methyl-cytosine, there remains a need in the art for therapeutic modalities to address the myriad of barriers surrounding the efficacious modulation of intracellular translation and processing of nucleic acids encoding polypeptides or fragments thereof.

[0009] To this end, the inventors have shown that certain modified mRNA sequences have the potential as therapeutics with benefits beyond just evading, avoiding or diminishing the immune response. Such studies are detailed in published co-pending applications International Application PCT/US2011/046861 filed Aug. 5, 2011 and PCT/US2011/054636 filed Oct. 3, 2011, International Application number PCT/US2011/054617 filed Oct. 3, 2011, the contents of which are incorporated herein by reference in their entirety.

[0010] The present invention addresses this need by providing nucleic acid based compounds or polynucleotides which encode a polypeptide of interest (e.g., modified mRNA or mmRNA) and which have structural and/or chemical features that avoid one or more of the problems in the art, for example, features which are useful for optimizing formulation and delivery of nucleic acid-based therapeutics while retaining structural and functional integrity, overcoming the threshold of expression, improving expression rates, half life and/or protein concentrations, optimizing protein localization, and avoiding deleterious bio-responses such as the immune response and/or degradation pathways.

### SUMMARY OF THE INVENTION

[0011] Described herein are compositions, methods, processes, kits and devices for the design, preparation, manufacture and/or formulation of modified mRNA (mmRNA) molecules.

[0012] The details of various embodiments of the invention are set forth in the description below. Other features, objects, and advantages of the invention will be apparent from the description and the drawings, and from the claims.

### BRIEF DESCRIPTION OF THE DRAWINGS

[0013] The foregoing and other objects, features and advantages will be apparent from the following description of particular embodiments of the invention, as illustrated in the accompanying drawings in which like reference characters refer to the same parts throughout the different views. The drawings are not necessarily to scale, emphasis instead being placed upon illustrating the principles of various embodiments of the invention.

[0014] FIG. 1 is a schematic of a primary construct of the present invention.

[0015] FIG. 2 illustrates lipid structures in the prior art useful in the present invention. Shown are the structures for 98N12-5 (TETA5-LAP), DLin-DMA, DLin-K-DMA (2,2-Dilinoleyl-4-dimethylaminomethyl-[1,3]-dioxolane), DLin-KC2-DMA, DLin-MC3-DMA and C12-200.

[0016] FIG. 3 is a representative plasmid useful in the IVT reactions taught herein. The plasmid contains Insert 64818, designed by the instant inventors.

[0017] FIG. 4 is a gel profile of modified mRNA encapsulated in PLGA microspheres.

[0018] FIG. 5 is a histogram of Factor IX protein production PLGA formulation Factor IX modified mRNA.

[0019] FIGS. 6A and 6B are histograms showing VEGF protein production in human keratinocyte cells after transfection of modified mRNA at a range of doses. FIG. 6A shows protein production after transfection of modified mRNA comprising natural nucleoside triphosphate (NTP). FIG. 6B shows protein production after transfection of modified mRNA fully modified with pseudouridine (Pseudo-U) and 5-methylcytosine (5mC). FIG. 6C shows protein production after transfection of modified mRNA fully modified with N1-methyl-pseudouridine (N1-methyl-Pseudo-U) and 5-methylcytosine (5mC).

[0020] FIG. 7 is a histogram of VEGF protein production in HEK293 cells.

[0021] FIGS. 8A and 8B are histograms of VEGF expression and IFN-alpha induction after transfection of VEGF modified mRNA in peripheral blood mononuclear cells (PBMC). FIG. 8A shows VEGF expression. FIG. 8B shows IFN-alpha induction.

[0022] FIG. 9 is a histogram of VEGF protein production in Hela cells from VEGF modified mRNA.

[0023] FIG. 10 is a histogram of VEGF protein production from lipoplexed VEGF modified mRNA in mice.

[0024] FIG. 11 is a histogram of G-CSF protein production in Hela cells from G-CSF modified mRNA.

[0025] FIG. 12 is a histogram of Factor IX protein production in HeLa cell supernatant from Factor IX modified mRNA.

### DETAILED DESCRIPTION

[0026] It is of great interest in the fields of therapeutics, diagnostics, reagents and for biological assays to be able to deliver a nucleic acid, e.g., a ribonucleic acid (RNA) inside a cell, whether in vitro, in vivo, in situ or ex vivo, such as to cause intracellular translation of the nucleic acid and production of an encoded polypeptide of interest. Of particular importance is the delivery and function of a non-integrative polynucleotide.

[0027] Described herein are compositions (including pharmaceutical compositions) and methods for the design, preparation, manufacture and/or formulation of polynucleotides encoding one or more polypeptides of interest. Also provided are systems, processes, devices and kits for the selection, design and/or utilization of the polynucleotides encoding the polypeptides of interest described herein.

[0028] According to the present invention, these polynucleotides are preferably modified as to avoid the deficiencies of other polypeptide-encoding molecules of the art. Hence these polynucleotides are referred to as modified mRNA or mmRNA.

[0029] The use of modified polynucleotides in the fields of antibodies, viruses, veterinary applications and a variety of in vivo settings has been explored by the inventors and these studies are disclosed in for example, co-pending and co-owned U.S. provisional patent application Ser. Nos. 61/470,451 filed Mar. 31, 2011 teaching in vivo applications of mmRNA; 61/517,784 filed on Apr. 26, 2011 teaching engineered nucleic acids for the production of antibody polypeptides; 61/519,158 filed May 17, 2011 teaching veterinary applications of mmRNA technology; 61/533,537 filed on Sep. 12, 2011 teaching antimicrobial applications of mmRNA technology; 61/533,554 filed on Sep. 12, 2011 teaching viral applications of mmRNA technology, 61/542,533 filed on Oct. 3, 2011 teaching various chemical modifications for use in mmRNA technology; 61/570,690 filed on Dec. 14, 2011 teaching mobile devices for use in making or using mmRNA technology; 61/570,708 filed on Dec. 14, 2011 teaching the use of mmRNA in acute care situations; 61/576,651 filed on Dec. 16, 2011 teaching terminal modification architecture for mmRNA; 61/576,705 filed on Dec. 16, 2011 teaching delivery methods using lipidoids for mmRNA; 61/578,271 filed on Dec. 21, 2011 teaching methods to increase the viability of organs or tissues using mmRNA; 61/581,322 filed on Dec. 29, 2011 teaching mmRNA encoding cell penetrating peptides; 61/581,352 filed on Dec. 29, 2011 teaching the incorporation of cytotoxic nucleosides in mmRNA and 61/631,729 filed on Jan. 10, 2012 teaching methods of using mmRNA for crossing the blood brain barrier; all of which are herein incorporated by reference in their entirety.

[0030] Provided herein, in part, are polynucleotides, primary constructs and/or mmRNA encoding polypeptides of interest which have been designed to improve one or more of the stability and/or clearance in tissues, receptor uptake and/or kinetics, cellular access by the compositions, engagement with translational machinery, mRNA half-life, translation efficiency, immune evasion, protein production capacity, secretion efficiency (when applicable), accessibility to circulation, protein half-life and/or modulation of a cell's status, function and/or activity.

### I. Compositions of the Invention (mmRNA)

[0031] The present invention provides nucleic acid molecules, specifically polynucleotides, primary constructs and/or mmRNA which encode one or more polypeptides of interest. The term “nucleic acid,” in its broadest sense, includes any compound and/or substance that comprise a polymer of nucleotides. These polymers are often referred to as polynucleotides. Exemplary nucleic acids or polynucleotides of the invention include, but are not limited to, ribonucleic acids (RNAs), deoxyribonucleic acids (DNAs), threose nucleic acids (TNAs), glycol nucleic acids (GNAs), peptide nucleic acids (PNAs), locked nucleic acids (LNAs, including LNA having a β-D-ribo configuration, α-LNA having an α-L-ribo configuration (a diastereomer of LNA), 2′-amino-LNA having a 2′-amino functionalization, and 2′-amino-α-LNA having a 2′-amino functionalization) or hybrids thereof.

[0032] In preferred embodiments, the nucleic acid molecule is a messenger RNA (mRNA). As used herein, the term “messenger RNA” (mRNA) refers to any polynucleotide which encodes a polypeptide of interest and which is capable of being translated to produce the encoded polypeptide of interest in vitro, in vivo, in situ or ex vivo.

[0033] Traditionally, the basic components of an mRNA molecule include at least a coding region, a 5′UTR, a 3′UTR, a 5′ cap and a poly-A tail. Building on this wild type modular structure, the present invention expands the scope of functionality of traditional mRNA molecules by providing polynucleotides or primary RNA constructs which maintain a modular organization, but which comprise one or more structural and/or chemical modifications or alterations which impart useful properties to the polynucleotide including, in some embodiments, the lack of a substantial induction of the innate immune response of a cell into which the polynucleotide is introduced. As such, modified mRNA molecules of the present invention are termed “mmRNA.” As used herein, a “structural” feature or modification is one in which two or more linked nucleotides are inserted, deleted, duplicated, inverted or randomized in a polynucleotide, primary construct or mmRNA without significant chemical modification to the nucleotides themselves. Because chemical bonds will necessarily be broken and reformed to effect a structural modification, structural modifications are of a chemical nature and hence are chemical modifications. However, structural modifications will result in a different sequence of nucleotides. For example, the polynucleotide “ATCG” may be chemically modified to “AT-5meC-G”. The same polynucleotide may be structurally modified from “ATCG” to “ATCCCG”. Here, the dinucleotide “CC” has been inserted, resulting in a structural modification to the polynucleotide.

mmRNA Architecture

[0034] The mmRNA of the present invention are distinguished from wild type mRNA in their functional and/or structural design features which serve to, as evidenced herein, overcome existing problems of effective polypeptide production using nucleic acid-based therapeutics.

[0035] FIG. 1 shows a representative polynucleotide primary construct 100 of the present invention. As used herein, the term “primary construct” or “primary mRNA construct” refers to a polynucleotide transcript which encodes one or more polypeptides of interest and which retains sufficient structural and/or chemical features to allow the polypeptide of interest encoded therein to be translated. Primary constructs may be polynucleotides of the invention. When structurally or chemically modified, the primary construct may be referred to as an mmRNA.

[0036] Returning to FIG. 1, the primary construct 100 here contains a first region of linked nucleotides 102 that is flanked by a first flanking region 104 and a second flaking region 106. As used herein, the “first region” may be referred to as a “coding region” or “region encoding” or simply the “first region.” This first region may include, but is not limited to, the encoded polypeptide of interest. The polypeptide of interest may comprise at its 5′ terminus one or more signal sequences encoded by a signal sequence region 103. The flanking region 104 may comprise a region of linked nucleotides comprising one or more complete or incomplete 5′ UTRs sequences. The flanking region 104 may also comprise a 5′ terminal cap 108. The second flanking region 106 may comprise a region of linked nucleotides comprising one or more complete or incomplete 3′ UTRs. The flanking region 106 may also comprise a 3′ tailing sequence 110.

[0037] Bridging the 5′ terminus of the first region 102 and the first flanking region 104 is a first operational region 105. Traditionally this operational region comprises a Start codon. The operational region may alternatively comprise any translation initiation sequence or signal including a Start codon.

[0038] Bridging the 3′ terminus of the first region 102 and the second flanking region 106 is a second operational region 107. Traditionally this operational region comprises a Stop codon. The operational region may alternatively comprise any translation initiation sequence or signal including a Stop codon. According to the present invention, multiple serial stop codons may also be used.

[0039] Generally, the shortest length of the first region of the primary construct of the present invention can be the length of a nucleic acid sequence that is sufficient to encode for a dipeptide, a tripeptide, a tetrapeptide, a pentapeptide, a hexapeptide, a heptapeptide, an octapeptide, a nonapeptide, or a decapeptide. In another embodiment, the length may be sufficient to encode a peptide of 2-30 amino acids, e.g. 5-30, 10-30, 2-25, 5-25, 10-25, or 10-20 amino acids. The length may be sufficient to encode for a peptide of at least 11, 12, 13, 14, 15, 17, 20, 25 or 30 amino acids, or a peptide that is no longer than 40 amino acids, e.g. no longer than 35, 30, 25, 20, 17, 15, 14, 13, 12, 11 or 10 amino acids. Examples of dipeptides that the polynucleotide sequences can encode or include, but are not limited to, carnosine and anserine.

[0040] Generally, the length of the first region encoding the polypeptide of interest of the present invention is greater than about 30 nucleotides in length (e.g., at least or greater than about 35, 40, 45, 50, 55, 60, 70, 80, 90, 100, 120, 140, 160, 180, 200, 250, 300, 350, 400, 450, 500, 600, 700, 800, 900, 1,000, 1,100, 1,200, 1,300, 1,400, 1,500, 1,600, 1,700, 1,800, 1,900, 2,000, 2,500, and 3,000, 4,000, 5,000, 6,000, 7,000, 8,000, 9,000, 10,000, 20,000, 30,000, 40,000, 50,000, 60,000, 70,000, 80,000, 90,000 or up to and including 100,000 nucleotides). As used herein, the “first region” may be referred to as a “coding region” or “region encoding” or simply the “first region.”

[0041] In some embodiments, the polynucleotide, primary construct, or mmRNA includes from about 30 to about 100,000 nucleotides (e.g., from 30 to 50, from 30 to 100, from 30 to 250, from 30 to 500, from 30 to 1,000, from 30 to 1,500, from 30 to 3,000, from 30 to 5,000, from 30 to 7,000, from 30 to 10,000, from 30 to 25,000, from 30 to 50,000, from 30 to 70,000, from 100 to 250, from 100 to 500, from 100 to 1,000, from 100 to 1,500, from 100 to 3,000, from 100 to 5,000, from 100 to 7,000, from 100 to 10,000, from 100 to 25,000, from 100 to 50,000, from 100 to 70,000, from 100 to 100,000, from 500 to 1,000, from 500 to 1,500, from 500 to 2,000, from 500 to 3,000, from 500 to 5,000, from 500 to 7,000, from 500 to 10,000, from 500 to 25,000, from 500 to 50,000, from 500 to 70,000, from 500 to 100,000, from 1,000 to 1,500, from 1,000 to 2,000, from 1,000 to 3,000, from 1,000 to 5,000, from 1,000 to 7,000, from 1,000 to 10,000, from 1,000 to 25,000, from 1,000 to 50,000, from 1,000 to 70,000, from 1,000 to 100,000, from 1,500 to 3,000, from 1,500 to 5,000, from 1,500 to 7,000, from 1,500 to 10,000, from 1,500 to 25,000, from 1,500 to 50,000, from 1,500 to 70,000, from 1,500 to 100,000, from 2,000 to 3,000, from 2,000 to 5,000, from 2,000 to 7,000, from 2,000 to 10,000, from 2,000 to 25,000, from 2,000 to 50,000, from 2,000 to 70,000, and from 2,000 to 100,000).

[0042] According to the present invention, the first and second flanking regions may range independently from 15-1,000 nucleotides in length (e.g., greater than 30, 40, 45, 50, 55, 60, 70, 80, 90, 100, 120, 140, 160, 180, 200, 250, 300, 350, 400, 450, 500, 600, 700, 800, and 900 nucleotides or at least 30, 40, 45, 50, 55, 60, 70, 80, 90, 100, 120, 140, 160, 180, 200, 250, 300, 350, 400, 450, 500, 600, 700, 800, 900, and 1,000 nucleotides).

[0043] According to the present invention, the tailing sequence may range from absent to 500 nucleotides in length (e.g., at least 60, 70, 80, 90, 120, 140, 160, 180, 200, 250, 300, 350, 400, 450, or 500 nucleotides). Where the tailing region is a poly A tail, the length may be determined in units of or as a function of polyA Binding Protein binding. In this embodiment, the poly A tail is long enough to bind at least 4 monomers of PolyA Binding Protein. PolyA Binding Protein monomers bind to stretches of approximately 38 nucleotides. As such, it has been observed that poly A tails of about 80 nucleotides and 160 nucleotides are functional.

[0044] According to the present invention, the capping region may comprise a single cap or a series of nucleotides forming the cap. In this embodiment the capping region may be from 1 to 10, e.g. 2-9, 3-8, 4-7, 1-5, 5-10, or at least 2, or 10 or fewer nucleotides in length. In some embodiments, the cap is absent.

[0045] According to the present invention, the first and second operational regions may range from 3 to 40, e.g., 5-30, 10-20, 15, or at least 4, or 30 or fewer nucleotides in length and may comprise, in addition to a Start and/or Stop codon, one or more signal and/or restriction sequences.

Cyclic mmRNA

[0046] According to the present invention, a primary construct or mmRNA may be cyclized, or concatemerized, to generate a translation competent molecule to assist interactions between poly-A binding proteins and 5′-end binding proteins. The mechanism of cyclization or concatemerization may occur through at least 3 different routes: 1) chemical, 2) enzymatic, and 3) ribozyme catalyzed. The newly formed 5′-/3′-linkage may be intramolecular or intermolecular.

[0047] In the first route, the 5′-end and the 3′-end of the nucleic acid contain chemically reactive groups that, when close together, form a new covalent linkage between the 5′-end and the 3′-end of the molecule. The 5′-end may contain an NHS-ester reactive group and the 3′-end may contain a 3′-amino-terminated nucleotide such that in an organic solvent the 3′-amino-terminated nucleotide on the 3′-end of a synthetic mRNA molecule will undergo a nucleophilic attack on the 5′-NHS-ester moiety forming a new 5′-/3′-amide bond.

[0048] In the second route, T4 RNA ligase may be used to enzymatically link a 5′-phosphorylated nucleic acid molecule to the 3′-hydroxyl group of a nucleic acid forming a new phosphorodiester linkage. In an example reaction, 1 μg of a nucleic acid molecule is incubated at 37° C. for 1 hour with 1-10 units of T4 RNA ligase (New England Biolabs, Ipswich, MA) according to the manufacturer's protocol. The ligation reaction may occur in the presence of a split oligonucleotide capable of base-pairing with both the 5′- and 3′-region in juxtaposition to assist the enzymatic ligation reaction.

[0049] In the third route, either the 5′- or 3′-end of the cDNA template encodes a ligase ribozyme sequence such that during in vitro transcription, the resultant nucleic acid molecule can contain an active ribozyme sequence capable of ligating the 5′-end of a nucleic acid molecule to the 3′-end of a nucleic acid molecule. The ligase ribozyme may be derived from the Group I Intron, Group I Intron, Hepatitis Delta Virus, Hairpin ribozyme or may be selected by SELEX (systematic evolution of ligands by exponential enrichment). The ribozyme ligase reaction may take 1 to 24 hours at temperatures between 0 and 37° C.

mmRNA Multimers

[0050] According to the present invention, multiple distinct polynucleotides, primary constructs or mmRNA may be linked together through the 3′-end using nucleotides which are modified at the 3′-terminus. Chemical conjugation may be used to control the stoichiometry of delivery into cells. For example, the glyoxylate cycle enzymes, isocitrate lyase and malate synthase, may be supplied into HepG2 cells at a 1:1 ratio to alter cellular fatty acid metabolism. This ratio may be controlled by chemically linking polynucleotides, primary constructs or mmRNA using a 3′-azido terminated nucleotide on one polynucleotide, primary construct or mmRNA species and a C5-ethynyl or alkynyl-containing nucleotide on the opposite polynucleotide, primary construct or mmRNA species. The modified nucleotide is added post-transcriptionally using terminal transferase (New England Biolabs, Ipswich, MA) according to the manufacturer's protocol. After the addition of the 3′-modified nucleotide, the two polynucleotide, primary construct or mmRNA species may be combined in an aqueous solution, in the presence or absence of copper, to form a new covalent linkage via a click chemistry mechanism as described in the literature.

[0051] In another example, more than two polynucleotides may be linked together using a functionalized linker molecule. For example, a functionalized saccharide molecule may be chemically modified to contain multiple chemical reactive groups (SH—, NH₂—, N₃, etc. . . . ) to react with the cognate moiety on a 3′-functionalized mRNA molecule (i.e., a 3′-maleimide ester, 3′-NHS-ester, alkynyl). The number of reactive groups on the modified saccharide can be controlled in a stoichiometric fashion to directly control the stoichiometric ratio of conjugated polynucleotide, primary construct or mmRNA.

mmRNA Conjugates and Combinations

[0052] In order to further enhance protein production, primary constructs or mmRNA of the present invention can be designed to be conjugated to other polynucleotides, dyes, intercalating agents (e.g. acridines), cross-linkers (e.g. psoralene, mitomycin C), porphyrins (TPPC4, texaphyrin, Sapphyrin), polycyclic aromatic hydrocarbons (e.g., phenazine, dihydrophenazine), artificial endonucleases (e.g. EDTA), alkylating agents, phosphate, amino, mercapto, PEG (e.g., PEG-40K), MPEG, [MPEG]₂, polyamino, alkyl, substituted alkyl, radiolabeled markers, enzymes, haptens (e.g. biotin), transport/absorption facilitators (e.g., aspirin, vitamin E, folic acid), synthetic ribonucleases, proteins, e.g., glycoproteins, or peptides, e.g., molecules having a specific affinity for a co-ligand, or antibodies e.g., an antibody, that binds to a specified cell type such as a cancer cell, endothelial cell, or bone cell, hormones and hormone receptors, non-peptidic species, such as lipids, lectins, carbohydrates, vitamins, cofactors, or a drug.

[0053] Conjugation may result in increased stability and/or half life and may be particularly useful in targeting the polynucleotides, primary constructs or mmRNA to specific sites in the cell, tissue or organism.

[0054] According to the present invention, the mmRNA or primary constructs may be administered with, or further encode one or more of RNAi agents, siRNAs, shRNAs, miRNAs, miRNA binding sites, antisense RNAs, ribozymes, catalytic DNA, RNA, RNAs that induce triple helix formation, aptamers or vectors, and the like.

Bifunctional mmRNA

[0055] In one embodiment of the invention are bifunctional polynucleotides (e.g., bifunctional primary constructs or bifunctional mmRNA). As the name implies, bifunctional polynucleotides are those having or capable of at least two functions. These molecules may also by convention be referred to as multi-functional.

[0056] The multiple functionalities of bifunctional polynucleotides may be encoded by the RNA (the function may not manifest until the encoded product is translated) or may be a property of the polynucleotide itself. It may be structural or chemical. Bifunctional modified polynucleotides may comprise a function that is covalently or electrostatically associated with the polynucleotides. Further, the two functions may be provided in the context of a complex of a mmRNA and another molecule.

[0057] Bifunctional polynucleotides may encode peptides which are anti-proliferative. These peptides may be linear, cyclic, constrained or random coil. They may function as aptamers, signaling molecules, ligands or mimics or mimetics thereof. Anti-proliferative peptides may, as translated, be from 3 to 50 amino acids in length. They may be 5-40, 10-30, or approximately 15 amino acids long. They may be single chain, multichain or branched and may form complexes, aggregates or any multi-unit structure once translated.

### Noncoding Polynucleotides and Primary Constructs

[0058] As described herein, provided are polynucleotides and primary constructs having sequences that are partially or substantially not translatable, e.g., having a noncoding region. Such noncoding region may be the “first region” of the primary construct. Alternatively, the noncoding region may be a region other than the first region. Such molecules are generally not translated, but can exert an effect on protein production by one or more of binding to and sequestering one or more translational machinery components such as a ribosomal protein or a transfer RNA (tRNA), thereby effectively reducing protein expression in the cell or modulating one or more pathways or cascades in a cell which in turn alters protein levels. The polynucleotide or primary construct may contain or encode one or more long noncoding RNA (lncRNA, or lincRNA) or portion thereof, a small nucleolar RNA (sno-RNA), micro RNA (miRNA), small interfering RNA (siRNA) or Piwi-interacting RNA (piRNA).

### Polypeptides of Interest

[0059] According to the present invention, the primary construct is designed to encode one or more polypeptides of interest or fragments thereof. A polypeptide of interest may include, but is not limited to, whole polypeptides, a plurality of polypeptides or fragments of polypeptides, which independently may be encoded by one or more nucleic acids, a plurality of nucleic acids, fragments of nucleic acids or variants of any of the aforementioned. As used herein, the term “polypeptides of interest” refer to any polypeptide which is selected to be encoded in the primary construct of the present invention. As used herein, “polypeptide” means a polymer of amino acid residues (natural or unnatural) linked together most often by peptide bonds. The term, as used herein, refers to proteins, polypeptides, and peptides of any size, structure, or function. In some instances the polypeptide encoded is smaller than about 50 amino acids and the polypeptide is then termed a peptide. If the polypeptide is a peptide, it will be at least about 2, 3, 4, or at least 5 amino acid residues long. Thus, polypeptides include gene products, naturally occurring polypeptides, synthetic polypeptides, homologs, orthologs, paralogs, fragments and other equivalents, variants, and analogs of the foregoing. A polypeptide may be a single molecule or may be a multi-molecular complex such as a dimer, trimer or tetramer. They may also comprise single chain or multichain polypeptides such as antibodies or insulin and may be associated or linked. Most commonly disulfide linkages are found in multichain polypeptides. The term polypeptide may also apply to amino acid polymers in which one or more amino acid residues are an artificial chemical analogue of a corresponding naturally occurring amino acid.

[0060] The term “polypeptide variant” refers to molecules which differ in their amino acid sequence from a native or reference sequence. The amino acid sequence variants may possess substitutions, deletions, and/or insertions at certain positions within the amino acid sequence, as compared to a native or reference sequence. Ordinarily, variants will possess at least about 50% identity (homology) to a native or reference sequence, and preferably, they will be at least about 80%, more preferably at least about 90% identical (homologous) to a native or reference sequence.

[0061] In some embodiments “variant mimics” are provided. As used herein, the term “variant mimic” is one which contains one or more amino acids which would mimic an activated sequence. For example, glutamate may serve as a mimic for phosphoro-threonine and/or phosphoro-serine. Alternatively, variant mimics may result in deactivation or in an inactivated product containing the mimic, e.g., phenylalanine may act as an inactivating substitution for tyrosine; or alanine may act as an inactivating substitution for serine.

[0062] “Homology” as it applies to amino acid sequences is defined as the percentage of residues in the candidate amino acid sequence that are identical with the residues in the amino acid sequence of a second sequence after aligning the sequences and introducing gaps, if necessary, to achieve the maximum percent homology. Methods and computer programs for the alignment are well known in the art. It is understood that homology depends on a calculation of percent identity but may differ in value due to gaps and penalties introduced in the calculation.

[0063] By “homologs” as it applies to polypeptide sequences means the corresponding sequence of other species having substantial identity to a second sequence of a second species.

[0064] “Analogs” is meant to include polypeptide variants which differ by one or more amino acid alterations, e.g., substitutions, additions or deletions of amino acid residues that still maintain one or more of the properties of the parent or starting polypeptide.

[0065] The present invention contemplates several types of compositions which are polypeptide based including variants and derivatives. These include substitutional, insertional, deletion and covalent variants and derivatives. The term “derivative” is used synonymously with the term “variant” but generally refers to a molecule that has been modified and/or changed in any way relative to a reference molecule or starting molecule.

[0066] As such, mmRNA encoding polypeptides containing substitutions, insertions and/or additions, deletions and covalent modifications with respect to reference sequences, in particular the polypeptide sequences disclosed herein, are included within the scope of this invention. For example, sequence tags or amino acids, such as one or more lysines, can be added to the peptide sequences of the invention (e.g., at the N-terminal or C-terminal ends). Sequence tags can be used for peptide purification or localization. Lysines can be used to increase peptide solubility or to allow for biotinylation. Alternatively, amino acid residues located at the carboxy and amino terminal regions of the amino acid sequence of a peptide or protein may optionally be deleted providing for truncated sequences. Certain amino acids (e.g., C-terminal or N-terminal residues) may alternatively be deleted depending on the use of the sequence, as for example, expression of the sequence as part of a larger sequence which is soluble, or linked to a solid support.

[0067] “Substitutional variants” when referring to polypeptides are those that have at least one amino acid residue in a native or starting sequence removed and a different amino acid inserted in its place at the same position. The substitutions may be single, where only one amino acid in the molecule has been substituted, or they may be multiple, where two or more amino acids have been substituted in the same molecule.

[0068] As used herein the term “conservative amino acid substitution” refers to the substitution of an amino acid that is normally present in the sequence with a different amino acid of similar size, charge, or polarity. Examples of conservative substitutions include the substitution of a non-polar (hydrophobic) residue such as isoleucine, valine and leucine for another non-polar residue. Likewise, examples of conservative substitutions include the substitution of one polar (hydrophilic) residue for another such as between arginine and lysine, between glutamine and asparagine, and between glycine and serine. Additionally, the substitution of a basic residue such as lysine, arginine or histidine for another, or the substitution of one acidic residue such as aspartic acid or glutamic acid for another acidic residue are additional examples of conservative substitutions. Examples of non-conservative substitutions include the substitution of a non-polar (hydrophobic) amino acid residue such as isoleucine, valine, leucine, alanine, methionine for a polar (hydrophilic) residue such as cysteine, glutamine, glutamic acid or lysine and/or a polar residue for a non-polar residue.

[0069] “Insertional variants” when referring to polypeptides are those with one or more amino acids inserted immediately adjacent to an amino acid at a particular position in a native or starting sequence. “Immediately adjacent” to an amino acid means connected to either the alpha-carboxy or alpha-amino functional group of the amino acid.

[0070] “Deletional variants” when referring to polypeptides are those with one or more amino acids in the native or starting amino acid sequence removed. Ordinarily, deletional variants will have one or more amino acids deleted in a particular region of the molecule.

[0071] “Covalent derivatives” when referring to polypeptides include modifications of a native or starting protein with an organic proteinaceous or non-proteinaceous derivatizing agent, and/or post-translational modifications. Covalent modifications are traditionally introduced by reacting targeted amino acid residues of the protein with an organic derivatizing agent that is capable of reacting with selected side-chains or terminal residues, or by harnessing mechanisms of post-translational modifications that function in selected recombinant host cells. The resultant covalent derivatives are useful in programs directed at identifying residues important for biological activity, for immunoassays, or for the preparation of anti-protein antibodies for immunoaffinity purification of the recombinant glycoprotein. Such modifications are within the ordinary skill in the art and are performed without undue experimentation.

[0072] Certain post-translational modifications are the result of the action of recombinant host cells on the expressed polypeptide. Glutaminyl and asparaginyl residues are frequently post-translationally deamidated to the corresponding glutamyl and aspartyl residues. Alternatively, these residues are deamidated under mildly acidic conditions. Either form of these residues may be present in the polypeptides produced in accordance with the present invention.

[0073] Other post-translational modifications include hydroxylation of proline and lysine, phosphorylation of hydroxyl groups of seryl or threonyl residues, methylation of the alpha-amino groups of lysine, arginine, and histidine side chains (T. E. Creighton, Proteins: Structure and Molecular Properties, W.H. Freeman & Co., San Francisco, pp. 79-86 (1983)).

[0074] “Features” when referring to polypeptides are defined as distinct amino acid sequence-based components of a molecule. Features of the polypeptides encoded by the mmRNA of the present invention include surface manifestations, local conformational shape, folds, loops, half-loops, domains, half-domains, sites, termini or any combination thereof.

[0075] As used herein when referring to polypeptides the term “surface manifestation” refers to a polypeptide based component of a protein appearing on an outermost surface.

[0076] As used herein when referring to polypeptides the term “local conformational shape” means a polypeptide based structural manifestation of a protein which is located within a definable space of the protein.

[0077] As used herein when referring to polypeptides the term “fold” refers to the resultant conformation of an amino acid sequence upon energy minimization. A fold may occur at the secondary or tertiary level of the folding process. Examples of secondary level folds include beta sheets and alpha helices. Examples of tertiary folds include domains and regions formed due to aggregation or separation of energetic forces. Regions formed in this way include hydrophobic and hydrophilic pockets, and the like.

[0078] As used herein the term “turn” as it relates to protein conformation means a bend which alters the direction of the backbone of a peptide or polypeptide and may involve one, two, three or more amino acid residues.

[0079] As used herein when referring to polypeptides the term “loop” refers to a structural feature of a polypeptide which may serve to reverse the direction of the backbone of a peptide or polypeptide. Where the loop is found in a polypeptide and only alters the direction of the backbone, it may comprise four or more amino acid residues. Oliva et al. have identified at least 5 classes of protein loops (J. Mol Biol 266 (4): 814-830; 1997). Loops may be open or closed. Closed loops or “cyclic” loops may comprise 2, 3, 4, 5, 6, 7, 8, 9, 10 or more amino acids between the bridging moieties. Such bridging moieties may comprise a cysteine-cysteine bridge (Cys-Cys) typical in polypeptides having disulfide bridges or alternatively bridging moieties may be non-protein based such as the dibromozylyl agents used herein.

[0080] As used herein when referring to polypeptides the term “half-loop” refers to a portion of an identified loop having at least half the number of amino acid resides as the loop from which it is derived. It is understood that loops may not always contain an even number of amino acid residues. Therefore, in those cases where a loop contains or is identified to comprise an odd number of amino acids, a half-loop of the odd-numbered loop will comprise the whole number portion or next whole number portion of the loop (number of amino acids of the loop/2+/−0.5 amino acids). For example, a loop identified as a 7 amino acid loop could produce half-loops of 3 amino acids or 4 amino acids (7/2=3.5+/−0.5 being 3 or 4).

[0081] As used herein when referring to polypeptides the term “domain” refers to a motif of a polypeptide having one or more identifiable structural or functional characteristics or properties (e.g., binding capacity, serving as a site for protein-protein interactions).

[0082] As used herein when referring to polypeptides the term “half-domain” means a portion of an identified domain having at least half the number of amino acid resides as the domain from which it is derived. It is understood that domains may not always contain an even number of amino acid residues. Therefore, in those cases where a domain contains or is identified to comprise an odd number of amino acids, a half-domain of the odd-numbered domain will comprise the whole number portion or next whole number portion of the domain (number of amino acids of the domain/2+/−0.5 amino acids). For example, a domain identified as a 7 amino acid domain could produce half-domains of 3 amino acids or 4 amino acids (7/2=3.5+/−0.5 being 3 or 4). It is also understood that sub-domains may be identified within domains or half-domains, these subdomains possessing less than all of the structural or functional properties identified in the domains or half domains from which they were derived. It is also understood that the amino acids that comprise any of the domain types herein need not be contiguous along the backbone of the polypeptide (i.e., nonadjacent amino acids may fold structurally to produce a domain, half-domain or subdomain).

[0083] As used herein when referring to polypeptides the terms “site” as it pertains to amino acid based embodiments is used synonymously with “amino acid residue” and “amino acid side chain.” A site represents a position within a peptide or polypeptide that may be modified, manipulated, altered, derivatized or varied within the polypeptide based molecules of the present invention.

[0084] As used herein the terms “termini” or “terminus” when referring to polypeptides refers to an extremity of a peptide or polypeptide. Such extremity is not limited only to the first or final site of the peptide or polypeptide but may include additional amino acids in the terminal regions. The polypeptide based molecules of the present invention may be characterized as having both an N-terminus (terminated by an amino acid with a free amino group (NH2)) and a C-terminus (terminated by an amino acid with a free carboxyl group (COOH)). Proteins of the invention are in some cases made up of multiple polypeptide chains brought together by disulfide bonds or by non-covalent forces (multimers, oligomers). These sorts of proteins will have multiple N- and C-termini. Alternatively, the termini of the polypeptides may be modified such that they begin or end, as the case may be, with a non-polypeptide based moiety such as an organic conjugate.

[0085] Once any of the features have been identified or defined as a desired component of a polypeptide to be encoded by the primary construct or mmRNA of the invention, any of several manipulations and/or modifications of these features may be performed by moving, swapping, inverting, deleting, randomizing or duplicating. Furthermore, it is understood that manipulation of features may result in the same outcome as a modification to the molecules of the invention. For example, a manipulation which involved deleting a domain would result in the alteration of the length of a molecule just as modification of a nucleic acid to encode less than a full length molecule would.

[0086] Modifications and manipulations can be accomplished by methods known in the art such as, but not limited to, site directed mutagenesis. The resulting modified molecules may then be tested for activity using in vitro or in vivo assays such as those described herein or any other suitable screening assay known in the art.

[0087] According to the present invention, the polypeptides may comprise a consensus sequence which is discovered through rounds of experimentation. As used herein a “consensus” sequence is a single sequence which represents a collective population of sequences allowing for variability at one or more sites.

[0088] As recognized by those skilled in the art, protein fragments, functional protein domains, and homologous proteins are also considered to be within the scope of polypeptides of interest of this invention. For example, provided herein is any protein fragment (meaning a polypeptide sequence at least one amino acid residue shorter than a reference polypeptide sequence but otherwise identical) of a reference protein 10, 20, 30, 40, 50, 60, 70, 80, 90, 100 or greater than 100 amino acids in length. In another example, any protein that includes a stretch of about 20, about 30, about 40, about 50, or about 100 amino acids which are about 40%, about 50%, about 60%, about 70%, about 80%, about 90%, about 95%, or about 100% identical to any of the sequences described herein can be utilized in accordance with the invention. In certain embodiments, a polypeptide to be utilized in accordance with the invention includes 2, 3, 4, 5, 6, 7, 8, 9, 10, or more mutations as shown in any of the sequences provided or referenced herein.

### Encoded Polypeptides

[0089] The primary constructs or mmRNA of the present invention may be designed to encode polypeptides of interest selected from any of several target categories including, but not limited to, biologics, antibodies, vaccines, therapeutic proteins or peptides, cell penetrating peptides, secreted proteins, plasma membrane proteins, cytoplasmic or cytoskeletal proteins, intracellular membrane bound proteins, nuclear proteins, proteins associated with human disease, targeting moieties or those proteins encoded by the human genome for which no therapeutic indication has been identified but which nonetheless have utility in areas of research and discovery.

[0090] In one embodiment primary constructs or mmRNA may encode variant polypeptides which have a certain identity with a reference polypeptide sequence. As used herein, a “reference polypeptide sequence” refers to a starting polypeptide sequence. Reference sequences may be wild type sequences or any sequence to which reference is made in the design of another sequence. A “reference polypeptide sequence” may, e.g., be any one of SEQ ID NOs: 35608-71005 as disclosed herein, e.g., any of SEQ ID NOS 35608, 35609, 35610, 35611, 35612, 35613, 35614, 35615, 35616, 35617, 35618, 35619, 35620, 35621, 35622, 35623, 35624, 35625, 35626, 35627, 35628, 35629, 35630, 35631, 35632, 35633, 35634, 35635, 35636, 35637, 35638, 35639, 35640, 35641, 35642, 35643, 35644, 35645, 35646, 35647, 35648, 35649, 35650, 35651, 35652, 35653, 35654, 35655, 35656, 35657, 35658, 35659, 35660, 35661, 35662, 35663, 35664, 35665, 35666, 35667, 35668, 35669, 35670, 35671, 35672, 35673, 35674, 35675, 35676, 35677, 35678, 35679, 35680, 35681, 35682, 35683, 35684, 35685, 35686, 35687, 35688, 35689, 35690, 35691, 35692, 35693, 35694, 35695, 35696, 35697, 35698, 35699, 35700, 35701, 35702, 35703, 35704, 35705, 35706, 35707, 35708, 35709, 35710, 35711, 35712, 35713, 35714, 35715, 35716, 35717, 35718, 35719, 35720, 35721, 35722, 35723, 35724, 35725, 35726, 35727, 35728, 35729, 35730, 35731, 35732, 35733, 35734, 35735, 35736, 35737, 35738, 35739, 35740, 35741, 35742, 35743, 35744, 35745, 35746, 35747, 35748, 35749, 35750, 35751, 35752, 35753, 35754, 35755, 35756, 35757, 35758, 35759, 35760, 35761, 35762, 35763, 35764, 35765, 35766, 35767, 35768, 35769, 35770, 35771, 35772, 35773, 35774, 35775, 35776, 35777, 35778, 35779, 35780, 35781, 35782, 35783, 35784, 35785, 35786, 35787, 35788, 35789, 35790, 35791, 35792, 35793, 35794, 35795, 35796, 35797, 35798, 35799, 35800, 35801, 35802, 35803, 35804, 35805, 35806, 35807, 35808, 35809, 35810, 35811, 35812, 35813, 35814, 35815, 35816, 35817, 35818, 35819, 35820, 35821, 35822, 35823, 35824, 35825, 35826, 35827, 35828, 35829, 35830, 35831, 35832, 35833, 35834, 35835, 35836, 35837, 35838, 35839, 35840, 35841, 35842, 35843, 35844, 35845, 35846, 35847, 35848, 35849, 35850, 35851, 35852, 35853, 35854, 35855, 35856, 35857, 35858, 35859, 35860, 35861, 35862, 35863, 35864, 35865, 35866, 35867, 35868, 35869, 35870, 35871, 35872, 35873, 35874, 35875, 35876, 35877, 35878, 35879, 35880, 35881, 35882, 35883, 35884, 35885, 35886, 35887, 35888, 35889, 35890, 35891, 35892, 35893, 35894, 35895, 35896, 35897, 35898, 35899, 35900, 35901, 35902, 35903, 35904, 35905, 35906, 35907, 35908, 35909, 35910, 35911, 35912, 35913, 35914, 35915, 35916, 35917, 35918, 35919, 35920, 35921, 35922, 35923, 35924, 35925, 35926, 35927, 35928, 35929, 35930, 35931, 35932, 35933, 35934, 35935, 35936, 35937, 35938, 35939, 35940, 35941, 35942, 35943, 35944, 35945, 35946, 35947, 35948, 35949, 35950, 35951, 35952, 35953, 35954, 35955, 35956, 35957, 35958, 35959, 35960, 35961, 35962, 35963, 35964, 35965, 35966, 35967, 35968, 35969, 35970, 35971, 35972, 35973, 35974, 35975, 35976, 35977, 35978, 35979, 35980, 35981, 35982, 35983, 35984, 35985, 35986, 35987, 35988, 35989, 35990, 35991, 35992, 35993, 35994, 35995, 35996, 35997, 35998, 35999, 36000, 36001, 36002, 36003, 36004, 36005, 36006, 36007, 36008, 36009, 36010, 36011, 36012, 36013, 36014, 36015, 36016, 36017, 36018, 36019, 36020, 36021, 36022, 36023, 36024, 36025, 36026, 36027, 36028, 36029, 36030, 36031, 36032, 36033, 36034, 36035, 36036, 36037, 36038, 36039, 36040, 36041, 36042, 36043, 36044, 36045, 36046, 36047, 36048, 36049, 36050, 36051, 36052, 36053, 36054, 36055, 36056, 36057, 36058, 36059, 36060, 36061, 36062, 36063, 36064, 36065, 36066, 36067, 36068, 36069, 36070, 36071, 36072, 36073, 36074, 36075, 36076, 36077, 36078, 36079, 36080, 36081, 36082, 36083, 36084, 36085, 36086, 36087, 36088, 36089, 36090, 36091, 36092, 36093, 36094, 36095, 36096, 36097, 36098, 36099, 36100, 36101, 36102, 36103, 36104, 36105, 36106, 36107, 36108, 36109, 36110, 36111, 36112, 36113, 36114, 36115, 36116, 36117, 36118, 36119, 36120, 36121, 36122, 36123, 36124, 36125, 36126, 36127, 36128, 36129, 36130, 36131, 36132, 36133, 36134, 36135, 36136, 36137, 36138, 36139, 36140, 36141, 36142, 36143, 36144, 36145, 36146, 36147, 36148, 36149, 36150, 36151, 36152, 36153, 36154, 36155, 36156, 36157, 36158, 36159, 36160, 36161, 36162, 36163, 36164, 36165, 36166, 36167, 36168, 36169, 36170, 36171, 36172, 36173, 36174, 36175, 36176, 36177, 36178, 36179, 36180, 36181, 36182, 36183, 36184, 36185, 36186, 36187, 36188, 36189, 36190, 36191, 36192, 36193, 36194, 36195, 36196, 36197, 36198, 36199, 36200, 36201, 36202, 36203, 36204, 36205, 36206, 36207, 36208, 36209, 36210, 36211, 36212, 36213, 36214, 36215, 36216, 36217, 36218, 36219, 36220, 36221, 36222, 36223, 36224, 36225, 36226, 36227, 36228, 36229, 36230, 36231, 36232, 36233, 36234, 36235, 36236, 36237, 36238, 36239, 36240, 36241, 36242, 36243, 36244, 36245, 36246, 36247, 36248, 36249, 36250, 36251, 36252, 36253, 36254, 36255, 36256, 36257, 36258, 36259, 36260, 36261, 36262, 36263, 36264, 36265, 36266, 36267, 36268, 36269, 36270, 36271, 36272, 36273, 36274, 36275, 36276, 36277, 36278, 36279, 36280, 36281, 36282, 36283, 36284, 36285, 36286, 36287, 36288, 36289, 36290, 36291, 36292, 36293, 36294, 36295, 36296, 36297, 36298, 36299, 36300, 36301, 36302, 36303, 36304, 36305, 36306, 36307, 36308, 36309, 36310, 36311, 36312, 36313, 36314, 36315, 36316, 36317, 36318, 36319, 36320, 36321, 36322, 36323, 36324, 36325, 36326, 36327, 36328, 36329, 36330, 36331, 36332, 36333, 36334, 36335, 36336, 36337, 36338, 36339, 36340, 36341, 36342, 36343, 36344, 36345, 36346, 36347, 36348, 36349, 36350, 36351, 36352, 36353, 36354, 36355, 36356, 36357, 36358, 36359, 36360, 36361, 36362, 36363, 36364, 36365, 36366, 36367, 36368, 36369, 36370, 36371, 36372, 36373, 36374, 36375, 36376, 36377, 36378, 36379, 36380, 36381, 36382, 36383, 36384, 36385, 36386, 36387, 36388, 36389, 36390, 36391, 36392, 36393, 36394, 36395, 36396, 36397, 36398, 36399, 36400, 36401, 36402, 36403, 36404, 36405, 36406, 36407, 36408, 36409, 36410, 36411, 36412, 36413, 36414, 36415, 36416, 36417, 36418, 36419, 36420, 36421, 36422, 36423, 36424, 36425, 36426, 36427, 36428, 36429, 36430, 36431, 36432, 36433, 36434, 36435, 36436, 36437, 36438, 36439, 36440, 36441, 36442, 36443, 36444, 36445, 36446, 36447, 36448, 36449, 36450, 36451, 36452, 36453, 36454, 36455, 36456, 36457, 36458, 36459, 36460, 36461, 36462, 36463, 36464, 36465, 36466, 36467, 36468, 36469, 36470, 36471, 36472, 36473, 36474, 36475, 36476, 36477, 36478, 36479, 36480, 36481, 36482, 36483, 36484, 36485, 36486, 36487, 36488, 36489, 36490, 36491, 36492, 36493, 36494, 36495, 36496, 36497, 36498, 36499, 36500, 36501, 36502, 36503, 36504, 36505, 36506, 36507, 36508, 36509, 36510, 36511, 36512, 36513, 36514, 36515, 36516, 36517, 36518, 36519, 36520, 36521, 36522, 36523, 36524, 36525, 36526, 36527, 36528, 36529, 36530, 36531, 36532, 36533, 36534, 36535, 36536, 36537, 36538, 36539, 36540, 36541, 36542, 36543, 36544, 36545, 36546, 36547, 36548, 36549, 36550, 36551, 36552, 36553, 36554, 36555, 36556, 36557, 36558, 36559, 36560, 36561, 36562, 36563, 36564, 36565, 36566, 36567, 36568, 36569, 36570, 36571, 36572, 36573, 36574, 36575, 36576, 36577, 36578, 36579, 36580, 36581, 36582, 36583, 36584, 36585, 36586, 36587, 36588, 36589, 36590, 36591, 36592, 36593, 36594, 36595, 36596, 36597, 36598, 36599, 36600, 36601, 36602, 36603, 36604, 36605, 36606, 36607, 36608, 36609, 36610, 36611, 36612, 36613, 36614, 36615, 36616, 36617, 36618, 36619, 36620, 36621, 36622, 36623, 36624, 36625, 36626, 36627, 36628, 36629, 36630, 36631, 36632, 36633, 36634, 36635, 36636, 36637, 36638, 36639, 36640, 36641, 36642, 36643, 36644, 36645, 36646, 36647, 36648, 36649, 36650, 36651, 36652, 36653, 36654, 36655, 36656, 36657, 36658, 36659, 36660, 36661, 36662, 36663, 36664, 36665, 36666, 36667, 36668, 36669, 36670, 36671, 36672, 36673, 36674, 36675, 36676, 36677, 36678, 36679, 36680, 36681, 36682, 36683, 36684, 36685, 36686, 36687, 36688, 36689, 36690, 36691, 36692, 36693, 36694, 36695, 36696, 36697, 36698, 36699, 36700, 36701, 36702, 36703, 36704, 36705, 36706, 36707, 36708, 36709, 36710, 36711, 36712, 36713, 36714, 36715, 36716, 36717, 36718, 36719, 36720, 36721, 36722, 36723, 36724, 36725, 36726, 36727, 36728, 36729, 36730, 36731, 36732, 36733, 36734, 36735, 36736, 36737, 36738, 36739, 36740, 36741, 36742, 36743, 36744, 36745, 36746, 36747, 36748, 36749, 36750, 36751, 36752, 36753, 36754, 36755, 36756, 36757, 36758, 36759, 36760, 36761, 36762, 36763, 36764, 36765, 36766, 36767, 36768, 36769, 36770, 36771, 36772, 36773, 36774, 36775, 36776, 36777, 36778, 36779, 36780, 36781, 36782, 36783, 36784, 36785, 36786, 36787, 36788, 36789, 36790, 36791, 36792, 36793, 36794, 36795, 36796, 36797, 36798, 36799, 36800, 36801, 36802, 36803, 36804, 36805, 36806, 36807, 36808, 36809, 36810, 36811, 36812, 36813, 36814, 36815, 36816, 36817, 36818, 36819, 36820, 36821, 36822, 36823, 36824, 36825, 36826, 36827, 36828, 36829, 36830, 36831, 36832, 36833, 36834, 36835, 36836, 36837, 36838, 36839, 36840, 36841, 36842, 36843, 36844, 36845, 36846, 36847, 36848, 36849, 36850, 36851, 36852, 36853, 36854, 36855, 36856, 36857, 36858, 36859, 36860, 36861, 36862, 36863, 36864, 36865, 36866, 36867, 36868, 36869, 36870, 36871, 36872, 36873, 36874, 36875, 36876, 36877, 36878, 36879, 36880, 36881, 36882, 36883, 36884, 36885, 36886, 36887, 36888, 36889, 36890, 36891, 36892, 36893, 36894, 36895, 36896, 36897, 36898, 36899, 36900, 36901, 36902, 36903, 36904, 36905, 36906, 36907, 36908, 36909, 36910, 36911, 36912, 36913, 36914, 36915, 36916, 36917, 36918, 36919, 36920, 36921, 36922, 36923, 36924, 36925, 36926, 36927, 36928, 36929, 36930, 36931, 36932, 36933, 36934, 36935, 36936, 36937, 36938, 36939, 36940, 36941, 36942, 36943, 36944, 36945, 36946, 36947, 36948, 36949, 36950, 36951, 36952, 36953, 36954, 36955, 36956, 36957, 36958, 36959, 36960, 36961, 36962, 36963, 36964, 36965, 36966, 36967, 36968, 36969, 36970, 36971, 36972, 36973, 36974, 36975, 36976, 36977, 36978, 36979, 36980, 36981, 36982, 36983, 36984, 36985, 36986, 36987, 36988, 36989, 36990, 36991, 36992, 36993, 36994, 36995, 36996, 36997, 36998, 36999, 37000, 37001, 37002, 37003, 37004, 37005, 37006, 37007, 37008, 37009, 37010, 37011, 37012, 37013, 37014, 37015, 37016, 37017, 37018, 37019, 37020, 37021, 37022, 37023, 37024, 37025, 37026, 37027, 37028, 37029, 37030, 37031, 37032, 37033, 37034, 37035, 37036, 37037, 37038, 37039, 37040, 37041, 37042, 37043, 37044, 37045, 37046, 37047, 37048, 37049, 37050, 37051, 37052, 37053, 37054, 37055, 37056, 37057, 37058, 37059, 37060, 37061, 37062, 37063, 37064, 37065, 37066, 37067, 37068, 37069, 37070, 37071, 37072, 37073, 37074, 37075, 37076, 37077, 37078, 37079, 37080, 37081, 37082, 37083, 37084, 37085, 37086, 37087, 37088, 37089, 37090, 37091, 37092, 37093, 37094, 37095, 37096, 37097, 37098, 37099, 37100, 37101, 37102, 37103, 37104, 37105, 37106, 37107, 37108, 37109, 37110, 37111, 37112, 37113, 37114, 37115, 37116, 37117, 37118, 37119, 37120, 37121, 37122, 37123, 37124, 37125, 37126, 37127, 37128, 37129, 37130, 37131, 37132, 37133, 37134, 37135, 37136, 37137, 37138, 37139, 37140, 37141, 37142, 37143, 37144, 37145, 37146, 37147, 37148, 37149, 37150, 37151, 37152, 37153, 37154, 37155, 37156, 37157, 37158, 37159, 37160, 37161, 37162, 37163, 37164, 37165, 37166, 37167, 37168, 37169, 37170, 37171, 37172, 37173, 37174, 37175, 37176, 37177, 37178, 37179, 37180, 37181, 37182, 37183, 37184, 37185, 37186, 37187, 37188, 37189, 37190, 37191, 37192, 37193, 37194, 37195, 37196, 37197, 37198, 37199, 37200, 37201, 37202, 37203, 37204, 37205, 37206, 37207, 37208, 37209, 37210, 37211, 37212, 37213, 37214, 37215, 37216, 37217, 37218, 37219, 37220, 37221, 37222, 37223, 37224, 37225, 37226, 37227, 37228, 37229, 37230, 37231, 37232, 37233, 37234, 37235, 37236, 37237, 37238, 37239, 37240, 37241, 37242, 37243, 37244, 37245, 37246, 37247, 37248, 37249, 37250, 37251, 37252, 37253, 37254, 37255, 37256, 37257, 37258, 37259, 37260, 37261, 37262, 37263, 37264, 37265, 37266, 37267, 37268, 37269, 37270, 37271, 37272, 37273, 37274, 37275, 37276, 37277, 37278, 37279, 37280, 37281, 37282, 37283, 37284, 37285, 37286, 37287, 37288, 37289, 37290, 37291, 37292, 37293, 37294, 37295, 37296, 37297, 37298, 37299, 37300, 37301, 37302, 37303, 37304, 37305, 37306, 37307, 37308, 37309, 37310, 37311, 37312, 37313, 37314, 37315, 37316, 37317, 37318, 37319, 37320, 37321, 37322, 37323, 37324, 37325, 37326, 37327, 37328, 37329, 37330, 37331, 37332, 37333, 37334, 37335, 37336, 37337, 37338, 37339, 37340, 37341, 37342, 37343, 37344, 37345, 37346, 37347, 37348, 37349, 37350, 37351, 37352, 37353, 37354, 37355, 37356, 37357, 37358, 37359, 37360, 37361, 37362, 37363, 37364, 37365, 37366, 37367, 37368, 37369, 37370, 37371, 37372, 37373, 37374, 37375, 37376, 37377, 37378, 37379, 37380, 37381, 37382, 37383, 37384, 37385, 37386, 37387, 37388, 37389, 37390, 37391, 37392, 37393, 37394, 37395, 37396, 37397, 37398, 37399, 37400, 37401, 37402, 37403, 37404, 37405, 37406, 37407, 37408, 37409, 37410, 37411, 37412, 37413, 37414, 37415, 37416, 37417, 37418, 37419, 37420, 37421, 37422, 37423, 37424, 37425, 37426, 37427, 37428, 37429, 37430, 37431, 37432, 37433, 37434, 37435, 37436, 37437, 37438, 37439, 37440, 37441, 37442, 37443, 37444, 37445, 37446, 37447, 37448, 37449, 37450, 37451, 37452, 37453, 37454, 37455, 37456, 37457, 37458, 37459, 37460, 37461, 37462, 37463, 37464, 37465, 37466, 37467, 37468, 37469, 37470, 37471, 37472, 37473, 37474, 37475, 37476, 37477, 37478, 37479, 37480, 37481, 37482, 37483, 37484, 37485, 37486, 37487, 37488, 37489, 37490, 37491, 37492, 37493, 37494, 37495, 37496, 37497, 37498, 37499, 37500, 37501, 37502, 37503, 37504, 37505, 37506, 37507, 37508, 37509, 37510, 37511, 37512, 37513, 37514, 37515, 37516, 37517, 37518, 37519, 37520, 37521, 37522, 37523, 37524, 37525, 37526, 37527, 37528, 37529, 37530, 37531, 37532, 37533, 37534, 37535, 37536, 37537, 37538, 37539, 37540, 37541, 37542, 37543, 37544, 37545, 37546, 37547, 37548, 37549, 37550, 37551, 37552, 37553, 37554, 37555, 37556, 37557, 37558, 37559, 37560, 37561, 37562, 37563, 37564, 37565, 37566, 37567, 37568, 37569, 37570, 37571, 37572, 37573, 37574, 37575, 37576, 37577, 37578, 37579, 37580, 37581, 37582, 37583, 37584, 37585, 37586, 37587, 37588, 37589, 37590, 37591, 37592, 37593, 37594, 37595, 37596, 37597, 37598, 37599, 37600, 37601, 37602, 37603, 37604, 37605, 37606, 37607, 37608, 37609, 37610, 37611, 37612, 37613, 37614, 37615, 37616, 37617, 37618, 37619, 37620, 37621, 37622, 37623, 37624, 37625, 37626, 37627, 37628, 37629, 37630, 37631, 37632, 37633, 37634, 37635, 37636, 37637, 37638, 37639, 37640, 37641, 37642, 37643, 37644, 37645, 37646, 37647, 37648, 37649, 37650, 37651, 37652, 37653, 37654, 37655, 37656, 37657, 37658, 37659, 37660, 37661, 37662, 37663, 37664, 37665, 37666, 37667, 37668, 37669, 37670, 37671, 37672, 37673, 37674, 37675, 37676, 37677, 37678, 37679, 37680, 37681, 37682, 37683, 37684, 37685, 37686, 37687, 37688, 37689, 37690, 37691, 37692, 37693, 37694, 37695, 37696, 37697, 37698, 37699, 37700, 37701, 37702, 37703, 37704, 37705, 37706, 37707, 37708, 37709, 37710, 37711, 37712, 37713, 37714, 37715, 37716, 37717, 37718, 37719, 37720, 37721, 37722, 37723, 37724, 37725, 37726, 37727, 37728, 37729, 37730, 37731, 37732, 37733, 37734, 37735, 37736, 37737, 37738, 37739, 37740, 37741, 37742, 37743, 37744, 37745, 37746, 37747, 37748, 37749, 37750, 37751, 37752, 37753, 37754, 37755, 37756, 37757, 37758, 37759, 37760, 37761, 37762, 37763, 37764, 37765, 37766, 37767, 37768, 37769, 37770, 37771, 37772, 37773, 37774, 37775, 37776, 37777, 37778, 37779, 37780, 37781, 37782, 37783, 37784, 37785, 37786, 37787, 37788, 37789, 37790, 37791, 37792, 37793, 37794, 37795, 37796, 37797, 37798, 37799, 37800, 37801, 37802, 37803, 37804, 37805, 37806, 37807, 37808, 37809, 37810, 37811, 37812, 37813, 37814, 37815, 37816, 37817, 37818, 37819, 37820, 37821, 37822, 37823, 37824, 37825, 37826, 37827, 37828, 37829, 37830, 37831, 37832, 37833, 37834, 37835, 37836, 37837, 37838, 37839, 37840, 37841, 37842, 37843, 37844, 37845, 37846, 37847, 37848, 37849, 37850, 37851, 37852, 37853, 37854, 37855, 37856, 37857, 37858, 37859, 37860, 37861, 37862, 37863, 37864, 37865, 37866, 37867, 37868, 37869, 37870, 37871, 37872, 37873, 37874, 37875, 37876, 37877, 37878, 37879, 37880, 37881, 37882, 37883, 37884, 37885, 37886, 37887, 37888, 37889, 37890, 37891, 37892, 37893, 37894, 37895, 37896, 37897, 37898, 37899, 37900, 37901, 37902, 37903, 37904, 37905, 37906, 37907, 37908, 37909, 37910, 37911, 37912, 37913, 37914, 37915, 37916, 37917, 37918, 37919, 37920, 37921, 37922, 37923, 37924, 37925, 37926, 37927, 37928, 37929, 37930, 37931, 37932, 37933, 37934, 37935, 37936, 37937, 37938, 37939, 37940, 37941, 37942, 37943, 37944, 37945, 37946, 37947, 37948, 37949, 37950, 37951, 37952, 37953, 37954, 37955, 37956, 37957, 37958, 37959, 37960, 37961, 37962, 37963, 37964, 37965, 37966, 37967, 37968, 37969, 37970, 37971, 37972, 37973, 37974, 37975, 37976, 37977, 37978, 37979, 37980, 37981, 37982, 37983, 37984, 37985, 37986, 37987, 37988, 37989, 37990, 37991, 37992, 37993, 37994, 37995, 37996, 37997, 37998, 37999, 38000, 38001, 38002, 38003, 38004, 38005, 38006, 38007, 38008, 38009, 38010, 38011, 38012, 38013, 38014, 38015, 38016, 38017, 38018, 38019, 38020, 38021, 38022, 38023, 38024, 38025, 38026, 38027, 38028, 38029, 38030, 38031, 38032, 38033, 38034, 38035, 38036, 38037, 38038, 38039, 38040, 38041, 38042, 38043, 38044, 38045, 38046, 38047, 38048, 38049, 38050, 38051, 38052, 38053, 38054, 38055, 38056, 38057, 38058, 38059, 38060, 38061, 38062, 38063, 38064, 38065, 38066, 38067, 38068, 38069, 38070, 38071, 38072, 38073, 38074, 38075, 38076, 38077, 38078, 38079, 38080, 38081, 38082, 38083, 38084, 38085, 38086, 38087, 38088, 38089, 38090, 38091, 38092, 38093, 38094, 38095, 38096, 38097, 38098, 38099, 38100, 38101, 38102, 38103, 38104, 38105, 38106, 38107, 38108, 38109, 38110, 38111, 38112, 38113, 38114, 38115, 38116, 38117, 38118, 38119, 38120, 38121, 38122, 38123, 38124, 38125, 38126, 38127, 38128, 38129, 38130, 38131, 38132, 38133, 38134, 38135, 38136, 38137, 38138, 38139, 38140, 38141, 38142, 38143, 38144, 38145, 38146, 38147, 38148, 38149, 38150, 38151, 38152, 38153, 38154, 38155, 38156, 38157, 38158, 38159, 38160, 38161, 38162, 38163, 38164, 38165, 38166, 38167, 38168, 38169, 38170, 38171, 38172, 38173, 38174, 38175, 38176, 38177, 38178, 38179, 38180, 38181, 38182, 38183, 38184, 38185, 38186, 38187, 38188, 38189, 38190, 38191, 38192, 38193, 38194, 38195, 38196, 38197, 38198, 38199, 38200, 38201, 38202, 38203, 38204, 38205, 38206, 38207, 38208, 38209, 38210, 38211, 38212, 38213, 38214, 38215, 38216, 38217, 38218, 38219, 38220, 38221, 38222, 38223, 38224, 38225, 38226, 38227, 38228, 38229, 38230, 38231, 38232, 38233, 38234, 38235, 38236, 38237, 38238, 38239, 38240, 38241, 38242, 38243, 38244, 38245, 38246, 38247, 38248, 38249, 38250, 38251, 38252, 38253, 38254, 38255, 38256, 38257, 38258, 38259, 38260, 38261, 38262, 38263, 38264, 38265, 38266, 38267, 38268, 38269, 38270, 38271, 38272, 38273, 38274, 38275, 38276, 38277, 38278, 38279, 38280, 38281, 38282, 38283, 38284, 38285, 38286, 38287, 38288, 38289, 38290, 38291, 38292, 38293, 38294, 38295, 38296, 38297, 38298, 38299, 38300, 38301, 38302, 38303, 38304, 38305, 38306, 38307, 38308, 38309, 38310, 38311, 38312, 38313, 38314, 38315, 38316, 38317, 38318, 38319, 38320, 38321, 38322, 38323, 38324, 38325, 38326, 38327, 38328, 38329, 38330, 38331, 38332, 38333, 38334, 38335, 38336, 38337, 38338, 38339, 38340, 38341, 38342, 38343, 38344, 38345, 38346, 38347, 38348, 38349, 38350, 38351, 38352, 38353, 38354, 38355, 38356, 38357, 38358, 38359, 38360, 38361, 38362, 38363, 38364, 38365, 38366, 38367, 38368, 38369, 38370, 38371, 38372, 38373, 38374, 38375, 38376, 38377, 38378, 38379, 38380, 38381, 38382, 38383, 38384, 38385, 38386, 38387, 38388, 38389, 38390, 38391, 38392, 38393, 38394, 38395, 38396, 38397, 38398, 38399, 38400, 38401, 38402, 38403, 38404, 38405, 38406, 38407, 38408, 38409, 38410, 38411, 38412, 38413, 38414, 38415, 38416, 38417, 38418, 38419, 38420, 38421, 38422, 38423, 38424, 38425, 38426, 38427, 38428, 38429, 38430, 38431, 38432, 38433, 38434, 38435, 38436, 38437, 38438, 38439, 38440, 38441, 38442, 38443, 38444, 38445, 38446, 38447, 38448, 38449, 38450, 38451, 38452, 38453, 38454, 38455, 38456, 38457, 38458, 38459, 38460, 38461, 38462, 38463, 38464, 38465, 38466, 38467, 38468, 38469, 38470, 38471, 38472, 38473, 38474, 38475, 38476, 38477, 38478, 38479, 38480, 38481, 38482, 38483, 38484, 38485, 38486, 38487, 38488, 38489, 38490, 38491, 38492, 38493, 38494, 38495, 38496, 38497, 38498, 38499, 38500, 38501, 38502, 38503, 38504, 38505, 38506, 38507, 38508, 38509, 38510, 38511, 38512, 38513, 38514, 38515, 38516, 38517, 38518, 38519, 38520, 38521, 38522, 38523, 38524, 38525, 38526, 38527, 38528, 38529, 38530, 38531, 38532, 38533, 38534, 38535, 38536, 38537, 38538, 38539, 38540, 38541, 38542, 38543, 38544, 38545, 38546, 38547, 38548, 38549, 38550, 38551, 38552, 38553, 38554, 38555, 38556, 38557, 38558, 38559, 38560, 38561, 38562, 38563, 38564, 38565, 38566, 38567, 38568, 38569, 38570, 38571, 38572, 38573, 38574, 38575, 38576, 38577, 38578, 38579, 38580, 38581, 38582, 38583, 38584, 38585, 38586, 38587, 38588, 38589, 38590, 38591, 38592, 38593, 38594, 38595, 38596, 38597, 38598, 38599, 38600, 38601, 38602, 38603, 38604, 38605, 38606, 38607, 38608, 38609, 38610, 38611, 38612, 38613, 38614, 38615, 38616, 38617, 38618, 38619, 38620, 38621, 38622, 38623, 38624, 38625, 38626, 38627, 38628, 38629, 38630, 38631, 38632, 38633, 38634, 38635, 38636, 38637, 38638, 38639, 38640, 38641, 38642, 38643, 38644, 38645, 38646, 38647, 38648, 38649, 38650, 38651, 38652, 38653, 38654, 38655, 38656, 38657, 38658, 38659, 38660, 38661, 38662, 38663, 38664, 38665, 38666, 38667, 38668, 38669, 38670, 38671, 38672, 38673, 38674, 38675, 38676, 38677, 38678, 38679, 38680, 38681, 38682, 38683, 38684, 38685, 38686, 38687, 38688, 38689, 38690, 38691, 38692, 38693, 38694, 38695, 38696, 38697, 38698, 38699, 38700, 38701, 38702, 38703, 38704, 38705, 38706, 38707, 38708, 38709, 38710, 38711, 38712, 38713, 38714, 38715, 38716, 38717, 38718, 38719, 38720, 38721, 38722, 38723, 38724, 38725, 38726, 38727, 38728, 38729, 38730, 38731, 38732, 38733, 38734, 38735, 38736, 38737, 38738, 38739, 38740, 38741, 38742, 38743, 38744, 38745, 38746, 38747, 38748, 38749, 38750, 38751, 38752, 38753, 38754, 38755, 38756, 38757, 38758, 38759, 38760, 38761, 38762, 38763, 38764, 38765, 38766, 38767, 38768, 38769, 38770, 38771, 38772, 38773, 38774, 38775, 38776, 38777, 38778, 38779, 38780, 38781, 38782, 38783, 38784, 38785, 38786, 38787, 38788, 38789, 38790, 38791, 38792, 38793, 38794, 38795, 38796, 38797, 38798, 38799, 38800, 38801, 38802, 38803, 38804, 38805, 38806, 38807, 38808, 38809, 38810, 38811, 38812, 38813, 38814, 38815, 38816, 38817, 38818, 38819, 38820, 38821, 38822, 38823, 38824, 38825, 38826, 38827, 38828, 38829, 38830, 38831, 38832, 38833, 38834, 38835, 38836, 38837, 38838, 38839, 38840, 38841, 38842, 38843, 38844, 38845, 38846, 38847, 38848, 38849, 38850, 38851, 38852, 38853, 38854, 38855, 38856, 38857, 38858, 38859, 38860, 38861, 38862, 38863, 38864, 38865, 38866, 38867, 38868, 38869, 38870, 38871, 38872, 38873, 38874, 38875, 38876, 38877, 38878, 38879, 38880, 38881, 38882, 38883, 38884, 38885, 38886, 38887, 38888, 38889, 38890, 38891, 38892, 38893, 38894, 38895, 38896, 38897, 38898, 38899, 38900, 38901, 38902, 38903, 38904, 38905, 38906, 38907, 38908, 38909, 38910, 38911, 38912, 38913, 38914, 38915, 38916, 38917, 38918, 38919, 38920, 38921, 38922, 38923, 38924, 38925, 38926, 38927, 38928, 38929, 38930, 38931, 38932, 38933, 38934, 38935, 38936, 38937, 38938, 38939, 38940, 38941, 38942, 38943, 38944, 38945, 38946, 38947, 38948, 38949, 38950, 38951, 38952, 38953, 38954, 38955, 38956, 38957, 38958, 38959, 38960, 38961, 38962, 38963, 38964, 38965, 38966, 38967, 38968, 38969, 38970, 38971, 38972, 38973, 38974, 38975, 38976, 38977, 38978, 38979, 38980, 38981, 38982, 38983, 38984, 38985, 38986, 38987, 38988, 38989, 38990, 38991, 38992, 38993, 38994, 38995, 38996, 38997, 38998, 38999, 39000, 39001, 39002, 39003, 39004, 39005, 39006, 39007, 39008, 39009, 39010, 39011, 39012, 39013, 39014, 39015, 39016, 39017, 39018, 39019, 39020, 39021, 39022, 39023, 39024, 39025, 39026, 39027, 39028, 39029, 39030, 39031, 39032, 39033, 39034, 39035, 39036, 39037, 39038, 39039, 39040, 39041, 39042, 39043, 39044, 39045, 39046, 39047, 39048, 39049, 39050, 39051, 39052, 39053, 39054, 39055, 39056, 39057, 39058, 39059, 39060, 39061, 39062, 39063, 39064, 39065, 39066, 39067, 39068, 39069, 39070, 39071, 39072, 39073, 39074, 39075, 39076, 39077, 39078, 39079, 39080, 39081, 39082, 39083, 39084, 39085, 39086, 39087, 39088, 39089, 39090, 39091, 39092, 39093, 39094, 39095, 39096, 39097, 39098, 39099, 39100, 39101, 39102, 39103, 39104, 39105, 39106, 39107, 39108, 39109, 39110, 39111, 39112, 39113, 39114, 39115, 39116, 39117, 39118, 39119, 39120, 39121, 39122, 39123, 39124, 39125, 39126, 39127, 39128, 39129, 39130, 39131, 39132, 39133, 39134, 39135, 39136, 39137, 39138, 39139, 39140, 39141, 39142, 39143, 39144, 39145, 39146, 39147, 39148, 39149, 39150, 39151, 39152, 39153, 39154, 39155, 39156, 39157, 39158, 39159, 39160, 39161, 39162, 39163, 39164, 39165, 39166, 39167, 39168, 39169, 39170, 39171, 39172, 39173, 39174, 39175, 39176, 39177, 39178, 39179, 39180, 39181, 39182, 39183, 39184, 39185, 39186, 39187, 39188, 39189, 39190, 39191, 39192, 39193, 39194, 39195, 39196, 39197, 39198, 39199, 39200, 39201, 39202, 39203, 39204, 39205, 39206, 39207, 39208, 39209, 39210, 39211, 39212, 39213, 39214, 39215, 39216, 39217, 39218, 39219, 39220, 39221, 39222, 39223, 39224, 39225, 39226, 39227, 39228, 39229, 39230, 39231, 39232, 39233, 39234, 39235, 39236, 39237, 39238, 39239, 39240, 39241, 39242, 39243, 39244, 39245, 39246, 39247, 39248, 39249, 39250, 39251, 39252, 39253, 39254, 39255, 39256, 39257, 39258, 39259, 39260, 39261, 39262, 39263, 39264, 39265, 39266, 39267, 39268, 39269, 39270, 39271, 39272, 39273, 39274, 39275, 39276, 39277, 39278, 39279, 39280, 39281, 39282, 39283, 39284, 39285, 39286, 39287, 39288, 39289, 39290, 39291, 39292, 39293, 39294, 39295, 39296, 39297, 39298, 39299, 39300, 39301, 39302, 39303, 39304, 39305, 39306, 39307, 39308, 39309, 39310, 39311, 39312, 39313, 39314, 39315, 39316, 39317, 39318, 39319, 39320, 39321, 39322, 39323, 39324, 39325, 39326, 39327, 39328, 39329, 39330, 39331, 39332, 39333, 39334, 39335, 39336, 39337, 39338, 39339, 39340, 39341, 39342, 39343, 39344, 39345, 39346, 39347, 39348, 39349, 39350, 39351, 39352, 39353, 39354, 39355, 39356, 39357, 39358, 39359, 39360, 39361, 39362, 39363, 39364, 39365, 39366, 39367, 39368, 39369, 39370, 39371, 39372, 39373, 39374, 39375, 39376, 39377, 39378, 39379, 39380, 39381, 39382, 39383, 39384, 39385, 39386, 39387, 39388, 39389, 39390, 39391, 39392, 39393, 39394, 39395, 39396, 39397, 39398, 39399, 39400, 39401, 39402, 39403, 39404, 39405, 39406, 39407, 39408, 39409, 39410, 39411, 39412, 39413, 39414, 39415, 39416, 39417, 39418, 39419, 39420, 39421, 39422, 39423, 39424, 39425, 39426, 39427, 39428, 39429, 39430, 39431, 39432, 39433, 39434, 39435, 39436, 39437, 39438, 39439, 39440, 39441, 39442, 39443, 39444, 39445, 39446, 39447, 39448, 39449, 39450, 39451, 39452, 39453, 39454, 39455, 39456, 39457, 39458, 39459, 39460, 39461, 39462, 39463, 39464, 39465, 39466, 39467, 39468, 39469, 39470, 39471, 39472, 39473, 39474, 39475, 39476, 39477, 39478, 39479, 39480, 39481, 39482, 39483, 39484, 39485, 39486, 39487, 39488, 39489, 39490, 39491, 39492, 39493, 39494, 39495, 39496, 39497, 39498, 39499, 39500, 39501, 39502, 39503, 39504, 39505, 39506, 39507, 39508, 39509, 39510, 39511, 39512, 39513, 39514, 39515, 39516, 39517, 39518, 39519, 39520, 39521, 39522, 39523, 39524, 39525, 39526, 39527, 39528, 39529, 39530, 39531, 39532, 39533, 39534, 39535, 39536, 39537, 39538, 39539, 39540, 39541, 39542, 39543, 39544, 39545, 39546, 39547, 39548, 39549, 39550, 39551, 39552, 39553, 39554, 39555, 39556, 39557, 39558, 39559, 39560, 39561, 39562, 39563, 39564, 39565, 39566, 39567, 39568, 39569, 39570, 39571, 39572, 39573, 39574, 39575, 39576, 39577, 39578, 39579, 39580, 39581, 39582, 39583, 39584, 39585, 39586, 39587, 39588, 39589, 39590, 39591, 39592, 39593, 39594, 39595, 39596, 39597, 39598, 39599, 39600, 39601, 39602, 39603, 39604, 39605, 39606, 39607, 39608, 39609, 39610, 39611, 39612, 39613, 39614, 39615, 39616, 39617, 39618, 39619, 39620, 39621, 39622, 39623, 39624, 39625, 39626, 39627, 39628, 39629, 39630, 39631, 39632, 39633, 39634, 39635, 39636, 39637, 39638, 39639, 39640, 39641, 39642, 39643, 39644, 39645, 39646, 39647, 39648, 39649, 39650, 39651, 39652, 39653, 39654, 39655, 39656, 39657, 39658, 39659, 39660, 39661, 39662, 39663, 39664, 39665, 39666, 39667, 39668, 39669, 39670, 39671, 39672, 39673, 39674, 39675, 39676, 39677, 39678, 39679, 39680, 39681, 39682, 39683, 39684, 39685, 39686, 39687, 39688, 39689, 39690, 39691, 39692, 39693, 39694, 39695, 39696, 39697, 39698, 39699, 39700, 39701, 39702, 39703, 39704, 39705, 39706, 39707, 39708, 39709, 39710, 39711, 39712, 39713, 39714, 39715, 39716, 39717, 39718, 39719, 39720, 39721, 39722, 39723, 39724, 39725, 39726, 39727, 39728, 39729, 39730, 39731, 39732, 39733, 39734, 39735, 39736, 39737, 39738, 39739, 39740, 39741, 39742, 39743, 39744, 39745, 39746, 39747, 39748, 39749, 39750, 39751, 39752, 39753, 39754, 39755, 39756, 39757, 39758, 39759, 39760, 39761, 39762, 39763, 39764, 39765, 39766, 39767, 39768, 39769, 39770, 39771, 39772, 39773, 39774, 39775, 39776, 39777, 39778, 39779, 39780, 39781, 39782, 39783, 39784, 39785, 39786, 39787, 39788, 39789, 39790, 39791, 39792, 39793, 39794, 39795, 39796, 39797, 39798, 39799, 39800, 39801, 39802, 39803, 39804, 39805, 39806, 39807, 39808, 39809, 39810, 39811, 39812, 39813, 39814, 39815, 39816, 39817, 39818, 39819, 39820, 39821, 39822, 39823, 39824, 39825, 39826, 39827, 39828, 39829, 39830, 39831, 39832, 39833, 39834, 39835, 39836, 39837, 39838, 39839, 39840, 39841, 39842, 39843, 39844, 39845, 39846, 39847, 39848, 39849, 39850, 39851, 39852, 39853, 39854, 39855, 39856, 39857, 39858, 39859, 39860, 39861, 39862, 39863, 39864, 39865, 39866, 39867, 39868, 39869, 39870, 39871, 39872, 39873, 39874, 39875, 39876, 39877, 39878, 39879, 39880, 39881, 39882, 39883, 39884, 39885, 39886, 39887, 39888, 39889, 39890, 39891, 39892, 39893, 39894, 39895, 39896, 39897, 39898, 39899, 39900, 39901, 39902, 39903, 39904, 39905, 39906, 39907, 39908, 39909, 39910, 39911, 39912, 39913, 39914, 39915, 39916, 39917, 39918, 39919, 39920, 39921, 39922, 39923, 39924, 39925, 39926, 39927, 39928, 39929, 39930, 39931, 39932, 39933, 39934, 39935, 39936, 39937, 39938, 39939, 39940, 39941, 39942, 39943, 39944, 39945, 39946, 39947, 39948, 39949, 39950, 39951, 39952, 39953, 39954, 39955, 39956, 39957, 39958, 39959, 39960, 39961, 39962, 39963, 39964, 39965, 39966, 39967, 39968, 39969, 39970, 39971, 39972, 39973, 39974, 39975, 39976, 39977, 39978, 39979, 39980, 39981, 39982, 39983, 39984, 39985, 39986, 39987, 39988, 39989, 39990, 39991, 39992, 39993, 39994, 39995, 39996, 39997, 39998, 39999, 40000, 40001, 40002, 40003, 40004, 40005, 40006, 40007, 40008, 40009, 40010, 40011, 40012, 40013, 40014, 40015, 40016, 40017, 40018, 40019, 40020, 40021, 40022, 40023, 40024, 40025, 40026, 40027, 40028, 40029, 40030, 40031, 40032, 40033, 40034, 40035, 40036, 40037, 40038, 40039, 40040, 40041, 40042, 40043, 40044, 40045, 40046, 40047, 40048, 40049, 40050, 40051, 40052, 40053, 40054, 40055, 40056, 40057, 40058, 40059, 40060, 40061, 40062, 40063, 40064, 40065, 40066, 40067, 40068, 40069, 40070, 40071, 40072, 40073, 40074, 40075, 40076, 40077, 40078, 40079, 40080, 40081, 40082, 40083, 40084, 40085, 40086, 40087, 40088, 40089, 40090, 40091, 40092, 40093, 40094, 40095, 40096, 40097, 40098, 40099, 40100, 40101, 40102, 40103, 40104, 40105, 40106, 40107, 40108, 40109, 40110, 40111, 40112, 40113, 40114, 40115, 40116, 40117, 40118, 40119, 40120, 40121, 40122, 40123, 40124, 40125, 40126, 40127, 40128, 40129, 40130, 40131, 40132, 40133, 40134, 40135, 40136, 40137, 40138, 40139, 40140, 40141, 40142, 40143, 40144, 40145, 40146, 40147, 40148, 40149, 40150, 40151, 40152, 40153, 40154, 40155, 40156, 40157, 40158, 40159, 40160, 40161, 40162, 40163, 40164, 40165, 40166, 40167, 40168, 40169, 40170, 40171, 40172, 40173, 40174, 40175, 40176, 40177, 40178, 40179, 40180, 40181, 40182, 40183, 40184, 40185, 40186, 40187, 40188, 40189, 40190, 40191, 40192, 40193, 40194, 40195, 40196, 40197, 40198, 40199, 40200, 40201, 40202, 40203, 40204, 40205, 40206, 40207, 40208, 40209, 40210, 40211, 40212, 40213, 40214, 40215, 40216, 40217, 40218, 40219, 40220, 40221, 40222, 40223, 40224, 40225, 40226, 40227, 40228, 40229, 40230, 40231, 40232, 40233, 40234, 40235, 40236, 40237, 40238, 40239, 40240, 40241, 40242, 40243, 40244, 40245, 40246, 40247, 40248, 40249, 40250, 40251, 40252, 40253, 40254, 40255, 40256, 40257, 40258, 40259, 40260, 40261, 40262, 40263, 40264, 40265, 40266, 40267, 40268, 40269, 40270, 40271, 40272, 40273, 40274, 40275, 40276, 40277, 40278, 40279, 40280, 40281, 40282, 40283, 40284, 40285, 40286, 40287, 40288, 40289, 40290, 40291, 40292, 40293, 40294, 40295, 40296, 40297, 40298, 40299, 40300, 40301, 40302, 40303, 40304, 40305, 40306, 40307, 40308, 40309, 40310, 40311, 40312, 40313, 40314, 40315, 40316, 40317, 40318, 40319, 40320, 40321, 40322, 40323, 40324, 40325, 40326, 40327, 40328, 40329, 40330, 40331, 40332, 40333, 40334, 40335, 40336, 40337, 40338, 40339, 40340, 40341, 40342, 40343, 40344, 40345, 40346, 40347, 40348, 40349, 40350, 40351, 40352, 40353, 40354, 40355, 40356, 40357, 40358, 40359, 40360, 40361, 40362, 40363, 40364, 40365, 40366, 40367, 40368, 40369, 40370, 40371, 40372, 40373, 40374, 40375, 40376, 40377, 40378, 40379, 40380, 40381, 40382, 40383, 40384, 40385, 40386, 40387, 40388, 40389, 40390, 40391, 40392, 40393, 40394, 40395, 40396, 40397, 40398, 40399, 40400, 40401, 40402, 40403, 40404, 40405, 40406, 40407, 40408, 40409, 40410, 40411, 40412, 40413, 40414, 40415, 40416, 40417, 40418, 40419, 40420, 40421, 40422, 40423, 40424, 40425, 40426, 40427, 40428, 40429, 40430, 40431, 40432, 40433, 40434, 40435, 40436, 40437, 40438, 40439, 40440, 40441, 40442, 40443, 40444, 40445, 40446, 40447, 40448, 40449, 40450, 40451, 40452, 40453, 40454, 40455, 40456, 40457, 40458, 40459, 40460, 40461, 40462, 40463, 40464, 40465, 40466, 40467, 40468, 40469, 40470, 40471, 40472, 40473, 40474, 40475, 40476, 40477, 40478, 40479, 40480, 40481, 40482, 40483, 40484, 40485, 40486, 40487, 40488, 40489, 40490, 40491, 40492, 40493, 40494, 40495, 40496, 40497, 40498, 40499, 40500, 40501, 40502, 40503, 40504, 40505, 40506, 40507, 40508, 40509, 40510, 40511, 40512, 40513, 40514, 40515, 40516, 40517, 40518, 40519, 40520, 40521, 40522, 40523, 40524, 40525, 40526, 40527, 40528, 40529, 40530, 40531, 40532, 40533, 40534, 40535, 40536, 40537, 40538, 40539, 40540, 40541, 40542, 40543, 40544, 40545, 40546, 40547, 40548, 40549, 40550, 40551, 40552, 40553, 40554, 40555, 40556, 40557, 40558, 40559, 40560, 40561, 40562, 40563, 40564, 40565, 40566, 40567, 40568, 40569, 40570, 40571, 40572, 40573, 40574, 40575, 40576, 40577, 40578, 40579, 40580, 40581, 40582, 40583, 40584, 40585, 40586, 40587, 40588, 40589, 40590, 40591, 40592, 40593, 40594, 40595, 40596, 40597, 40598, 40599, 40600, 40601, 40602, 40603, 40604, 40605, 40606, 40607, 40608, 40609, 40610, 40611, 40612, 40613, 40614, 40615, 40616, 40617, 40618, 40619, 40620, 40621, 40622, 40623, 40624, 40625, 40626, 40627, 40628, 40629, 40630, 40631, 40632, 40633, 40634, 40635, 40636, 40637, 40638, 40639, 40640, 40641, 40642, 40643, 40644, 40645, 40646, 40647, 40648, 40649, 40650, 40651, 40652, 40653, 40654, 40655, 40656, 40657, 40658, 40659, 40660, 40661, 40662, 40663, 40664, 40665, 40666, 40667, 40668, 40669, 40670, 40671, 40672, 40673, 40674, 40675, 40676, 40677, 40678, 40679, 40680, 40681, 40682, 40683, 40684, 40685, 40686, 40687, 40688, 40689, 40690, 40691, 40692, 40693, 40694, 40695, 40696, 40697, 40698, 40699, 40700, 40701, 40702, 40703, 40704, 40705, 40706, 40707, 40708, 40709, 40710, 40711, 40712, 40713, 40714, 40715, 40716, 40717, 40718, 40719, 40720, 40721, 40722, 40723, 40724, 40725, 40726, 40727, 40728, 40729, 40730, 40731, 40732, 40733, 40734, 40735, 40736, 40737, 40738, 40739, 40740, 40741, 40742, 40743, 40744, 40745, 40746, 40747, 40748, 40749, 40750, 40751, 40752, 40753, 40754, 40755, 40756, 40757, 40758, 40759, 40760, 40761, 40762, 40763, 40764, 40765, 40766, 40767, 40768, 40769, 40770, 40771, 40772, 40773, 40774, 40775, 40776, 40777, 40778, 40779, 40780, 40781, 40782, 40783, 40784, 40785, 40786, 40787, 40788, 40789, 40790, 40791, 40792, 40793, 40794, 40795, 40796, 40797, 40798, 40799, 40800, 40801, 40802, 40803, 40804, 40805, 40806, 40807, 40808, 40809, 40810, 40811, 40812, 40813, 40814, 40815, 40816, 40817, 40818, 40819, 40820, 40821, 40822, 40823, 40824, 40825, 40826, 40827, 40828, 40829, 40830, 40831, 40832, 40833, 40834, 40835, 40836, 40837, 40838, 40839, 40840, 40841, 40842, 40843, 40844, 40845, 40846, 40847, 40848, 40849, 40850, 40851, 40852, 40853, 40854, 40855, 40856, 40857, 40858, 40859, 40860, 40861, 40862, 40863, 40864, 40865, 40866, 40867, 40868, 40869, 40870, 40871, 40872, 40873, 40874, 40875, 40876, 40877, 40878, 40879, 40880, 40881, 40882, 40883, 40884, 40885, 40886, 40887, 40888, 40889, 40890, 40891, 40892, 40893, 40894, 40895, 40896, 40897, 40898, 40899, 40900, 40901, 40902, 40903, 40904, 40905, 40906, 40907, 40908, 40909, 40910, 40911, 40912, 40913, 40914, 40915, 40916, 40917, 40918, 40919, 40920, 40921, 40922, 40923, 40924, 40925, 40926, 40927, 40928, 40929, 40930, 40931, 40932, 40933, 40934, 40935, 40936, 40937, 40938, 40939, 40940, 40941, 40942, 40943, 40944, 40945, 40946, 40947, 40948, 40949, 40950, 40951, 40952, 40953, 40954, 40955, 40956, 40957, 40958, 40959, 40960, 40961, 40962, 40963, 40964, 40965, 40966, 40967, 40968, 40969, 40970, 40971, 40972, 40973, 40974, 40975, 40976, 40977, 40978, 40979, 40980, 40981, 40982, 40983, 40984, 40985, 40986, 40987, 40988, 40989, 40990, 40991, 40992, 40993, 40994, 40995, 40996, 40997, 40998, 40999, 41000, 41001, 41002, 41003, 41004, 41005, 41006, 41007, 41008, 41009, 41010, 41011, 41012, 41013, 41014, 41015, 41016, 41017, 41018, 41019, 41020, 41021, 41022, 41023, 41024, 41025, 41026, 41027, 41028, 41029, 41030, 41031, 41032, 41033, 41034, 41035, 41036, 41037, 41038, 41039, 41040, 41041, 41042, 41043, 41044, 41045, 41046, 41047, 41048, 41049, 41050, 41051, 41052, 41053, 41054, 41055, 41056, 41057, 41058, 41059, 41060, 41061, 41062, 41063, 41064, 41065, 41066, 41067, 41068, 41069, 41070, 41071, 41072, 41073, 41074, 41075, 41076, 41077, 41078, 41079, 41080, 41081, 41082, 41083, 41084, 41085, 41086, 41087, 41088, 41089, 41090, 41091, 41092, 41093, 41094, 41095, 41096, 41097, 41098, 41099, 41100, 41101, 41102, 41103, 41104, 41105, 41106, 41107, 41108, 41109, 41110, 41111, 41112, 41113, 41114, 41115, 41116, 41117, 41118, 41119, 41120, 41121, 41122, 41123, 41124, 41125, 41126, 41127, 41128, 41129, 41130, 41131, 41132, 41133, 41134, 41135, 41136, 41137, 41138, 41139, 41140, 41141, 41142, 41143, 41144, 41145, 41146, 41147, 41148, 41149, 41150, 41151, 41152, 41153, 41154, 41155, 41156, 41157, 41158, 41159, 41160, 41161, 41162, 41163, 41164, 41165, 41166, 41167, 41168, 41169, 41170, 41171, 41172, 41173, 41174, 41175, 41176, 41177, 41178, 41179, 41180, 41181, 41182, 41183, 41184, 41185, 41186, 41187, 41188, 41189, 41190, 41191, 41192, 41193, 41194, 41195, 41196, 41197, 41198, 41199, 41200, 41201, 41202, 41203, 41204, 41205, 41206, 41207, 41208, 41209, 41210, 41211, 41212, 41213, 41214, 41215, 41216, 41217, 41218, 41219, 41220, 41221, 41222, 41223, 41224, 41225, 41226, 41227, 41228, 41229, 41230, 41231, 41232, 41233, 41234, 41235, 41236, 41237, 41238, 41239, 41240, 41241, 41242, 41243, 41244, 41245, 41246, 41247, 41248, 41249, 41250, 41251, 41252, 41253, 41254, 41255, 41256, 41257, 41258, 41259, 41260, 41261, 41262, 41263, 41264, 41265, 41266, 41267, 41268, 41269, 41270, 41271, 41272, 41273, 41274, 41275, 41276, 41277, 41278, 41279, 41280, 41281, 41282, 41283, 41284, 41285, 41286, 41287, 41288, 41289, 41290, 41291, 41292, 41293, 41294, 41295, 41296, 41297, 41298, 41299, 41300, 41301, 41302, 41303, 41304, 41305, 41306, 41307, 41308, 41309, 41310, 41311, 41312, 41313, 41314, 41315, 41316, 41317, 41318, 41319, 41320, 41321, 41322, 41323, 41324, 41325, 41326, 41327, 41328, 41329, 41330, 41331, 41332, 41333, 41334, 41335, 41336, 41337, 41338, 41339, 41340, 41341, 41342, 41343, 41344, 41345, 41346, 41347, 41348, 41349, 41350, 41351, 41352, 41353, 41354, 41355, 41356, 41357, 41358, 41359, 41360, 41361, 41362, 41363, 41364, 41365, 41366, 41367, 41368, 41369, 41370, 41371, 41372, 41373, 41374, 41375, 41376, 41377, 41378, 41379, 41380, 41381, 41382, 41383, 41384, 41385, 41386, 41387, 41388, 41389, 41390, 41391, 41392, 41393, 41394, 41395, 41396, 41397, 41398, 41399, 41400, 41401, 41402, 41403, 41404, 41405, 41406, 41407, 41408, 41409, 41410, 41411, 41412, 41413, 41414, 41415, 41416, 41417, 41418, 41419, 41420, 41421, 41422, 41423, 41424, 41425, 41426, 41427, 41428, 41429, 41430, 41431, 41432, 41433, 41434, 41435, 41436, 41437, 41438, 41439, 41440, 41441, 41442, 41443, 41444, 41445, 41446, 41447, 41448, 41449, 41450, 41451, 41452, 41453, 41454, 41455, 41456, 41457, 41458, 41459, 41460, 41461, 41462, 41463, 41464, 41465, 41466, 41467, 41468, 41469, 41470, 41471, 41472, 41473, 41474, 41475, 41476, 41477, 41478, 41479, 41480, 41481, 41482, 41483, 41484, 41485, 41486, 41487, 41488, 41489, 41490, 41491, 41492, 41493, 41494, 41495, 41496, 41497, 41498, 41499, 41500, 41501, 41502, 41503, 41504, 41505, 41506, 41507, 41508, 41509, 41510, 41511, 41512, 41513, 41514, 41515, 41516, 41517, 41518, 41519, 41520, 41521, 41522, 41523, 41524, 41525, 41526, 41527, 41528, 41529, 41530, 41531, 41532, 41533, 41534, 41535, 41536, 41537, 41538, 41539, 41540, 41541, 41542, 41543, 41544, 41545, 41546, 41547, 41548, 41549, 41550, 41551, 41552, 41553, 41554, 41555, 41556, 41557, 41558, 41559, 41560, 41561, 41562, 41563, 41564, 41565, 41566, 41567, 41568, 41569, 41570, 41571, 41572, 41573, 41574, 41575, 41576, 41577, 41578, 41579, 41580, 41581, 41582, 41583, 41584, 41585, 41586, 41587, 41588, 41589, 41590, 41591, 41592, 41593, 41594, 41595, 41596, 41597, 41598, 41599, 41600, 41601, 41602, 41603, 41604, 41605, 41606, 41607, 41608, 41609, 41610, 41611, 41612, 41613, 41614, 41615, 41616, 41617, 41618, 41619, 41620, 41621, 41622, 41623, 41624, 41625, 41626, 41627, 41628, 41629, 41630, 41631, 41632, 41633, 41634, 41635, 41636, 41637, 41638, 41639, 41640, 41641, 41642, 41643, 41644, 41645, 41646, 41647, 41648, 41649, 41650, 41651, 41652, 41653, 41654, 41655, 41656, 41657, 41658, 41659, 41660, 41661, 41662, 41663, 41664, 41665, 41666, 41667, 41668, 41669, 41670, 41671, 41672, 41673, 41674, 41675, 41676, 41677, 41678, 41679, 41680, 41681, 41682, 41683, 41684, 41685, 41686, 41687, 41688, 41689, 41690, 41691, 41692, 41693, 41694, 41695, 41696, 41697, 41698, 41699, 41700, 41701, 41702, 41703, 41704, 41705, 41706, 41707, 41708, 41709, 41710, 41711, 41712, 41713, 41714, 41715, 41716, 41717, 41718, 41719, 41720, 41721, 41722, 41723, 41724, 41725, 41726, 41727, 41728, 41729, 41730, 41731, 41732, 41733, 41734, 41735, 41736, 41737, 41738, 41739, 41740, 41741, 41742, 41743, 41744, 41745, 41746, 41747, 41748, 41749, 41750, 41751, 41752, 41753, 41754, 41755, 41756, 41757, 41758, 41759, 41760, 41761, 41762, 41763, 41764, 41765, 41766, 41767, 41768, 41769, 41770, 41771, 41772, 41773, 41774, 41775, 41776, 41777, 41778, 41779, 41780, 41781, 41782, 41783, 41784, 41785, 41786, 41787, 41788, 41789, 41790, 41791, 41792, 41793, 41794, 41795, 41796, 41797, 41798, 41799, 41800, 41801, 41802, 41803, 41804, 41805, 41806, 41807, 41808, 41809, 41810, 41811, 41812, 41813, 41814, 41815, 41816, 41817, 41818, 41819, 41820, 41821, 41822, 41823, 41824, 41825, 41826, 41827, 41828, 41829, 41830, 41831, 41832, 41833, 41834, 41835, 41836, 41837, 41838, 41839, 41840, 41841, 41842, 41843, 41844, 41845, 41846, 41847, 41848, 41849, 41850, 41851, 41852, 41853, 41854, 41855, 41856, 41857, 41858, 41859, 41860, 41861, 41862, 41863, 41864, 41865, 41866, 41867, 41868, 41869, 41870, 41871, 41872, 41873, 41874, 41875, 41876, 41877, 41878, 41879, 41880, 41881, 41882, 41883, 41884, 41885, 41886, 41887, 41888, 41889, 41890, 41891, 41892, 41893, 41894, 41895, 41896, 41897, 41898, 41899, 41900, 41901, 41902, 41903, 41904, 41905, 41906, 41907, 41908, 41909, 41910, 41911, 41912, 41913, 41914, 41915, 41916, 41917, 41918, 41919, 41920, 41921, 41922, 41923, 41924, 41925, 41926, 41927, 41928, 41929, 41930, 41931, 41932, 41933, 41934, 41935, 41936, 41937, 41938, 41939, 41940, 41941, 41942, 41943, 41944, 41945, 41946, 41947, 41948, 41949, 41950, 41951, 41952, 41953, 41954, 41955, 41956, 41957, 41958, 41959, 41960, 41961, 41962, 41963, 41964, 41965, 41966, 41967, 41968, 41969, 41970, 41971, 41972, 41973, 41974, 41975, 41976, 41977, 41978, 41979, 41980, 41981, 41982, 41983, 41984, 41985, 41986, 41987, 41988, 41989, 41990, 41991, 41992, 41993, 41994, 41995, 41996, 41997, 41998, 41999, 42000, 42001, 42002, 42003, 42004, 42005, 42006, 42007, 42008, 42009, 42010, 42011, 42012, 42013, 42014, 42015, 42016, 42017, 42018, 42019, 42020, 42021, 42022, 42023, 42024, 42025, 42026, 42027, 42028, 42029, 42030, 42031, 42032, 42033, 42034, 42035, 42036, 42037, 42038, 42039, 42040, 42041, 42042, 42043, 42044, 42045, 42046, 42047, 42048, 42049, 42050, 42051, 42052, 42053, 42054, 42055, 42056, 42057, 42058, 42059, 42060, 42061, 42062, 42063, 42064, 42065, 42066, 42067, 42068, 42069, 42070, 42071, 42072, 42073, 42074, 42075, 42076, 42077, 42078, 42079, 42080, 42081, 42082, 42083, 42084, 42085, 42086, 42087, 42088, 42089, 42090, 42091, 42092, 42093, 42094, 42095, 42096, 42097, 42098, 42099, 42100, 42101, 42102, 42103, 42104, 42105, 42106, 42107, 42108, 42109, 42110, 42111, 42112, 42113, 42114, 42115, 42116, 42117, 42118, 42119, 42120, 42121, 42122, 42123, 42124, 42125, 42126, 42127, 42128, 42129, 42130, 42131, 42132, 42133, 42134, 42135, 42136, 42137, 42138, 42139, 42140, 42141, 42142, 42143, 42144, 42145, 42146, 42147, 42148, 42149, 42150, 42151, 42152, 42153, 42154, 42155, 42156, 42157, 42158, 42159, 42160, 42161, 42162, 42163, 42164, 42165, 42166, 42167, 42168, 42169, 42170, 42171, 42172, 42173, 42174, 42175, 42176, 42177, 42178, 42179, 42180, 42181, 42182, 42183, 42184, 42185, 42186, 42187, 42188, 42189, 42190, 42191, 42192, 42193, 42194, 42195, 42196, 42197, 42198, 42199, 42200, 42201, 42202, 42203, 42204, 42205, 42206, 42207, 42208, 42209, 42210, 42211, 42212, 42213, 42214, 42215, 42216, 42217, 42218, 42219, 42220, 42221, 42222, 42223, 42224, 42225, 42226, 42227, 42228, 42229, 42230, 42231, 42232, 42233, 42234, 42235, 42236, 42237, 42238, 42239, 42240, 42241, 42242, 42243, 42244, 42245, 42246, 42247, 42248, 42249, 42250, 42251, 42252, 42253, 42254, 42255, 42256, 42257, 42258, 42259, 42260, 42261, 42262, 42263, 42264, 42265, 42266, 42267, 42268, 42269, 42270, 42271, 42272, 42273, 42274, 42275, 42276, 42277, 42278, 42279, 42280, 42281, 42282, 42283, 42284, 42285, 42286, 42287, 42288, 42289, 42290, 42291, 42292, 42293, 42294, 42295, 42296, 42297, 42298, 42299, 42300, 42301, 42302, 42303, 42304, 42305, 42306, 42307, 42308, 42309, 42310, 42311, 42312, 42313, 42314, 42315, 42316, 42317, 42318, 42319, 42320, 42321, 42322, 42323, 42324, 42325, 42326, 42327, 42328, 42329, 42330, 42331, 42332, 42333, 42334, 42335, 42336, 42337, 42338, 42339, 42340, 42341, 42342, 42343, 42344, 42345, 42346, 42347, 42348, 42349, 42350, 42351, 42352, 42353, 42354, 42355, 42356, 42357, 42358, 42359, 42360, 42361, 42362, 42363, 42364, 42365, 42366, 42367, 42368, 42369, 42370, 42371, 42372, 42373, 42374, 42375, 42376, 42377, 42378, 42379, 42380, 42381, 42382, 42383, 42384, 42385, 42386, 42387, 42388, 42389, 42390, 42391, 42392, 42393, 42394, 42395, 42396, 42397, 42398, 42399, 42400, 42401, 42402, 42403, 42404, 42405, 42406, 42407, 42408, 42409, 42410, 42411, 42412, 42413, 42414, 42415, 42416, 42417, 42418, 42419, 42420, 42421, 42422, 42423, 42424, 42425, 42426, 42427, 42428, 42429, 42430, 42431, 42432, 42433, 42434, 42435, 42436, 42437, 42438, 42439, 42440, 42441, 42442, 42443, 42444, 42445, 42446, 42447, 42448, 42449, 42450, 42451, 42452, 42453, 42454, 42455, 42456, 42457, 42458, 42459, 42460, 42461, 42462, 42463, 42464, 42465, 42466, 42467, 42468, 42469, 42470, 42471, 42472, 42473, 42474, 42475, 42476, 42477, 42478, 42479, 42480, 42481, 42482, 42483, 42484, 42485, 42486, 42487, 42488, 42489, 42490, 42491, 42492, 42493, 42494, 42495, 42496, 42497, 42498, 42499, 42500, 42501, 42502, 42503, 42504, 42505, 42506, 42507, 42508, 42509, 42510, 42511, 42512, 42513, 42514, 42515, 42516, 42517, 42518, 42519, 42520, 42521, 42522, 42523, 42524, 42525, 42526, 42527, 42528, 42529, 42530, 42531, 42532, 42533, 42534, 42535, 42536, 42537, 42538, 42539, 42540, 42541, 42542, 42543, 42544, 42545, 42546, 42547, 42548, 42549, 42550, 42551, 42552, 42553, 42554, 42555, 42556, 42557, 42558, 42559, 42560, 42561, 42562, 42563, 42564, 42565, 42566, 42567, 42568, 42569, 42570, 42571, 42572, 42573, 42574, 42575, 42576, 42577, 42578, 42579, 42580, 42581, 42582, 42583, 42584, 42585, 42586, 42587, 42588, 42589, 42590, 42591, 42592, 42593, 42594, 42595, 42596, 42597, 42598, 42599, 42600, 42601, 42602, 42603, 42604, 42605, 42606, 42607, 42608, 42609, 42610, 42611, 42612, 42613, 42614, 42615, 42616, 42617, 42618, 42619, 42620, 42621, 42622, 42623, 42624, 42625, 42626, 42627, 42628, 42629, 42630, 42631, 42632, 42633, 42634, 42635, 42636, 42637, 42638, 42639, 42640, 42641, 42642, 42643, 42644, 42645, 42646, 42647, 42648, 42649, 42650, 42651, 42652, 42653, 42654, 42655, 42656, 42657, 42658, 42659, 42660, 42661, 42662, 42663, 42664, 42665, 42666, 42667, 42668, 42669, 42670, 42671, 42672, 42673, 42674, 42675, 42676, 42677, 42678, 42679, 42680, 42681, 42682, 42683, 42684, 42685, 42686, 42687, 42688, 42689, 42690, 42691, 42692, 42693, 42694, 42695, 42696, 42697, 42698, 42699, 42700, 42701, 42702, 42703, 42704, 42705, 42706, 42707, 42708, 42709, 42710, 42711, 42712, 42713, 42714, 42715, 42716, 42717, 42718, 42719, 42720, 42721, 42722, 42723, 42724, 42725, 42726, 42727, 42728, 42729, 42730, 42731, 42732, 42733, 42734, 42735, 42736, 42737, 42738, 42739, 42740, 42741, 42742, 42743, 42744, 42745, 42746, 42747, 42748, 42749, 42750, 42751, 42752, 42753, 42754, 42755, 42756, 42757, 42758, 42759, 42760, 42761, 42762, 42763, 42764, 42765, 42766, 42767, 42768, 42769, 42770, 42771, 42772, 42773, 42774, 42775, 42776, 42777, 42778, 42779, 42780, 42781, 42782, 42783, 42784, 42785, 42786, 42787, 42788, 42789, 42790, 42791, 42792, 42793, 42794, 42795, 42796, 42797, 42798, 42799, 42800, 42801, 42802, 42803, 42804, 42805, 42806, 42807, 42808, 42809, 42810, 42811, 42812, 42813, 42814, 42815, 42816, 42817, 42818, 42819, 42820, 42821, 42822, 42823, 42824, 42825, 42826, 42827, 42828, 42829, 42830, 42831, 42832, 42833, 42834, 42835, 42836, 42837, 42838, 42839, 42840, 42841, 42842, 42843, 42844, 42845, 42846, 42847, 42848, 42849, 42850, 42851, 42852, 42853, 42854, 42855, 42856, 42857, 42858, 42859, 42860, 42861, 42862, 42863, 42864, 42865, 42866, 42867, 42868, 42869, 42870, 42871, 42872, 42873, 42874, 42875, 42876, 42877, 42878, 42879, 42880, 42881, 42882, 42883, 42884, 42885, 42886, 42887, 42888, 42889, 42890, 42891, 42892, 42893, 42894, 42895, 42896, 42897, 42898, 42899, 42900, 42901, 42902, 42903, 42904, 42905, 42906, 42907, 42908, 42909, 42910, 42911, 42912, 42913, 42914, 42915, 42916, 42917, 42918, 42919, 42920, 42921, 42922, 42923, 42924, 42925, 42926, 42927, 42928, 42929, 42930, 42931, 42932, 42933, 42934, 42935, 42936, 42937, 42938, 42939, 42940, 42941, 42942, 42943, 42944, 42945, 42946, 42947, 42948, 42949, 42950, 42951, 42952, 42953, 42954, 42955, 42956, 42957, 42958, 42959, 42960, 42961, 42962, 42963, 42964, 42965, 42966, 42967, 42968, 42969, 42970, 42971, 42972, 42973, 42974, 42975, 42976, 42977, 42978, 42979, 42980, 42981, 42982, 42983, 42984, 42985, 42986, 42987, 42988, 42989, 42990, 42991, 42992, 42993, 42994, 42995, 42996, 42997, 42998, 42999, 43000, 43001, 43002, 43003, 43004, 43005, 43006, 43007, 43008, 43009, 43010, 43011, 43012, 43013, 43014, 43015, 43016, 43017, 43018, 43019, 43020, 43021, 43022, 43023, 43024, 43025, 43026, 43027, 43028, 43029, 43030, 43031, 43032, 43033, 43034, 43035, 43036, 43037, 43038, 43039, 43040, 43041, 43042, 43043, 43044, 43045, 43046, 43047, 43048, 43049, 43050, 43051, 43052, 43053, 43054, 43055, 43056, 43057, 43058, 43059, 43060, 43061, 43062, 43063, 43064, 43065, 43066, 43067, 43068, 43069, 43070, 43071, 43072, 43073, 43074, 43075, 43076, 43077, 43078, 43079, 43080, 43081, 43082, 43083, 43084, 43085, 43086, 43087, 43088, 43089, 43090, 43091, 43092, 43093, 43094, 43095, 43096, 43097, 43098, 43099, 43100, 43101, 43102, 43103, 43104, 43105, 43106, 43107, 43108, 43109, 43110, 43111, 43112, 43113, 43114, 43115, 43116, 43117, 43118, 43119, 43120, 43121, 43122, 43123, 43124, 43125, 43126, 43127, 43128, 43129, 43130, 43131, 43132, 43133, 43134, 43135, 43136, 43137, 43138, 43139, 43140, 43141, 43142, 43143, 43144, 43145, 43146, 43147, 43148, 43149, 43150, 43151, 43152, 43153, 43154, 43155, 43156, 43157, 43158, 43159, 43160, 43161, 43162, 43163, 43164, 43165, 43166, 43167, 43168, 43169, 43170, 43171, 43172, 43173, 43174, 43175, 43176, 43177, 43178, 43179, 43180, 43181, 43182, 43183, 43184, 43185, 43186, 43187, 43188, 43189, 43190, 43191, 43192, 43193, 43194, 43195, 43196, 43197, 43198, 43199, 43200, 43201, 43202, 43203, 43204, 43205, 43206, 43207, 43208, 43209, 43210, 43211, 43212, 43213, 43214, 43215, 43216, 43217, 43218, 43219, 43220, 43221, 43222, 43223, 43224, 43225, 43226, 43227, 43228, 43229, 43230, 43231, 43232, 43233, 43234, 43235, 43236, 43237, 43238, 43239, 43240, 43241, 43242, 43243, 43244, 43245, 43246, 43247, 43248, 43249, 43250, 43251, 43252, 43253, 43254, 43255, 43256, 43257, 43258, 43259, 43260, 43261, 43262, 43263, 43264, 43265, 43266, 43267, 43268, 43269, 43270, 43271, 43272, 43273, 43274, 43275, 43276, 43277, 43278, 43279, 43280, 43281, 43282, 43283, 43284, 43285, 43286, 43287, 43288, 43289, 43290, 43291, 43292, 43293, 43294, 43295, 43296, 43297, 43298, 43299, 43300, 43301, 43302, 43303, 43304, 43305, 43306, 43307, 43308, 43309, 43310, 43311, 43312, 43313, 43314, 43315, 43316, 43317, 43318, 43319, 43320, 43321, 43322, 43323, 43324, 43325, 43326, 43327, 43328, 43329, 43330, 43331, 43332, 43333, 43334, 43335, 43336, 43337, 43338, 43339, 43340, 43341, 43342, 43343, 43344, 43345, 43346, 43347, 43348, 43349, 43350, 43351, 43352, 43353, 43354, 43355, 43356, 43357, 43358, 43359, 43360, 43361, 43362, 43363, 43364, 43365, 43366, 43367, 43368, 43369, 43370, 43371, 43372, 43373, 43374, 43375, 43376, 43377, 43378, 43379, 43380, 43381, 43382, 43383, 43384, 43385, 43386, 43387, 43388, 43389, 43390, 43391, 43392, 43393, 43394, 43395, 43396, 43397, 43398, 43399, 43400, 43401, 43402, 43403, 43404, 43405, 43406, 43407, 43408, 43409, 43410, 43411, 43412, 43413, 43414, 43415, 43416, 43417, 43418, 43419, 43420, 43421, 43422, 43423, 43424, 43425, 43426, 43427, 43428, 43429, 43430, 43431, 43432, 43433, 43434, 43435, 43436, 43437, 43438, 43439, 43440, 43441, 43442, 43443, 43444, 43445, 43446, 43447, 43448, 43449, 43450, 43451, 43452, 43453, 43454, 43455, 43456, 43457, 43458, 43459, 43460, 43461, 43462, 43463, 43464, 43465, 43466, 43467, 43468, 43469, 43470, 43471, 43472, 43473, 43474, 43475, 43476, 43477, 43478, 43479, 43480, 43481, 43482, 43483, 43484, 43485, 43486, 43487, 43488, 43489, 43490, 43491, 43492, 43493, 43494, 43495, 43496, 43497, 43498, 43499, 43500, 43501, 43502, 43503, 43504, 43505, 43506, 43507, 43508, 43509, 43510, 43511, 43512, 43513, 43514, 43515, 43516, 43517, 43518, 43519, 43520, 43521, 43522, 43523, 43524, 43525, 43526, 43527, 43528, 43529, 43530, 43531, 43532, 43533, 43534, 43535, 43536, 43537, 43538, 43539, 43540, 43541, 43542, 43543, 43544, 43545, 43546, 43547, 43548, 43549, 43550, 43551, 43552, 43553, 43554, 43555, 43556, 43557, 43558, 43559, 43560, 43561, 43562, 43563, 43564, 43565, 43566, 43567, 43568, 43569, 43570, 43571, 43572, 43573, 43574, 43575, 43576, 43577, 43578, 43579, 43580, 43581, 43582, 43583, 43584, 43585, 43586, 43587, 43588, 43589, 43590, 43591, 43592, 43593, 43594, 43595, 43596, 43597, 43598, 43599, 43600, 43601, 43602, 43603, 43604, 43605, 43606, 43607, 43608, 43609, 43610, 43611, 43612, 43613, 43614, 43615, 43616, 43617, 43618, 43619, 43620, 43621, 43622, 43623, 43624, 43625, 43626, 43627, 43628, 43629, 43630, 43631, 43632, 43633, 43634, 43635, 43636, 43637, 43638, 43639, 43640, 43641, 43642, 43643, 43644, 43645, 43646, 43647, 43648, 43649, 43650, 43651, 43652, 43653, 43654, 43655, 43656, 43657, 43658, 43659, 43660, 43661, 43662, 43663, 43664, 43665, 43666, 43667, 43668, 43669, 43670, 43671, 43672, 43673, 43674, 43675, 43676, 43677, 43678, 43679, 43680, 43681, 43682, 43683, 43684, 43685, 43686, 43687, 43688, 43689, 43690, 43691, 43692, 43693, 43694, 43695, 43696, 43697, 43698, 43699, 43700, 43701, 43702, 43703, 43704, 43705, 43706, 43707, 43708, 43709, 43710, 43711, 43712, 43713, 43714, 43715, 43716, 43717, 43718, 43719, 43720, 43721, 43722, 43723, 43724, 43725, 43726, 43727, 43728, 43729, 43730, 43731, 43732, 43733, 43734, 43735, 43736, 43737, 43738, 43739, 43740, 43741, 43742, 43743, 43744, 43745, 43746, 43747, 43748, 43749, 43750, 43751, 43752, 43753, 43754, 43755, 43756, 43757, 43758, 43759, 43760, 43761, 43762, 43763, 43764, 43765, 43766, 43767, 43768, 43769, 43770, 43771, 43772, 43773, 43774, 43775, 43776, 43777, 43778, 43779, 43780, 43781, 43782, 43783, 43784, 43785, 43786, 43787, 43788, 43789, 43790, 43791, 43792, 43793, 43794, 43795, 43796, 43797, 43798, 43799, 43800, 43801, 43802, 43803, 43804, 43805, 43806, 43807, 43808, 43809, 43810, 43811, 43812, 43813, 43814, 43815, 43816, 43817, 43818, 43819, 43820, 43821, 43822, 43823, 43824, 43825, 43826, 43827, 43828, 43829, 43830, 43831, 43832, 43833, 43834, 43835, 43836, 43837, 43838, 43839, 43840, 43841, 43842, 43843, 43844, 43845, 43846, 43847, 43848, 43849, 43850, 43851, 43852, 43853, 43854, 43855, 43856, 43857, 43858, 43859, 43860, 43861, 43862, 43863, 43864, 43865, 43866, 43867, 43868, 43869, 43870, 43871, 43872, 43873, 43874, 43875, 43876, 43877, 43878, 43879, 43880, 43881, 43882, 43883, 43884, 43885, 43886, 43887, 43888, 43889, 43890, 43891, 43892, 43893, 43894, 43895, 43896, 43897, 43898, 43899, 43900, 43901, 43902, 43903, 43904, 43905, 43906, 43907, 43908, 43909, 43910, 43911, 43912, 43913, 43914, 43915, 43916, 43917, 43918, 43919, 43920, 43921, 43922, 43923, 43924, 43925, 43926, 43927, 43928, 43929, 43930, 43931, 43932, 43933, 43934, 43935, 43936, 43937, 43938, 43939, 43940, 43941, 43942, 43943, 43944, 43945, 43946, 43947, 43948, 43949, 43950, 43951, 43952, 43953, 43954, 43955, 43956, 43957, 43958, 43959, 43960, 43961, 43962, 43963, 43964, 43965, 43966, 43967, 43968, 43969, 43970, 43971, 43972, 43973, 43974, 43975, 43976, 43977, 43978, 43979, 43980, 43981, 43982, 43983, 43984, 43985, 43986, 43987, 43988, 43989, 43990, 43991, 43992, 43993, 43994, 43995, 43996, 43997, 43998, 43999, 44000, 44001, 44002, 44003, 44004, 44005, 44006, 44007, 44008, 44009, 44010, 44011, 44012, 44013, 44014, 44015, 44016, 44017, 44018, 44019, 44020, 44021, 44022, 44023, 44024, 44025, 44026, 44027, 44028, 44029, 44030, 44031, 44032, 44033, 44034, 44035, 44036, 44037, 44038, 44039, 44040, 44041, 44042, 44043, 44044, 44045, 44046, 44047, 44048, 44049, 44050, 44051, 44052, 44053, 44054, 44055, 44056, 44057, 44058, 44059, 44060, 44061, 44062, 44063, 44064, 44065, 44066, 44067, 44068, 44069, 44070, 44071, 44072, 44073, 44074, 44075, 44076, 44077, 44078, 44079, 44080, 44081, 44082, 44083, 44084, 44085, 44086, 44087, 44088, 44089, 44090, 44091, 44092, 44093, 44094, 44095, 44096, 44097, 44098, 44099, 44100, 44101, 44102, 44103, 44104, 44105, 44106, 44107, 44108, 44109, 44110, 44111, 44112, 44113, 44114, 44115, 44116, 44117, 44118, 44119, 44120, 44121, 44122, 44123, 44124, 44125, 44126, 44127, 44128, 44129, 44130, 44131, 44132, 44133, 44134, 44135, 44136, 44137, 44138, 44139, 44140, 44141, 44142, 44143, 44144, 44145, 44146, 44147, 44148, 44149, 44150, 44151, 44152, 44153, 44154, 44155, 44156, 44157, 44158, 44159, 44160, 44161, 44162, 44163, 44164, 44165, 44166, 44167, 44168, 44169, 44170, 44171, 44172, 44173, 44174, 44175, 44176, 44177, 44178, 44179, 44180, 44181, 44182, 44183, 44184, 44185, 44186, 44187, 44188, 44189, 44190, 44191, 44192, 44193, 44194, 44195, 44196, 44197, 44198, 44199, 44200, 44201, 44202, 44203, 44204, 44205, 44206, 44207, 44208, 44209, 44210, 44211, 44212, 44213, 44214, 44215, 44216, 44217, 44218, 44219, 44220, 44221, 44222, 44223, 44224, 44225, 44226, 44227, 44228, 44229, 44230, 44231, 44232, 44233, 44234, 44235, 44236, 44237, 44238, 44239, 44240, 44241, 44242, 44243, 44244, 44245, 44246, 44247, 44248, 44249, 44250, 44251, 44252, 44253, 44254, 44255, 44256, 44257, 44258, 44259, 44260, 44261, 44262, 44263, 44264, 44265, 44266, 44267, 44268, 44269, 44270, 44271, 44272, 44273, 44274, 44275, 44276, 44277, 44278, 44279, 44280, 44281, 44282, 44283, 44284, 44285, 44286, 44287, 44288, 44289, 44290, 44291, 44292, 44293, 44294, 44295, 44296, 44297, 44298, 44299, 44300, 44301, 44302, 44303, 44304, 44305, 44306, 44307, 44308, 44309, 44310, 44311, 44312, 44313, 44314, 44315, 44316, 44317, 44318, 44319, 44320, 44321, 44322, 44323, 44324, 44325, 44326, 44327, 44328, 44329, 44330, 44331, 44332, 44333, 44334, 44335, 44336, 44337, 44338, 44339, 44340, 44341, 44342, 44343, 44344, 44345, 44346, 44347, 44348, 44349, 44350, 44351, 44352, 44353, 44354, 44355, 44356, 44357, 44358, 44359, 44360, 44361, 44362, 44363, 44364, 44365, 44366, 44367, 44368, 44369, 44370, 44371, 44372, 44373, 44374, 44375, 44376, 44377, 44378, 44379, 44380, 44381, 44382, 44383, 44384, 44385, 44386, 44387, 44388, 44389, 44390, 44391, 44392, 44393, 44394, 44395, 44396, 44397, 44398, 44399, 44400, 44401, 44402, 44403, 44404, 44405, 44406, 44407, 44408, 44409, 44410, 44411, 44412, 44413, 44414, 44415, 44416, 44417, 44418, 44419, 44420, 44421, 44422, 44423, 44424, 44425, 44426, 44427, 44428, 44429, 44430, 44431, 44432, 44433, 44434, 44435, 44436, 44437, 44438, 44439, 44440, 44441, 44442, 44443, 44444, 44445, 44446, 44447, 44448, 44449, 44450, 44451, 44452, 44453, 44454, 44455, 44456, 44457, 44458, 44459, 44460, 44461, 44462, 44463, 44464, 44465, 44466, 44467, 44468, 44469, 44470, 44471, 44472, 44473, 44474, 44475, 44476, 44477, 44478, 44479, 44480, 44481, 44482, 44483, 44484, 44485, 44486, 44487, 44488, 44489, 44490, 44491, 44492, 44493, 44494, 44495, 44496, 44497, 44498, 44499, 44500, 44501, 44502, 44503, 44504, 44505, 44506, 44507, 44508, 44509, 44510, 44511, 44512, 44513, 44514, 44515, 44516, 44517, 44518, 44519, 44520, 44521, 44522, 44523, 44524, 44525, 44526, 44527, 44528, 44529, 44530, 44531, 44532, 44533, 44534, 44535, 44536, 44537, 44538, 44539, 44540, 44541, 44542, 44543, 44544, 44545, 44546, 44547, 44548, 44549, 44550, 44551, 44552, 44553, 44554, 44555, 44556, 44557, 44558, 44559, 44560, 44561, 44562, 44563, 44564, 44565, 44566, 44567, 44568, 44569, 44570, 44571, 44572, 44573, 44574, 44575, 44576, 44577, 44578, 44579, 44580, 44581, 44582, 44583, 44584, 44585, 44586, 44587, 44588, 44589, 44590, 44591, 44592, 44593, 44594, 44595, 44596, 44597, 44598, 44599, 44600, 44601, 44602, 44603, 44604, 44605, 44606, 44607, 44608, 44609, 44610, 44611, 44612, 44613, 44614, 44615, 44616, 44617, 44618, 44619, 44620, 44621, 44622, 44623, 44624, 44625, 44626, 44627, 44628, 44629, 44630, 44631, 44632, 44633, 44634, 44635, 44636, 44637, 44638, 44639, 44640, 44641, 44642, 44643, 44644, 44645, 44646, 44647, 44648, 44649, 44650, 44651, 44652, 44653, 44654, 44655, 44656, 44657, 44658, 44659, 44660, 44661, 44662, 44663, 44664, 44665, 44666, 44667, 44668, 44669, 44670, 44671, 44672, 44673, 44674, 44675, 44676, 44677, 44678, 44679, 44680, 44681, 44682, 44683, 44684, 44685, 44686, 44687, 44688, 44689, 44690, 44691, 44692, 44693, 44694, 44695, 44696, 44697, 44698, 44699, 44700, 44701, 44702, 44703, 44704, 44705, 44706, 44707, 44708, 44709, 44710, 44711, 44712, 44713, 44714, 44715, 44716, 44717, 44718, 44719, 44720, 44721, 44722, 44723, 44724, 44725, 44726, 44727, 44728, 44729, 44730, 44731, 44732, 44733, 44734, 44735, 44736, 44737, 44738, 44739, 44740, 44741, 44742, 44743, 44744, 44745, 44746, 44747, 44748, 44749, 44750, 44751, 44752, 44753, 44754, 44755, 44756, 44757, 44758, 44759, 44760, 44761, 44762, 44763, 44764, 44765, 44766, 44767, 44768, 44769, 44770, 44771, 44772, 44773, 44774, 44775, 44776, 44777, 44778, 44779, 44780, 44781, 44782, 44783, 44784, 44785, 44786, 44787, 44788, 44789, 44790, 44791, 44792, 44793, 44794, 44795, 44796, 44797, 44798, 44799, 44800, 44801, 44802, 44803, 44804, 44805, 44806, 44807, 44808, 44809, 44810, 44811, 44812, 44813, 44814, 44815, 44816, 44817, 44818, 44819, 44820, 44821, 44822, 44823, 44824, 44825, 44826, 44827, 44828, 44829, 44830, 44831, 44832, 44833, 44834, 44835, 44836, 44837, 44838, 44839, 44840, 44841, 44842, 44843, 44844, 44845, 44846, 44847, 44848, 44849, 44850, 44851, 44852, 44853, 44854, 44855, 44856, 44857, 44858, 44859, 44860, 44861, 44862, 44863, 44864, 44865, 44866, 44867, 44868, 44869, 44870, 44871, 44872, 44873, 44874, 44875, 44876, 44877, 44878, 44879, 44880, 44881, 44882, 44883, 44884, 44885, 44886, 44887, 44888, 44889, 44890, 44891, 44892, 44893, 44894, 44895, 44896, 44897, 44898, 44899, 44900, 44901, 44902, 44903, 44904, 44905, 44906, 44907, 44908, 44909, 44910, 44911, 44912, 44913, 44914, 44915, 44916, 44917, 44918, 44919, 44920, 44921, 44922, 44923, 44924, 44925, 44926, 44927, 44928, 44929, 44930, 44931, 44932, 44933, 44934, 44935, 44936, 44937, 44938, 44939, 44940, 44941, 44942, 44943, 44944, 44945, 44946, 44947, 44948, 44949, 44950, 44951, 44952, 44953, 44954, 44955, 44956, 44957, 44958, 44959, 44960, 44961, 44962, 44963, 44964, 44965, 44966, 44967, 44968, 44969, 44970, 44971, 44972, 44973, 44974, 44975, 44976, 44977, 44978, 44979, 44980, 44981, 44982, 44983, 44984, 44985, 44986, 44987, 44988, 44989, 44990, 44991, 44992, 44993, 44994, 44995, 44996, 44997, 44998, 44999, 45000, 45001, 45002, 45003, 45004, 45005, 45006, 45007, 45008, 45009, 45010, 45011, 45012, 45013, 45014, 45015, 45016, 45017, 45018, 45019, 45020, 45021, 45022, 45023, 45024, 45025, 45026, 45027, 45028, 45029, 45030, 45031, 45032, 45033, 45034, 45035, 45036, 45037, 45038, 45039, 45040, 45041, 45042, 45043, 45044, 45045, 45046, 45047, 45048, 45049, 45050, 45051, 45052, 45053, 45054, 45055, 45056, 45057, 45058, 45059, 45060, 45061, 45062, 45063, 45064, 45065, 45066, 45067, 45068, 45069, 45070, 45071, 45072, 45073, 45074, 45075, 45076, 45077, 45078, 45079, 45080, 45081, 45082, 45083, 45084, 45085, 45086, 45087, 45088, 45089, 45090, 45091, 45092, 45093, 45094, 45095, 45096, 45097, 45098, 45099, 45100, 45101, 45102, 45103, 45104, 45105, 45106, 45107, 45108, 45109, 45110, 45111, 45112, 45113, 45114, 45115, 45116, 45117, 45118, 45119, 45120, 45121, 45122, 45123, 45124, 45125, 45126, 45127, 45128, 45129, 45130, 45131, 45132, 45133, 45134, 45135, 45136, 45137, 45138, 45139, 45140, 45141, 45142, 45143, 45144, 45145, 45146, 45147, 45148, 45149, 45150, 45151, 45152, 45153, 45154, 45155, 45156, 45157, 45158, 45159, 45160, 45161, 45162, 45163, 45164, 45165, 45166, 45167, 45168, 45169, 45170, 45171, 45172, 45173, 45174, 45175, 45176, 45177, 45178, 45179, 45180, 45181, 45182, 45183, 45184, 45185, 45186, 45187, 45188, 45189, 45190, 45191, 45192, 45193, 45194, 45195, 45196, 45197, 45198, 45199, 45200, 45201, 45202, 45203, 45204, 45205, 45206, 45207, 45208, 45209, 45210, 45211, 45212, 45213, 45214, 45215, 45216, 45217, 45218, 45219, 45220, 45221, 45222, 45223, 45224, 45225, 45226, 45227, 45228, 45229, 45230, 45231, 45232, 45233, 45234, 45235, 45236, 45237, 45238, 45239, 45240, 45241, 45242, 45243, 45244, 45245, 45246, 45247, 45248, 45249, 45250, 45251, 45252, 45253, 45254, 45255, 45256, 45257, 45258, 45259, 45260, 45261, 45262, 45263, 45264, 45265, 45266, 45267, 45268, 45269, 45270, 45271, 45272, 45273, 45274, 45275, 45276, 45277, 45278, 45279, 45280, 45281, 45282, 45283, 45284, 45285, 45286, 45287, 45288, 45289, 45290, 45291, 45292, 45293, 45294, 45295, 45296, 45297, 45298, 45299, 45300, 45301, 45302, 45303, 45304, 45305, 45306, 45307, 45308, 45309, 45310, 45311, 45312, 45313, 45314, 45315, 45316, 45317, 45318, 45319, 45320, 45321, 45322, 45323, 45324, 45325, 45326, 45327, 45328, 45329, 45330, 45331, 45332, 45333, 45334, 45335, 45336, 45337, 45338, 45339, 45340, 45341, 45342, 45343, 45344, 45345, 45346, 45347, 45348, 45349, 45350, 45351, 45352, 45353, 45354, 45355, 45356, 45357, 45358, 45359, 45360, 45361, 45362, 45363, 45364, 45365, 45366, 45367, 45368, 45369, 45370, 45371, 45372, 45373, 45374, 45375, 45376, 45377, 45378, 45379, 45380, 45381, 45382, 45383, 45384, 45385, 45386, 45387, 45388, 45389, 45390, 45391, 45392, 45393, 45394, 45395, 45396, 45397, 45398, 45399, 45400, 45401, 45402, 45403, 45404, 45405, 45406, 45407, 45408, 45409, 45410, 45411, 45412, 45413, 45414, 45415, 45416, 45417, 45418, 45419, 45420, 45421, 45422, 45423, 45424, 45425, 45426, 45427, 45428, 45429, 45430, 45431, 45432, 45433, 45434, 45435, 45436, 45437, 45438, 45439, 45440, 45441, 45442, 45443, 45444, 45445, 45446, 45447, 45448, 45449, 45450, 45451, 45452, 45453, 45454, 45455, 45456, 45457, 45458, 45459, 45460, 45461, 45462, 45463, 45464, 45465, 45466, 45467, 45468, 45469, 45470, 45471, 45472, 45473, 45474, 45475, 45476, 45477, 45478, 45479, 45480, 45481, 45482, 45483, 45484, 45485, 45486, 45487, 45488, 45489, 45490, 45491, 45492, 45493, 45494, 45495, 45496, 45497, 45498, 45499, 45500, 45501, 45502, 45503, 45504, 45505, 45506, 45507, 45508, 45509, 45510, 45511, 45512, 45513, 45514, 45515, 45516, 45517, 45518, 45519, 45520, 45521, 45522, 45523, 45524, 45525, 45526, 45527, 45528, 45529, 45530, 45531, 45532, 45533, 45534, 45535, 45536, 45537, 45538, 45539, 45540, 45541, 45542, 45543, 45544, 45545, 45546, 45547, 45548, 45549, 45550, 45551, 45552, 45553, 45554, 45555, 45556, 45557, 45558, 45559, 45560, 45561, 45562, 45563, 45564, 45565, 45566, 45567, 45568, 45569, 45570, 45571, 45572, 45573, 45574, 45575, 45576, 45577, 45578, 45579, 45580, 45581, 45582, 45583, 45584, 45585, 45586, 45587, 45588, 45589, 45590, 45591, 45592, 45593, 45594, 45595, 45596, 45597, 45598, 45599, 45600, 45601, 45602, 45603, 45604, 45605, 45606, 45607, 45608, 45609, 45610, 45611, 45612, 45613, 45614, 45615, 45616, 45617, 45618, 45619, 45620, 45621, 45622, 45623, 45624, 45625, 45626, 45627, 45628, 45629, 45630, 45631, 45632, 45633, 45634, 45635, 45636, 45637, 45638, 45639, 45640, 45641, 45642, 45643, 45644, 45645, 45646, 45647, 45648, 45649, 45650, 45651, 45652, 45653, 45654, 45655, 45656, 45657, 45658, 45659, 45660, 45661, 45662, 45663, 45664, 45665, 45666, 45667, 45668, 45669, 45670, 45671, 45672, 45673, 45674, 45675, 45676, 45677, 45678, 45679, 45680, 45681, 45682, 45683, 45684, 45685, 45686, 45687, 45688, 45689, 45690, 45691, 45692, 45693, 45694, 45695, 45696, 45697, 45698, 45699, 45700, 45701, 45702, 45703, 45704, 45705, 45706, 45707, 45708, 45709, 45710, 45711, 45712, 45713, 45714, 45715, 45716, 45717, 45718, 45719, 45720, 45721, 45722, 45723, 45724, 45725, 45726, 45727, 45728, 45729, 45730, 45731, 45732, 45733, 45734, 45735, 45736, 45737, 45738, 45739, 45740, 45741, 45742, 45743, 45744, 45745, 45746, 45747, 45748, 45749, 45750, 45751, 45752, 45753, 45754, 45755, 45756, 45757, 45758, 45759, 45760, 45761, 45762, 45763, 45764, 45765, 45766, 45767, 45768, 45769, 45770, 45771, 45772, 45773, 45774, 45775, 45776, 45777, 45778, 45779, 45780, 45781, 45782, 45783, 45784, 45785, 45786, 45787, 45788, 45789, 45790, 45791, 45792, 45793, 45794, 45795, 45796, 45797, 45798, 45799, 45800, 45801, 45802, 45803, 45804, 45805, 45806, 45807, 45808, 45809, 45810, 45811, 45812, 45813, 45814, 45815, 45816, 45817, 45818, 45819, 45820, 45821, 45822, 45823, 45824, 45825, 45826, 45827, 45828, 45829, 45830, 45831, 45832, 45833, 45834, 45835, 45836, 45837, 45838, 45839, 45840, 45841, 45842, 45843, 45844, 45845, 45846, 45847, 45848, 45849, 45850, 45851, 45852, 45853, 45854, 45855, 45856, 45857, 45858, 45859, 45860, 45861, 45862, 45863, 45864, 45865, 45866, 45867, 45868, 45869, 45870, 45871, 45872, 45873, 45874, 45875, 45876, 45877, 45878, 45879, 45880, 45881, 45882, 45883, 45884, 45885, 45886, 45887, 45888, 45889, 45890, 45891, 45892, 45893, 45894, 45895, 45896, 45897, 45898, 45899, 45900, 45901, 45902, 45903, 45904, 45905, 45906, 45907, 45908, 45909, 45910, 45911, 45912, 45913, 45914, 45915, 45916, 45917, 45918, 45919, 45920, 45921, 45922, 45923, 45924, 45925, 45926, 45927, 45928, 45929, 45930, 45931, 45932, 45933, 45934, 45935, 45936, 45937, 45938, 45939, 45940, 45941, 45942, 45943, 45944, 45945, 45946, 45947, 45948, 45949, 45950, 45951, 45952, 45953, 45954, 45955, 45956, 45957, 45958, 45959, 45960, 45961, 45962, 45963, 45964, 45965, 45966, 45967, 45968, 45969, 45970, 45971, 45972, 45973, 45974, 45975, 45976, 45977, 45978, 45979, 45980, 45981, 45982, 45983, 45984, 45985, 45986, 45987, 45988, 45989, 45990, 45991, 45992, 45993, 45994, 45995, 45996, 45997, 45998, 45999, 46000, 46001, 46002, 46003, 46004, 46005, 46006, 46007, 46008, 46009, 46010, 46011, 46012, 46013, 46014, 46015, 46016, 46017, 46018, 46019, 46020, 46021, 46022, 46023, 46024, 46025, 46026, 46027, 46028, 46029, 46030, 46031, 46032, 46033, 46034, 46035, 46036, 46037, 46038, 46039, 46040, 46041, 46042, 46043, 46044, 46045, 46046, 46047, 46048, 46049, 46050, 46051, 46052, 46053, 46054, 46055, 46056, 46057, 46058, 46059, 46060, 46061, 46062, 46063, 46064, 46065, 46066, 46067, 46068, 46069, 46070, 46071, 46072, 46073, 46074, 46075, 46076, 46077, 46078, 46079, 46080, 46081, 46082, 46083, 46084, 46085, 46086, 46087, 46088, 46089, 46090, 46091, 46092, 46093, 46094, 46095, 46096, 46097, 46098, 46099, 46100, 46101, 46102, 46103, 46104, 46105, 46106, 46107, 46108, 46109, 46110, 46111, 46112, 46113, 46114, 46115, 46116, 46117, 46118, 46119, 46120, 46121, 46122, 46123, 46124, 46125, 46126, 46127, 46128, 46129, 46130, 46131, 46132, 46133, 46134, 46135, 46136, 46137, 46138, 46139, 46140, 46141, 46142, 46143, 46144, 46145, 46146, 46147, 46148, 46149, 46150, 46151, 46152, 46153, 46154, 46155, 46156, 46157, 46158, 46159, 46160, 46161, 46162, 46163, 46164, 46165, 46166, 46167, 46168, 46169, 46170, 46171, 46172, 46173, 46174, 46175, 46176, 46177, 46178, 46179, 46180, 46181, 46182, 46183, 46184, 46185, 46186, 46187, 46188, 46189, 46190, 46191, 46192, 46193, 46194, 46195, 46196, 46197, 46198, 46199, 46200, 46201, 46202, 46203, 46204, 46205, 46206, 46207, 46208, 46209, 46210, 46211, 46212, 46213, 46214, 46215, 46216, 46217, 46218, 46219, 46220, 46221, 46222, 46223, 46224, 46225, 46226, 46227, 46228, 46229, 46230, 46231, 46232, 46233, 46234, 46235, 46236, 46237, 46238, 46239, 46240, 46241, 46242, 46243, 46244, 46245, 46246, 46247, 46248, 46249, 46250, 46251, 46252, 46253, 46254, 46255, 46256, 46257, 46258, 46259, 46260, 46261, 46262, 46263, 46264, 46265, 46266, 46267, 46268, 46269, 46270, 46271, 46272, 46273, 46274, 46275, 46276, 46277, 46278, 46279, 46280, 46281, 46282, 46283, 46284, 46285, 46286, 46287, 46288, 46289, 46290, 46291, 46292, 46293, 46294, 46295, 46296, 46297, 46298, 46299, 46300, 46301, 46302, 46303, 46304, 46305, 46306, 46307, 46308, 46309, 46310, 46311, 46312, 46313, 46314, 46315, 46316, 46317, 46318, 46319, 46320, 46321, 46322, 46323, 46324, 46325, 46326, 46327, 46328, 46329, 46330, 46331, 46332, 46333, 46334, 46335, 46336, 46337, 46338, 46339, 46340, 46341, 46342, 46343, 46344, 46345, 46346, 46347, 46348, 46349, 46350, 46351, 46352, 46353, 46354, 46355, 46356, 46357, 46358, 46359, 46360, 46361, 46362, 46363, 46364, 46365, 46366, 46367, 46368, 46369, 46370, 46371, 46372, 46373, 46374, 46375, 46376, 46377, 46378, 46379, 46380, 46381, 46382, 46383, 46384, 46385, 46386, 46387, 46388, 46389, 46390, 46391, 46392, 46393, 46394, 46395, 46396, 46397, 46398, 46399, 46400, 46401, 46402, 46403, 46404, 46405, 46406, 46407, 46408, 46409, 46410, 46411, 46412, 46413, 46414, 46415, 46416, 46417, 46418, 46419, 46420, 46421, 46422, 46423, 46424, 46425, 46426, 46427, 46428, 46429, 46430, 46431, 46432, 46433, 46434, 46435, 46436, 46437, 46438, 46439, 46440, 46441, 46442, 46443, 46444, 46445, 46446, 46447, 46448, 46449, 46450, 46451, 46452, 46453, 46454, 46455, 46456, 46457, 46458, 46459, 46460, 46461, 46462, 46463, 46464, 46465, 46466, 46467, 46468, 46469, 46470, 46471, 46472, 46473, 46474, 46475, 46476, 46477, 46478, 46479, 46480, 46481, 46482, 46483, 46484, 46485, 46486, 46487, 46488, 46489, 46490, 46491, 46492, 46493, 46494, 46495, 46496, 46497, 46498, 46499, 46500, 46501, 46502, 46503, 46504, 46505, 46506, 46507, 46508, 46509, 46510, 46511, 46512, 46513, 46514, 46515, 46516, 46517, 46518, 46519, 46520, 46521, 46522, 46523, 46524, 46525, 46526, 46527, 46528, 46529, 46530, 46531, 46532, 46533, 46534, 46535, 46536, 46537, 46538, 46539, 46540, 46541, 46542, 46543, 46544, 46545, 46546, 46547, 46548, 46549, 46550, 46551, 46552, 46553, 46554, 46555, 46556, 46557, 46558, 46559, 46560, 46561, 46562, 46563, 46564, 46565, 46566, 46567, 46568, 46569, 46570, 46571, 46572, 46573, 46574, 46575, 46576, 46577, 46578, 46579, 46580, 46581, 46582, 46583, 46584, 46585, 46586, 46587, 46588, 46589, 46590, 46591, 46592, 46593, 46594, 46595, 46596, 46597, 46598, 46599, 46600, 46601, 46602, 46603, 46604, 46605, 46606, 46607, 46608, 46609, 46610, 46611, 46612, 46613, 46614, 46615, 46616, 46617, 46618, 46619, 46620, 46621, 46622, 46623, 46624, 46625, 46626, 46627, 46628, 46629, 46630, 46631, 46632, 46633, 46634, 46635, 46636, 46637, 46638, 46639, 46640, 46641, 46642, 46643, 46644, 46645, 46646, 46647, 46648, 46649, 46650, 46651, 46652, 46653, 46654, 46655, 46656, 46657, 46658, 46659, 46660, 46661, 46662, 46663, 46664, 46665, 46666, 46667, 46668, 46669, 46670, 46671, 46672, 46673, 46674, 46675, 46676, 46677, 46678, 46679, 46680, 46681, 46682, 46683, 46684, 46685, 46686, 46687, 46688, 46689, 46690, 46691, 46692, 46693, 46694, 46695, 46696, 46697, 46698, 46699, 46700, 46701, 46702, 46703, 46704, 46705, 46706, 46707, 46708, 46709, 46710, 46711, 46712, 46713, 46714, 46715, 46716, 46717, 46718, 46719, 46720, 46721, 46722, 46723, 46724, 46725, 46726, 46727, 46728, 46729, 46730, 46731, 46732, 46733, 46734, 46735, 46736, 46737, 46738, 46739, 46740, 46741, 46742, 46743, 46744, 46745, 46746, 46747, 46748, 46749, 46750, 46751, 46752, 46753, 46754, 46755, 46756, 46757, 46758, 46759, 46760, 46761, 46762, 46763, 46764, 46765, 46766, 46767, 46768, 46769, 46770, 46771, 46772, 46773, 46774, 46775, 46776, 46777, 46778, 46779, 46780, 46781, 46782, 46783, 46784, 46785, 46786, 46787, 46788, 46789, 46790, 46791, 46792, 46793, 46794, 46795, 46796, 46797, 46798, 46799, 46800, 46801, 46802, 46803, 46804, 46805, 46806, 46807, 46808, 46809, 46810, 46811, 46812, 46813, 46814, 46815, 46816, 46817, 46818, 46819, 46820, 46821, 46822, 46823, 46824, 46825, 46826, 46827, 46828, 46829, 46830, 46831, 46832, 46833, 46834, 46835, 46836, 46837, 46838, 46839, 46840, 46841, 46842, 46843, 46844, 46845, 46846, 46847, 46848, 46849, 46850, 46851, 46852, 46853, 46854, 46855, 46856, 46857, 46858, 46859, 46860, 46861, 46862, 46863, 46864, 46865, 46866, 46867, 46868, 46869, 46870, 46871, 46872, 46873, 46874, 46875, 46876, 46877, 46878, 46879, 46880, 46881, 46882, 46883, 46884, 46885, 46886, 46887, 46888, 46889, 46890, 46891, 46892, 46893, 46894, 46895, 46896, 46897, 46898, 46899, 46900, 46901, 46902, 46903, 46904, 46905, 46906, 46907, 46908, 46909, 46910, 46911, 46912, 46913, 46914, 46915, 46916, 46917, 46918, 46919, 46920, 46921, 46922, 46923, 46924, 46925, 46926, 46927, 46928, 46929, 46930, 46931, 46932, 46933, 46934, 46935, 46936, 46937, 46938, 46939, 46940, 46941, 46942, 46943, 46944, 46945, 46946, 46947, 46948, 46949, 46950, 46951, 46952, 46953, 46954, 46955, 46956, 46957, 46958, 46959, 46960, 46961, 46962, 46963, 46964, 46965, 46966, 46967, 46968, 46969, 46970, 46971, 46972, 46973, 46974, 46975, 46976, 46977, 46978, 46979, 46980, 46981, 46982, 46983, 46984, 46985, 46986, 46987, 46988, 46989, 46990, 46991, 46992, 46993, 46994, 46995, 46996, 46997, 46998, 46999, 47000, 47001, 47002, 47003, 47004, 47005, 47006, 47007, 47008, 47009, 47010, 47011, 47012, 47013, 47014, 47015, 47016, 47017, 47018, 47019, 47020, 47021, 47022, 47023, 47024, 47025, 47026, 47027, 47028, 47029, 47030, 47031, 47032, 47033, 47034, 47035, 47036, 47037, 47038, 47039, 47040, 47041, 47042, 47043, 47044, 47045, 47046, 47047, 47048, 47049, 47050, 47051, 47052, 47053, 47054, 47055, 47056, 47057, 47058, 47059, 47060, 47061, 47062, 47063, 47064, 47065, 47066, 47067, 47068, 47069, 47070, 47071, 47072, 47073, 47074, 47075, 47076, 47077, 47078, 47079, 47080, 47081, 47082, 47083, 47084, 47085, 47086, 47087, 47088, 47089, 47090, 47091, 47092, 47093, 47094, 47095, 47096, 47097, 47098, 47099, 47100, 47101, 47102, 47103, 47104, 47105, 47106, 47107, 47108, 47109, 47110, 47111, 47112, 47113, 47114, 47115, 47116, 47117, 47118, 47119, 47120, 47121, 47122, 47123, 47124, 47125, 47126, 47127, 47128, 47129, 47130, 47131, 47132, 47133, 47134, 47135, 47136, 47137, 47138, 47139, 47140, 47141, 47142, 47143, 47144, 47145, 47146, 47147, 47148, 47149, 47150, 47151, 47152, 47153, 47154, 47155, 47156, 47157, 47158, 47159, 47160, 47161, 47162, 47163, 47164, 47165, 47166, 47167, 47168, 47169, 47170, 47171, 47172, 47173, 47174, 47175, 47176, 47177, 47178, 47179, 47180, 47181, 47182, 47183, 47184, 47185, 47186, 47187, 47188, 47189, 47190, 47191, 47192, 47193, 47194, 47195, 47196, 47197, 47198, 47199, 47200, 47201, 47202, 47203, 47204, 47205, 47206, 47207, 47208, 47209, 47210, 47211, 47212, 47213, 47214, 47215, 47216, 47217, 47218, 47219, 47220, 47221, 47222, 47223, 47224, 47225, 47226, 47227, 47228, 47229, 47230, 47231, 47232, 47233, 47234, 47235, 47236, 47237, 47238, 47239, 47240, 47241, 47242, 47243, 47244, 47245, 47246, 47247, 47248, 47249, 47250, 47251, 47252, 47253, 47254, 47255, 47256, 47257, 47258, 47259, 47260, 47261, 47262, 47263, 47264, 47265, 47266, 47267, 47268, 47269, 47270, 47271, 47272, 47273, 47274, 47275, 47276, 47277, 47278, 47279, 47280, 47281, 47282, 47283, 47284, 47285, 47286, 47287, 47288, 47289, 47290, 47291, 47292, 47293, 47294, 47295, 47296, 47297, 47298, 47299, 47300, 47301, 47302, 47303, 47304, 47305, 47306, 47307, 47308, 47309, 47310, 47311, 47312, 47313, 47314, 47315, 47316, 47317, 47318, 47319, 47320, 47321, 47322, 47323, 47324, 47325, 47326, 47327, 47328, 47329, 47330, 47331, 47332, 47333, 47334, 47335, 47336, 47337, 47338, 47339, 47340, 47341, 47342, 47343, 47344, 47345, 47346, 47347, 47348, 47349, 47350, 47351, 47352, 47353, 47354, 47355, 47356, 47357, 47358, 47359, 47360, 47361, 47362, 47363, 47364, 47365, 47366, 47367, 47368, 47369, 47370, 47371, 47372, 47373, 47374, 47375, 47376, 47377, 47378, 47379, 47380, 47381, 47382, 47383, 47384, 47385, 47386, 47387, 47388, 47389, 47390, 47391, 47392, 47393, 47394, 47395, 47396, 47397, 47398, 47399, 47400, 47401, 47402, 47403, 47404, 47405, 47406, 47407, 47408, 47409, 47410, 47411, 47412, 47413, 47414, 47415, 47416, 47417, 47418, 47419, 47420, 47421, 47422, 47423, 47424, 47425, 47426, 47427, 47428, 47429, 47430, 47431, 47432, 47433, 47434, 47435, 47436, 47437, 47438, 47439, 47440, 47441, 47442, 47443, 47444, 47445, 47446, 47447, 47448, 47449, 47450, 47451, 47452, 47453, 47454, 47455, 47456, 47457, 47458, 47459, 47460, 47461, 47462, 47463, 47464, 47465, 47466, 47467, 47468, 47469, 47470, 47471, 47472, 47473, 47474, 47475, 47476, 47477, 47478, 47479, 47480, 47481, 47482, 47483, 47484, 47485, 47486, 47487, 47488, 47489, 47490, 47491, 47492, 47493, 47494, 47495, 47496, 47497, 47498, 47499, 47500, 47501, 47502, 47503, 47504, 47505, 47506, 47507, 47508, 47509, 47510, 47511, 47512, 47513, 47514, 47515, 47516, 47517, 47518, 47519, 47520, 47521, 47522, 47523, 47524, 47525, 47526, 47527, 47528, 47529, 47530, 47531, 47532, 47533, 47534, 47535, 47536, 47537, 47538, 47539, 47540, 47541, 47542, 47543, 47544, 47545, 47546, 47547, 47548, 47549, 47550, 47551, 47552, 47553, 47554, 47555, 47556, 47557, 47558, 47559, 47560, 47561, 47562, 47563, 47564, 47565, 47566, 47567, 47568, 47569, 47570, 47571, 47572, 47573, 47574, 47575, 47576, 47577, 47578, 47579, 47580, 47581, 47582, 47583, 47584, 47585, 47586, 47587, 47588, 47589, 47590, 47591, 47592, 47593, 47594, 47595, 47596, 47597, 47598, 47599, 47600, 47601, 47602, 47603, 47604, 47605, 47606, 47607, 47608, 47609, 47610, 47611, 47612, 47613, 47614, 47615, 47616, 47617, 47618, 47619, 47620, 47621, 47622, 47623, 47624, 47625, 47626, 47627, 47628, 47629, 47630, 47631, 47632, 47633, 47634, 47635, 47636, 47637, 47638, 47639, 47640, 47641, 47642, 47643, 47644, 47645, 47646, 47647, 47648, 47649, 47650, 47651, 47652, 47653, 47654, 47655, 47656, 47657, 47658, 47659, 47660, 47661, 47662, 47663, 47664, 47665, 47666, 47667, 47668, 47669, 47670, 47671, 47672, 47673, 47674, 47675, 47676, 47677, 47678, 47679, 47680, 47681, 47682, 47683, 47684, 47685, 47686, 47687, 47688, 47689, 47690, 47691, 47692, 47693, 47694, 47695, 47696, 47697, 47698, 47699, 47700, 47701, 47702, 47703, 47704, 47705, 47706, 47707, 47708, 47709, 47710, 47711, 47712, 47713, 47714, 47715, 47716, 47717, 47718, 47719, 47720, 47721, 47722, 47723, 47724, 47725, 47726, 47727, 47728, 47729, 47730, 47731, 47732, 47733, 47734, 47735, 47736, 47737, 47738, 47739, 47740, 47741, 47742, 47743, 47744, 47745, 47746, 47747, 47748, 47749, 47750, 47751, 47752, 47753, 47754, 47755, 47756, 47757, 47758, 47759, 47760, 47761, 47762, 47763, 47764, 47765, 47766, 47767, 47768, 47769, 47770, 47771, 47772, 47773, 47774, 47775, 47776, 47777, 47778, 47779, 47780, 47781, 47782, 47783, 47784, 47785, 47786, 47787, 47788, 47789, 47790, 47791, 47792, 47793, 47794, 47795, 47796, 47797, 47798, 47799, 47800, 47801, 47802, 47803, 47804, 47805, 47806, 47807, 47808, 47809, 47810, 47811, 47812, 47813, 47814, 47815, 47816, 47817, 47818, 47819, 47820, 47821, 47822, 47823, 47824, 47825, 47826, 47827, 47828, 47829, 47830, 47831, 47832, 47833, 47834, 47835, 47836, 47837, 47838, 47839, 47840, 47841, 47842, 47843, 47844, 47845, 47846, 47847, 47848, 47849, 47850, 47851, 47852, 47853, 47854, 47855, 47856, 47857, 47858, 47859, 47860, 47861, 47862, 47863, 47864, 47865, 47866, 47867, 47868, 47869, 47870, 47871, 47872, 47873, 47874, 47875, 47876, 47877, 47878, 47879, 47880, 47881, 47882, 47883, 47884, 47885, 47886, 47887, 47888, 47889, 47890, 47891, 47892, 47893, 47894, 47895, 47896, 47897, 47898, 47899, 47900, 47901, 47902, 47903, 47904, 47905, 47906, 47907, 47908, 47909, 47910, 47911, 47912, 47913, 47914, 47915, 47916, 47917, 47918, 47919, 47920, 47921, 47922, 47923, 47924, 47925, 47926, 47927, 47928, 47929, 47930, 47931, 47932, 47933, 47934, 47935, 47936, 47937, 47938, 47939, 47940, 47941, 47942, 47943, 47944, 47945, 47946, 47947, 47948, 47949, 47950, 47951, 47952, 47953, 47954, 47955, 47956, 47957, 47958, 47959, 47960, 47961, 47962, 47963, 47964, 47965, 47966, 47967, 47968, 47969, 47970, 47971, 47972, 47973, 47974, 47975, 47976, 47977, 47978, 47979, 47980, 47981, 47982, 47983, 47984, 47985, 47986, 47987, 47988, 47989, 47990, 47991, 47992, 47993, 47994, 47995, 47996, 47997, 47998, 47999, 48000, 48001, 48002, 48003, 48004, 48005, 48006, 48007, 48008, 48009, 48010, 48011, 48012, 48013, 48014, 48015, 48016, 48017, 48018, 48019, 48020, 48021, 48022, 48023, 48024, 48025, 48026, 48027, 48028, 48029, 48030, 48031, 48032, 48033, 48034, 48035, 48036, 48037, 48038, 48039, 48040, 48041, 48042, 48043, 48044, 48045, 48046, 48047, 48048, 48049, 48050, 48051, 48052, 48053, 48054, 48055, 48056, 48057, 48058, 48059, 48060, 48061, 48062, 48063, 48064, 48065, 48066, 48067, 48068, 48069, 48070, 48071, 48072, 48073, 48074, 48075, 48076, 48077, 48078, 48079, 48080, 48081, 48082, 48083, 48084, 48085, 48086, 48087, 48088, 48089, 48090, 48091, 48092, 48093, 48094, 48095, 48096, 48097, 48098, 48099, 48100, 48101, 48102, 48103, 48104, 48105, 48106, 48107, 48108, 48109, 48110, 48111, 48112, 48113, 48114, 48115, 48116, 48117, 48118, 48119, 48120, 48121, 48122, 48123, 48124, 48125, 48126, 48127, 48128, 48129, 48130, 48131, 48132, 48133, 48134, 48135, 48136, 48137, 48138, 48139, 48140, 48141, 48142, 48143, 48144, 48145, 48146, 48147, 48148, 48149, 48150, 48151, 48152, 48153, 48154, 48155, 48156, 48157, 48158, 48159, 48160, 48161, 48162, 48163, 48164, 48165, 48166, 48167, 48168, 48169, 48170, 48171, 48172, 48173, 48174, 48175, 48176, 48177, 48178, 48179, 48180, 48181, 48182, 48183, 48184, 48185, 48186, 48187, 48188, 48189, 48190, 48191, 48192, 48193, 48194, 48195, 48196, 48197, 48198, 48199, 48200, 48201, 48202, 48203, 48204, 48205, 48206, 48207, 48208, 48209, 48210, 48211, 48212, 48213, 48214, 48215, 48216, 48217, 48218, 48219, 48220, 48221, 48222, 48223, 48224, 48225, 48226, 48227, 48228, 48229, 48230, 48231, 48232, 48233, 48234, 48235, 48236, 48237, 48238, 48239, 48240, 48241, 48242, 48243, 48244, 48245, 48246, 48247, 48248, 48249, 48250, 48251, 48252, 48253, 48254, 48255, 48256, 48257, 48258, 48259, 48260, 48261, 48262, 48263, 48264, 48265, 48266, 48267, 48268, 48269, 48270, 48271, 48272, 48273, 48274, 48275, 48276, 48277, 48278, 48279, 48280, 48281, 48282, 48283, 48284, 48285, 48286, 48287, 48288, 48289, 48290, 48291, 48292, 48293, 48294, 48295, 48296, 48297, 48298, 48299, 48300, 48301, 48302, 48303, 48304, 48305, 48306, 48307, 48308, 48309, 48310, 48311, 48312, 48313, 48314, 48315, 48316, 48317, 48318, 48319, 48320, 48321, 48322, 48323, 48324, 48325, 48326, 48327, 48328, 48329, 48330, 48331, 48332, 48333, 48334, 48335, 48336, 48337, 48338, 48339, 48340, 48341, 48342, 48343, 48344, 48345, 48346, 48347, 48348, 48349, 48350, 48351, 48352, 48353, 48354, 48355, 48356, 48357, 48358, 48359, 48360, 48361, 48362, 48363, 48364, 48365, 48366, 48367, 48368, 48369, 48370, 48371, 48372, 48373, 48374, 48375, 48376, 48377, 48378, 48379, 48380, 48381, 48382, 48383, 48384, 48385, 48386, 48387, 48388, 48389, 48390, 48391, 48392, 48393, 48394, 48395, 48396, 48397, 48398, 48399, 48400, 48401, 48402, 48403, 48404, 48405, 48406, 48407, 48408, 48409, 48410, 48411, 48412, 48413, 48414, 48415, 48416, 48417, 48418, 48419, 48420, 48421, 48422, 48423, 48424, 48425, 48426, 48427, 48428, 48429, 48430, 48431, 48432, 48433, 48434, 48435, 48436, 48437, 48438, 48439, 48440, 48441, 48442, 48443, 48444, 48445, 48446, 48447, 48448, 48449, 48450, 48451, 48452, 48453, 48454, 48455, 48456, 48457, 48458, 48459, 48460, 48461, 48462, 48463, 48464, 48465, 48466, 48467, 48468, 48469, 48470, 48471, 48472, 48473, 48474, 48475, 48476, 48477, 48478, 48479, 48480, 48481, 48482, 48483, 48484, 48485, 48486, 48487, 48488, 48489, 48490, 48491, 48492, 48493, 48494, 48495, 48496, 48497, 48498, 48499, 48500, 48501, 48502, 48503, 48504, 48505, 48506, 48507, 48508, 48509, 48510, 48511, 48512, 48513, 48514, 48515, 48516, 48517, 48518, 48519, 48520, 48521, 48522, 48523, 48524, 48525, 48526, 48527, 48528, 48529, 48530, 48531, 48532, 48533, 48534, 48535, 48536, 48537, 48538, 48539, 48540, 48541, 48542, 48543, 48544, 48545, 48546, 48547, 48548, 48549, 48550, 48551, 48552, 48553, 48554, 48555, 48556, 48557, 48558, 48559, 48560, 48561, 48562, 48563, 48564, 48565, 48566, 48567, 48568, 48569, 48570, 48571, 48572, 48573, 48574, 48575, 48576, 48577, 48578, 48579, 48580, 48581, 48582, 48583, 48584, 48585, 48586, 48587, 48588, 48589, 48590, 48591, 48592, 48593, 48594, 48595, 48596, 48597, 48598, 48599, 48600, 48601, 48602, 48603, 48604, 48605, 48606, 48607, 48608, 48609, 48610, 48611, 48612, 48613, 48614, 48615, 48616, 48617, 48618, 48619, 48620, 48621, 48622, 48623, 48624, 48625, 48626, 48627, 48628, 48629, 48630, 48631, 48632, 48633, 48634, 48635, 48636, 48637, 48638, 48639, 48640, 48641, 48642, 48643, 48644, 48645, 48646, 48647, 48648, 48649, 48650, 48651, 48652, 48653, 48654, 48655, 48656, 48657, 48658, 48659, 48660, 48661, 48662, 48663, 48664, 48665, 48666, 48667, 48668, 48669, 48670, 48671, 48672, 48673, 48674, 48675, 48676, 48677, 48678, 48679, 48680, 48681, 48682, 48683, 48684, 48685, 48686, 48687, 48688, 48689, 48690, 48691, 48692, 48693, 48694, 48695, 48696, 48697, 48698, 48699, 48700, 48701, 48702, 48703, 48704, 48705, 48706, 48707, 48708, 48709, 48710, 48711, 48712, 48713, 48714, 48715, 48716, 48717, 48718, 48719, 48720, 48721, 48722, 48723, 48724, 48725, 48726, 48727, 48728, 48729, 48730, 48731, 48732, 48733, 48734, 48735, 48736, 48737, 48738, 48739, 48740, 48741, 48742, 48743, 48744, 48745, 48746, 48747, 48748, 48749, 48750, 48751, 48752, 48753, 48754, 48755, 48756, 48757, 48758, 48759, 48760, 48761, 48762, 48763, 48764, 48765, 48766, 48767, 48768, 48769, 48770, 48771, 48772, 48773, 48774, 48775, 48776, 48777, 48778, 48779, 48780, 48781, 48782, 48783, 48784, 48785, 48786, 48787, 48788, 48789, 48790, 48791, 48792, 48793, 48794, 48795, 48796, 48797, 48798, 48799, 48800, 48801, 48802, 48803, 48804, 48805, 48806, 48807, 48808, 48809, 48810, 48811, 48812, 48813, 48814, 48815, 48816, 48817, 48818, 48819, 48820, 48821, 48822, 48823, 48824, 48825, 48826, 48827, 48828, 48829, 48830, 48831, 48832, 48833, 48834, 48835, 48836, 48837, 48838, 48839, 48840, 48841, 48842, 48843, 48844, 48845, 48846, 48847, 48848, 48849, 48850, 48851, 48852, 48853, 48854, 48855, 48856, 48857, 48858, 48859, 48860, 48861, 48862, 48863, 48864, 48865, 48866, 48867, 48868, 48869, 48870, 48871, 48872, 48873, 48874, 48875, 48876, 48877, 48878, 48879, 48880, 48881, 48882, 48883, 48884, 48885, 48886, 48887, 48888, 48889, 48890, 48891, 48892, 48893, 48894, 48895, 48896, 48897, 48898, 48899, 48900, 48901, 48902, 48903, 48904, 48905, 48906, 48907, 48908, 48909, 48910, 48911, 48912, 48913, 48914, 48915, 48916, 48917, 48918, 48919, 48920, 48921, 48922, 48923, 48924, 48925, 48926, 48927, 48928, 48929, 48930, 48931, 48932, 48933, 48934, 48935, 48936, 48937, 48938, 48939, 48940, 48941, 48942, 48943, 48944, 48945, 48946, 48947, 48948, 48949, 48950, 48951, 48952, 48953, 48954, 48955, 48956, 48957, 48958, 48959, 48960, 48961, 48962, 48963, 48964, 48965, 48966, 48967, 48968, 48969, 48970, 48971, 48972, 48973, 48974, 48975, 48976, 48977, 48978, 48979, 48980, 48981, 48982, 48983, 48984, 48985, 48986, 48987, 48988, 48989, 48990, 48991, 48992, 48993, 48994, 48995, 48996, 48997, 48998, 48999, 49000, 49001, 49002, 49003, 49004, 49005, 49006, 49007, 49008, 49009, 49010, 49011, 49012, 49013, 49014, 49015, 49016, 49017, 49018, 49019, 49020, 49021, 49022, 49023, 49024, 49025, 49026, 49027, 49028, 49029, 49030, 49031, 49032, 49033, 49034, 49035, 49036, 49037, 49038, 49039, 49040, 49041, 49042, 49043, 49044, 49045, 49046, 49047, 49048, 49049, 49050, 49051, 49052, 49053, 49054, 49055, 49056, 49057, 49058, 49059, 49060, 49061, 49062, 49063, 49064, 49065, 49066, 49067, 49068, 49069, 49070, 49071, 49072, 49073, 49074, 49075, 49076, 49077, 49078, 49079, 49080, 49081, 49082, 49083, 49084, 49085, 49086, 49087, 49088, 49089, 49090, 49091, 49092, 49093, 49094, 49095, 49096, 49097, 49098, 49099, 49100, 49101, 49102, 49103, 49104, 49105, 49106, 49107, 49108, 49109, 49110, 49111, 49112, 49113, 49114, 49115, 49116, 49117, 49118, 49119, 49120, 49121, 49122, 49123, 49124, 49125, 49126, 49127, 49128, 49129, 49130, 49131, 49132, 49133, 49134, 49135, 49136, 49137, 49138, 49139, 49140, 49141, 49142, 49143, 49144, 49145, 49146, 49147, 49148, 49149, 49150, 49151, 49152, 49153, 49154, 49155, 49156, 49157, 49158, 49159, 49160, 49161, 49162, 49163, 49164, 49165, 49166, 49167, 49168, 49169, 49170, 49171, 49172, 49173, 49174, 49175, 49176, 49177, 49178, 49179, 49180, 49181, 49182, 49183, 49184, 49185, 49186, 49187, 49188, 49189, 49190, 49191, 49192, 49193, 49194, 49195, 49196, 49197, 49198, 49199, 49200, 49201, 49202, 49203, 49204, 49205, 49206, 49207, 49208, 49209, 49210, 49211, 49212, 49213, 49214, 49215, 49216, 49217, 49218, 49219, 49220, 49221, 49222, 49223, 49224, 49225, 49226, 49227, 49228, 49229, 49230, 49231, 49232, 49233, 49234, 49235, 49236, 49237, 49238, 49239, 49240, 49241, 49242, 49243, 49244, 49245, 49246, 49247, 49248, 49249, 49250, 49251, 49252, 49253, 49254, 49255, 49256, 49257, 49258, 49259, 49260, 49261, 49262, 49263, 49264, 49265, 49266, 49267, 49268, 49269, 49270, 49271, 49272, 49273, 49274, 49275, 49276, 49277, 49278, 49279, 49280, 49281, 49282, 49283, 49284, 49285, 49286, 49287, 49288, 49289, 49290, 49291, 49292, 49293, 49294, 49295, 49296, 49297, 49298, 49299, 49300, 49301, 49302, 49303, 49304, 49305, 49306, 49307, 49308, 49309, 49310, 49311, 49312, 49313, 49314, 49315, 49316, 49317, 49318, 49319, 49320, 49321, 49322, 49323, 49324, 49325, 49326, 49327, 49328, 49329, 49330, 49331, 49332, 49333, 49334, 49335, 49336, 49337, 49338, 49339, 49340, 49341, 49342, 49343, 49344, 49345, 49346, 49347, 49348, 49349, 49350, 49351, 49352, 49353, 49354, 49355, 49356, 49357, 49358, 49359, 49360, 49361, 49362, 49363, 49364, 49365, 49366, 49367, 49368, 49369, 49370, 49371, 49372, 49373, 49374, 49375, 49376, 49377, 49378, 49379, 49380, 49381, 49382, 49383, 49384, 49385, 49386, 49387, 49388, 49389, 49390, 49391, 49392, 49393, 49394, 49395, 49396, 49397, 49398, 49399, 49400, 49401, 49402, 49403, 49404, 49405, 49406, 49407, 49408, 49409, 49410, 49411, 49412, 49413, 49414, 49415, 49416, 49417, 49418, 49419, 49420, 49421, 49422, 49423, 49424, 49425, 49426, 49427, 49428, 49429, 49430, 49431, 49432, 49433, 49434, 49435, 49436, 49437, 49438, 49439, 49440, 49441, 49442, 49443, 49444, 49445, 49446, 49447, 49448, 49449, 49450, 49451, 49452, 49453, 49454, 49455, 49456, 49457, 49458, 49459, 49460, 49461, 49462, 49463, 49464, 49465, 49466, 49467, 49468, 49469, 49470, 49471, 49472, 49473, 49474, 49475, 49476, 49477, 49478, 49479, 49480, 49481, 49482, 49483, 49484, 49485, 49486, 49487, 49488, 49489, 49490, 49491, 49492, 49493, 49494, 49495, 49496, 49497, 49498, 49499, 49500, 49501, 49502, 49503, 49504, 49505, 49506, 49507, 49508, 49509, 49510, 49511, 49512, 49513, 49514, 49515, 49516, 49517, 49518, 49519, 49520, 49521, 49522, 49523, 49524, 49525, 49526, 49527, 49528, 49529, 49530, 49531, 49532, 49533, 49534, 49535, 49536, 49537, 49538, 49539, 49540, 49541, 49542, 49543, 49544, 49545, 49546, 49547, 49548, 49549, 49550, 49551, 49552, 49553, 49554, 49555, 49556, 49557, 49558, 49559, 49560, 49561, 49562, 49563, 49564, 49565, 49566, 49567, 49568, 49569, 49570, 49571, 49572, 49573, 49574, 49575, 49576, 49577, 49578, 49579, 49580, 49581, 49582, 49583, 49584, 49585, 49586, 49587, 49588, 49589, 49590, 49591, 49592, 49593, 49594, 49595, 49596, 49597, 49598, 49599, 49600, 49601, 49602, 49603, 49604, 49605, 49606, 49607, 49608, 49609, 49610, 49611, 49612, 49613, 49614, 49615, 49616, 49617, 49618, 49619, 49620, 49621, 49622, 49623, 49624, 49625, 49626, 49627, 49628, 49629, 49630, 49631, 49632, 49633, 49634, 49635, 49636, 49637, 49638, 49639, 49640, 49641, 49642, 49643, 49644, 49645, 49646, 49647, 49648, 49649, 49650, 49651, 49652, 49653, 49654, 49655, 49656, 49657, 49658, 49659, 49660, 49661, 49662, 49663, 49664, 49665, 49666, 49667, 49668, 49669, 49670, 49671, 49672, 49673, 49674, 49675, 49676, 49677, 49678, 49679, 49680, 49681, 49682, 49683, 49684, 49685, 49686, 49687, 49688, 49689, 49690, 49691, 49692, 49693, 49694, 49695, 49696, 49697, 49698, 49699, 49700, 49701, 49702, 49703, 49704, 49705, 49706, 49707, 49708, 49709, 49710, 49711, 49712, 49713, 49714, 49715, 49716, 49717, 49718, 49719, 49720, 49721, 49722, 49723, 49724, 49725, 49726, 49727, 49728, 49729, 49730, 49731, 49732, 49733, 49734, 49735, 49736, 49737, 49738, 49739, 49740, 49741, 49742, 49743, 49744, 49745, 49746, 49747, 49748, 49749, 49750, 49751, 49752, 49753, 49754, 49755, 49756, 49757, 49758, 49759, 49760, 49761, 49762, 49763, 49764, 49765, 49766, 49767, 49768, 49769, 49770, 49771, 49772, 49773, 49774, 49775, 49776, 49777, 49778, 49779, 49780, 49781, 49782, 49783, 49784, 49785, 49786, 49787, 49788, 49789, 49790, 49791, 49792, 49793, 49794, 49795, 49796, 49797, 49798, 49799, 49800, 49801, 49802, 49803, 49804, 49805, 49806, 49807, 49808, 49809, 49810, 49811, 49812, 49813, 49814, 49815, 49816, 49817, 49818, 49819, 49820, 49821, 49822, 49823, 49824, 49825, 49826, 49827, 49828, 49829, 49830, 49831, 49832, 49833, 49834, 49835, 49836, 49837, 49838, 49839, 49840, 49841, 49842, 49843, 49844, 49845, 49846, 49847, 49848, 49849, 49850, 49851, 49852, 49853, 49854, 49855, 49856, 49857, 49858, 49859, 49860, 49861, 49862, 49863, 49864, 49865, 49866, 49867, 49868, 49869, 49870, 49871, 49872, 49873, 49874, 49875, 49876, 49877, 49878, 49879, 49880, 49881, 49882, 49883, 49884, 49885, 49886, 49887, 49888, 49889, 49890, 49891, 49892, 49893, 49894, 49895, 49896, 49897, 49898, 49899, 49900, 49901, 49902, 49903, 49904, 49905, 49906, 49907, 49908, 49909, 49910, 49911, 49912, 49913, 49914, 49915, 49916, 49917, 49918, 49919, 49920, 49921, 49922, 49923, 49924, 49925, 49926, 49927, 49928, 49929, 49930, 49931, 49932, 49933, 49934, 49935, 49936, 49937, 49938, 49939, 49940, 49941, 49942, 49943, 49944, 49945, 49946, 49947, 49948, 49949, 49950, 49951, 49952, 49953, 49954, 49955, 49956, 49957, 49958, 49959, 49960, 49961, 49962, 49963, 49964, 49965, 49966, 49967, 49968, 49969, 49970, 49971, 49972, 49973, 49974, 49975, 49976, 49977, 49978, 49979, 49980, 49981, 49982, 49983, 49984, 49985, 49986, 49987, 49988, 49989, 49990, 49991, 49992, 49993, 49994, 49995, 49996, 49997, 49998, 49999, 50000, 50001, 50002, 50003, 50004, 50005, 50006, 50007, 50008, 50009, 50010, 50011, 50012, 50013, 50014, 50015, 50016, 50017, 50018, 50019, 50020, 50021, 50022, 50023, 50024, 50025, 50026, 50027, 50028, 50029, 50030, 50031, 50032, 50033, 50034, 50035, 50036, 50037, 50038, 50039, 50040, 50041, 50042, 50043, 50044, 50045, 50046, 50047, 50048, 50049, 50050, 50051, 50052, 50053, 50054, 50055, 50056, 50057, 50058, 50059, 50060, 50061, 50062, 50063, 50064, 50065, 50066, 50067, 50068, 50069, 50070, 50071, 50072, 50073, 50074, 50075, 50076, 50077, 50078, 50079, 50080, 50081, 50082, 50083, 50084, 50085, 50086, 50087, 50088, 50089, 50090, 50091, 50092, 50093, 50094, 50095, 50096, 50097, 50098, 50099, 50100, 50101, 50102, 50103, 50104, 50105, 50106, 50107, 50108, 50109, 50110, 50111, 50112, 50113, 50114, 50115, 50116, 50117, 50118, 50119, 50120, 50121, 50122, 50123, 50124, 50125, 50126, 50127, 50128, 50129, 50130, 50131, 50132, 50133, 50134, 50135, 50136, 50137, 50138, 50139, 50140, 50141, 50142, 50143, 50144, 50145, 50146, 50147, 50148, 50149, 50150, 50151, 50152, 50153, 50154, 50155, 50156, 50157, 50158, 50159, 50160, 50161, 50162, 50163, 50164, 50165, 50166, 50167, 50168, 50169, 50170, 50171, 50172, 50173, 50174, 50175, 50176, 50177, 50178, 50179, 50180, 50181, 50182, 50183, 50184, 50185, 50186, 50187, 50188, 50189, 50190, 50191, 50192, 50193, 50194, 50195, 50196, 50197, 50198, 50199, 50200, 50201, 50202, 50203, 50204, 50205, 50206, 50207, 50208, 50209, 50210, 50211, 50212, 50213, 50214, 50215, 50216, 50217, 50218, 50219, 50220, 50221, 50222, 50223, 50224, 50225, 50226, 50227, 50228, 50229, 50230, 50231, 50232, 50233, 50234, 50235, 50236, 50237, 50238, 50239, 50240, 50241, 50242, 50243, 50244, 50245, 50246, 50247, 50248, 50249, 50250, 50251, 50252, 50253, 50254, 50255, 50256, 50257, 50258, 50259, 50260, 50261, 50262, 50263, 50264, 50265, 50266, 50267, 50268, 50269, 50270, 50271, 50272, 50273, 50274, 50275, 50276, 50277, 50278, 50279, 50280, 50281, 50282, 50283, 50284, 50285, 50286, 50287, 50288, 50289, 50290, 50291, 50292, 50293, 50294, 50295, 50296, 50297, 50298, 50299, 50300, 50301, 50302, 50303, 50304, 50305, 50306, 50307, 50308, 50309, 50310, 50311, 50312, 50313, 50314, 50315, 50316, 50317, 50318, 50319, 50320, 50321, 50322, 50323, 50324, 50325, 50326, 50327, 50328, 50329, 50330, 50331, 50332, 50333, 50334, 50335, 50336, 50337, 50338, 50339, 50340, 50341, 50342, 50343, 50344, 50345, 50346, 50347, 50348, 50349, 50350, 50351, 50352, 50353, 50354, 50355, 50356, 50357, 50358, 50359, 50360, 50361, 50362, 50363, 50364, 50365, 50366, 50367, 50368, 50369, 50370, 50371, 50372, 50373, 50374, 50375, 50376, 50377, 50378, 50379, 50380, 50381, 50382, 50383, 50384, 50385, 50386, 50387, 50388, 50389, 50390, 50391, 50392, 50393, 50394, 50395, 50396, 50397, 50398, 50399, 50400, 50401, 50402, 50403, 50404, 50405, 50406, 50407, 50408, 50409, 50410, 50411, 50412, 50413, 50414, 50415, 50416, 50417, 50418, 50419, 50420, 50421, 50422, 50423, 50424, 50425, 50426, 50427, 50428, 50429, 50430, 50431, 50432, 50433, 50434, 50435, 50436, 50437, 50438, 50439, 50440, 50441, 50442, 50443, 50444, 50445, 50446, 50447, 50448, 50449, 50450, 50451, 50452, 50453, 50454, 50455, 50456, 50457, 50458, 50459, 50460, 50461, 50462, 50463, 50464, 50465, 50466, 50467, 50468, 50469, 50470, 50471, 50472, 50473, 50474, 50475, 50476, 50477, 50478, 50479, 50480, 50481, 50482, 50483, 50484, 50485, 50486, 50487, 50488, 50489, 50490, 50491, 50492, 50493, 50494, 50495, 50496, 50497, 50498, 50499, 50500, 50501, 50502, 50503, 50504, 50505, 50506, 50507, 50508, 50509, 50510, 50511, 50512, 50513, 50514, 50515, 50516, 50517, 50518, 50519, 50520, 50521, 50522, 50523, 50524, 50525, 50526, 50527, 50528, 50529, 50530, 50531, 50532, 50533, 50534, 50535, 50536, 50537, 50538, 50539, 50540, 50541, 50542, 50543, 50544, 50545, 50546, 50547, 50548, 50549, 50550, 50551, 50552, 50553, 50554, 50555, 50556, 50557, 50558, 50559, 50560, 50561, 50562, 50563, 50564, 50565, 50566, 50567, 50568, 50569, 50570, 50571, 50572, 50573, 50574, 50575, 50576, 50577, 50578, 50579, 50580, 50581, 50582, 50583, 50584, 50585, 50586, 50587, 50588, 50589, 50590, 50591, 50592, 50593, 50594, 50595, 50596, 50597, 50598, 50599, 50600, 50601, 50602, 50603, 50604, 50605, 50606, 50607, 50608, 50609, 50610, 50611, 50612, 50613, 50614, 50615, 50616, 50617, 50618, 50619, 50620, 50621, 50622, 50623, 50624, 50625, 50626, 50627, 50628, 50629, 50630, 50631, 50632, 50633, 50634, 50635, 50636, 50637, 50638, 50639, 50640, 50641, 50642, 50643, 50644, 50645, 50646, 50647, 50648, 50649, 50650, 50651, 50652, 50653, 50654, 50655, 50656, 50657, 50658, 50659, 50660, 50661, 50662, 50663, 50664, 50665, 50666, 50667, 50668, 50669, 50670, 50671, 50672, 50673, 50674, 50675, 50676, 50677, 50678, 50679, 50680, 50681, 50682, 50683, 50684, 50685, 50686, 50687, 50688, 50689, 50690, 50691, 50692, 50693, 50694, 50695, 50696, 50697, 50698, 50699, 50700, 50701, 50702, 50703, 50704, 50705, 50706, 50707, 50708, 50709, 50710, 50711, 50712, 50713, 50714, 50715, 50716, 50717, 50718, 50719, 50720, 50721, 50722, 50723, 50724, 50725, 50726, 50727, 50728, 50729, 50730, 50731, 50732, 50733, 50734, 50735, 50736, 50737, 50738, 50739, 50740, 50741, 50742, 50743, 50744, 50745, 50746, 50747, 50748, 50749, 50750, 50751, 50752, 50753, 50754, 50755, 50756, 50757, 50758, 50759, 50760, 50761, 50762, 50763, 50764, 50765, 50766, 50767, 50768, 50769, 50770, 50771, 50772, 50773, 50774, 50775, 50776, 50777, 50778, 50779, 50780, 50781, 50782, 50783, 50784, 50785, 50786, 50787, 50788, 50789, 50790, 50791, 50792, 50793, 50794, 50795, 50796, 50797, 50798, 50799, 50800, 50801, 50802, 50803, 50804, 50805, 50806, 50807, 50808, 50809, 50810, 50811, 50812, 50813, 50814, 50815, 50816, 50817, 50818, 50819, 50820, 50821, 50822, 50823, 50824, 50825, 50826, 50827, 50828, 50829, 50830, 50831, 50832, 50833, 50834, 50835, 50836, 50837, 50838, 50839, 50840, 50841, 50842, 50843, 50844, 50845, 50846, 50847, 50848, 50849, 50850, 50851, 50852, 50853, 50854, 50855, 50856, 50857, 50858, 50859, 50860, 50861, 50862, 50863, 50864, 50865, 50866, 50867, 50868, 50869, 50870, 50871, 50872, 50873, 50874, 50875, 50876, 50877, 50878, 50879, 50880, 50881, 50882, 50883, 50884, 50885, 50886, 50887, 50888, 50889, 50890, 50891, 50892, 50893, 50894, 50895, 50896, 50897, 50898, 50899, 50900, 50901, 50902, 50903, 50904, 50905, 50906, 50907, 50908, 50909, 50910, 50911, 50912, 50913, 50914, 50915, 50916, 50917, 50918, 50919, 50920, 50921, 50922, 50923, 50924, 50925, 50926, 50927, 50928, 50929, 50930, 50931, 50932, 50933, 50934, 50935, 50936, 50937, 50938, 50939, 50940, 50941, 50942, 50943, 50944, 50945, 50946, 50947, 50948, 50949, 50950, 50951, 50952, 50953, 50954, 50955, 50956, 50957, 50958, 50959, 50960, 50961, 50962, 50963, 50964, 50965, 50966, 50967, 50968, 50969, 50970, 50971, 50972, 50973, 50974, 50975, 50976, 50977, 50978, 50979, 50980, 50981, 50982, 50983, 50984, 50985, 50986, 50987, 50988, 50989, 50990, 50991, 50992, 50993, 50994, 50995, 50996, 50997, 50998, 50999, 51000, 51001, 51002, 51003, 51004, 51005, 51006, 51007, 51008, 51009, 51010, 51011, 51012, 51013, 51014, 51015, 51016, 51017, 51018, 51019, 51020, 51021, 51022, 51023, 51024, 51025, 51026, 51027, 51028, 51029, 51030, 51031, 51032, 51033, 51034, 51035, 51036, 51037, 51038, 51039, 51040, 51041, 51042, 51043, 51044, 51045, 51046, 51047, 51048, 51049, 51050, 51051, 51052, 51053, 51054, 51055, 51056, 51057, 51058, 51059, 51060, 51061, 51062, 51063, 51064, 51065, 51066, 51067, 51068, 51069, 51070, 51071, 51072, 51073, 51074, 51075, 51076, 51077, 51078, 51079, 51080, 51081, 51082, 51083, 51084, 51085, 51086, 51087, 51088, 51089, 51090, 51091, 51092, 51093, 51094, 51095, 51096, 51097, 51098, 51099, 51100, 51101, 51102, 51103, 51104, 51105, 51106, 51107, 51108, 51109, 51110, 51111, 51112, 51113, 51114, 51115, 51116, 51117, 51118, 51119, 51120, 51121, 51122, 51123, 51124, 51125, 51126, 51127, 51128, 51129, 51130, 51131, 51132, 51133, 51134, 51135, 51136, 51137, 51138, 51139, 51140, 51141, 51142, 51143, 51144, 51145, 51146, 51147, 51148, 51149, 51150, 51151, 51152, 51153, 51154, 51155, 51156, 51157, 51158, 51159, 51160, 51161, 51162, 51163, 51164, 51165, 51166, 51167, 51168, 51169, 51170, 51171, 51172, 51173, 51174, 51175, 51176, 51177, 51178, 51179, 51180, 51181, 51182, 51183, 51184, 51185, 51186, 51187, 51188, 51189, 51190, 51191, 51192, 51193, 51194, 51195, 51196, 51197, 51198, 51199, 51200, 51201, 51202, 51203, 51204, 51205, 51206, 51207, 51208, 51209, 51210, 51211, 51212, 51213, 51214, 51215, 51216, 51217, 51218, 51219, 51220, 51221, 51222, 51223, 51224, 51225, 51226, 51227, 51228, 51229, 51230, 51231, 51232, 51233, 51234, 51235, 51236, 51237, 51238, 51239, 51240, 51241, 51242, 51243, 51244, 51245, 51246, 51247, 51248, 51249, 51250, 51251, 51252, 51253, 51254, 51255, 51256, 51257, 51258, 51259, 51260, 51261, 51262, 51263, 51264, 51265, 51266, 51267, 51268, 51269, 51270, 51271, 51272, 51273, 51274, 51275, 51276, 51277, 51278, 51279, 51280, 51281, 51282, 51283, 51284, 51285, 51286, 51287, 51288, 51289, 51290, 51291, 51292, 51293, 51294, 51295, 51296, 51297, 51298, 51299, 51300, 51301, 51302, 51303, 51304, 51305, 51306, 51307, 51308, 51309, 51310, 51311, 51312, 51313, 51314, 51315, 51316, 51317, 51318, 51319, 51320, 51321, 51322, 51323, 51324, 51325, 51326, 51327, 51328, 51329, 51330, 51331, 51332, 51333, 51334, 51335, 51336, 51337, 51338, 51339, 51340, 51341, 51342, 51343, 51344, 51345, 51346, 51347, 51348, 51349, 51350, 51351, 51352, 51353, 51354, 51355, 51356, 51357, 51358, 51359, 51360, 51361, 51362, 51363, 51364, 51365, 51366, 51367, 51368, 51369, 51370, 51371, 51372, 51373, 51374, 51375, 51376, 51377, 51378, 51379, 51380, 51381, 51382, 51383, 51384, 51385, 51386, 51387, 51388, 51389, 51390, 51391, 51392, 51393, 51394, 51395, 51396, 51397, 51398, 51399, 51400, 51401, 51402, 51403, 51404, 51405, 51406, 51407, 51408, 51409, 51410, 51411, 51412, 51413, 51414, 51415, 51416, 51417, 51418, 51419, 51420, 51421, 51422, 51423, 51424, 51425, 51426, 51427, 51428, 51429, 51430, 51431, 51432, 51433, 51434, 51435, 51436, 51437, 51438, 51439, 51440, 51441, 51442, 51443, 51444, 51445, 51446, 51447, 51448, 51449, 51450, 51451, 51452, 51453, 51454, 51455, 51456, 51457, 51458, 51459, 51460, 51461, 51462, 51463, 51464, 51465, 51466, 51467, 51468, 51469, 51470, 51471, 51472, 51473, 51474, 51475, 51476, 51477, 51478, 51479, 51480, 51481, 51482, 51483, 51484, 51485, 51486, 51487, 51488, 51489, 51490, 51491, 51492, 51493, 51494, 51495, 51496, 51497, 51498, 51499, 51500, 51501, 51502, 51503, 51504, 51505, 51506, 51507, 51508, 51509, 51510, 51511, 51512, 51513, 51514, 51515, 51516, 51517, 51518, 51519, 51520, 51521, 51522, 51523, 51524, 51525, 51526, 51527, 51528, 51529, 51530, 51531, 51532, 51533, 51534, 51535, 51536, 51537, 51538, 51539, 51540, 51541, 51542, 51543, 51544, 51545, 51546, 51547, 51548, 51549, 51550, 51551, 51552, 51553, 51554, 51555, 51556, 51557, 51558, 51559, 51560, 51561, 51562, 51563, 51564, 51565, 51566, 51567, 51568, 51569, 51570, 51571, 51572, 51573, 51574, 51575, 51576, 51577, 51578, 51579, 51580, 51581, 51582, 51583, 51584, 51585, 51586, 51587, 51588, 51589, 51590, 51591, 51592, 51593, 51594, 51595, 51596, 51597, 51598, 51599, 51600, 51601, 51602, 51603, 51604, 51605, 51606, 51607, 51608, 51609, 51610, 51611, 51612, 51613, 51614, 51615, 51616, 51617, 51618, 51619, 51620, 51621, 51622, 51623, 51624, 51625, 51626, 51627, 51628, 51629, 51630, 51631, 51632, 51633, 51634, 51635, 51636, 51637, 51638, 51639, 51640, 51641, 51642, 51643, 51644, 51645, 51646, 51647, 51648, 51649, 51650, 51651, 51652, 51653, 51654, 51655, 51656, 51657, 51658, 51659, 51660, 51661, 51662, 51663, 51664, 51665, 51666, 51667, 51668, 51669, 51670, 51671, 51672, 51673, 51674, 51675, 51676, 51677, 51678, 51679, 51680, 51681, 51682, 51683, 51684, 51685, 51686, 51687, 51688, 51689, 51690, 51691, 51692, 51693, 51694, 51695, 51696, 51697, 51698, 51699, 51700, 51701, 51702, 51703, 51704, 51705, 51706, 51707, 51708, 51709, 51710, 51711, 51712, 51713, 51714, 51715, 51716, 51717, 51718, 51719, 51720, 51721, 51722, 51723, 51724, 51725, 51726, 51727, 51728, 51729, 51730, 51731, 51732, 51733, 51734, 51735, 51736, 51737, 51738, 51739, 51740, 51741, 51742, 51743, 51744, 51745, 51746, 51747, 51748, 51749, 51750, 51751, 51752, 51753, 51754, 51755, 51756, 51757, 51758, 51759, 51760, 51761, 51762, 51763, 51764, 51765, 51766, 51767, 51768, 51769, 51770, 51771, 51772, 51773, 51774, 51775, 51776, 51777, 51778, 51779, 51780, 51781, 51782, 51783, 51784, 51785, 51786, 51787, 51788, 51789, 51790, 51791, 51792, 51793, 51794, 51795, 51796, 51797, 51798, 51799, 51800, 51801, 51802, 51803, 51804, 51805, 51806, 51807, 51808, 51809, 51810, 51811, 51812, 51813, 51814, 51815, 51816, 51817, 51818, 51819, 51820, 51821, 51822, 51823, 51824, 51825, 51826, 51827, 51828, 51829, 51830, 51831, 51832, 51833, 51834, 51835, 51836, 51837, 51838, 51839, 51840, 51841, 51842, 51843, 51844, 51845, 51846, 51847, 51848, 51849, 51850, 51851, 51852, 51853, 51854, 51855, 51856, 51857, 51858, 51859, 51860, 51861, 51862, 51863, 51864, 51865, 51866, 51867, 51868, 51869, 51870, 51871, 51872, 51873, 51874, 51875, 51876, 51877, 51878, 51879, 51880, 51881, 51882, 51883, 51884, 51885, 51886, 51887, 51888, 51889, 51890, 51891, 51892, 51893, 51894, 51895, 51896, 51897, 51898, 51899, 51900, 51901, 51902, 51903, 51904, 51905, 51906, 51907, 51908, 51909, 51910, 51911, 51912, 51913, 51914, 51915, 51916, 51917, 51918, 51919, 51920, 51921, 51922, 51923, 51924, 51925, 51926, 51927, 51928, 51929, 51930, 51931, 51932, 51933, 51934, 51935, 51936, 51937, 51938, 51939, 51940, 51941, 51942, 51943, 51944, 51945, 51946, 51947, 51948, 51949, 51950, 51951, 51952, 51953, 51954, 51955, 51956, 51957, 51958, 51959, 51960, 51961, 51962, 51963, 51964, 51965, 51966, 51967, 51968, 51969, 51970, 51971, 51972, 51973, 51974, 51975, 51976, 51977, 51978, 51979, 51980, 51981, 51982, 51983, 51984, 51985, 51986, 51987, 51988, 51989, 51990, 51991, 51992, 51993, 51994, 51995, 51996, 51997, 51998, 51999, 52000, 52001, 52002, 52003, 52004, 52005, 52006, 52007, 52008, 52009, 52010, 52011, 52012, 52013, 52014, 52015, 52016, 52017, 52018, 52019, 52020, 52021, 52022, 52023, 52024, 52025, 52026, 52027, 52028, 52029, 52030, 52031, 52032, 52033, 52034, 52035, 52036, 52037, 52038, 52039, 52040, 52041, 52042, 52043, 52044, 52045, 52046, 52047, 52048, 52049, 52050, 52051, 52052, 52053, 52054, 52055, 52056, 52057, 52058, 52059, 52060, 52061, 52062, 52063, 52064, 52065, 52066, 52067, 52068, 52069, 52070, 52071, 52072, 52073, 52074, 52075, 52076, 52077, 52078, 52079, 52080, 52081, 52082, 52083, 52084, 52085, 52086, 52087, 52088, 52089, 52090, 52091, 52092, 52093, 52094, 52095, 52096, 52097, 52098, 52099, 52100, 52101, 52102, 52103, 52104, 52105, 52106, 52107, 52108, 52109, 52110, 52111, 52112, 52113, 52114, 52115, 52116, 52117, 52118, 52119, 52120, 52121, 52122, 52123, 52124, 52125, 52126, 52127, 52128, 52129, 52130, 52131, 52132, 52133, 52134, 52135, 52136, 52137, 52138, 52139, 52140, 52141, 52142, 52143, 52144, 52145, 52146, 52147, 52148, 52149, 52150, 52151, 52152, 52153, 52154, 52155, 52156, 52157, 52158, 52159, 52160, 52161, 52162, 52163, 52164, 52165, 52166, 52167, 52168, 52169, 52170, 52171, 52172, 52173, 52174, 52175, 52176, 52177, 52178, 52179, 52180, 52181, 52182, 52183, 52184, 52185, 52186, 52187, 52188, 52189, 52190, 52191, 52192, 52193, 52194, 52195, 52196, 52197, 52198, 52199, 52200, 52201, 52202, 52203, 52204, 52205, 52206, 52207, 52208, 52209, 52210, 52211, 52212, 52213, 52214, 52215, 52216, 52217, 52218, 52219, 52220, 52221, 52222, 52223, 52224, 52225, 52226, 52227, 52228, 52229, 52230, 52231, 52232, 52233, 52234, 52235, 52236, 52237, 52238, 52239, 52240, 52241, 52242, 52243, 52244, 52245, 52246, 52247, 52248, 52249, 52250, 52251, 52252, 52253, 52254, 52255, 52256, 52257, 52258, 52259, 52260, 52261, 52262, 52263, 52264, 52265, 52266, 52267, 52268, 52269, 52270, 52271, 52272, 52273, 52274, 52275, 52276, 52277, 52278, 52279, 52280, 52281, 52282, 52283, 52284, 52285, 52286, 52287, 52288, 52289, 52290, 52291, 52292, 52293, 52294, 52295, 52296, 52297, 52298, 52299, 52300, 52301, 52302, 52303, 52304, 52305, 52306, 52307, 52308, 52309, 52310, 52311, 52312, 52313, 52314, 52315, 52316, 52317, 52318, 52319, 52320, 52321, 52322, 52323, 52324, 52325, 52326, 52327, 52328, 52329, 52330, 52331, 52332, 52333, 52334, 52335, 52336, 52337, 52338, 52339, 52340, 52341, 52342, 52343, 52344, 52345, 52346, 52347, 52348, 52349, 52350, 52351, 52352, 52353, 52354, 52355, 52356, 52357, 52358, 52359, 52360, 52361, 52362, 52363, 52364, 52365, 52366, 52367, 52368, 52369, 52370, 52371, 52372, 52373, 52374, 52375, 52376, 52377, 52378, 52379, 52380, 52381, 52382, 52383, 52384, 52385, 52386, 52387, 52388, 52389, 52390, 52391, 52392, 52393, 52394, 52395, 52396, 52397, 52398, 52399, 52400, 52401, 52402, 52403, 52404, 52405, 52406, 52407, 52408, 52409, 52410, 52411, 52412, 52413, 52414, 52415, 52416, 52417, 52418, 52419, 52420, 52421, 52422, 52423, 52424, 52425, 52426, 52427, 52428, 52429, 52430, 52431, 52432, 52433, 52434, 52435, 52436, 52437, 52438, 52439, 52440, 52441, 52442, 52443, 52444, 52445, 52446, 52447, 52448, 52449, 52450, 52451, 52452, 52453, 52454, 52455, 52456, 52457, 52458, 52459, 52460, 52461, 52462, 52463, 52464, 52465, 52466, 52467, 52468, 52469, 52470, 52471, 52472, 52473, 52474, 52475, 52476, 52477, 52478, 52479, 52480, 52481, 52482, 52483, 52484, 52485, 52486, 52487, 52488, 52489, 52490, 52491, 52492, 52493, 52494, 52495, 52496, 52497, 52498, 52499, 52500, 52501, 52502, 52503, 52504, 52505, 52506, 52507, 52508, 52509, 52510, 52511, 52512, 52513, 52514, 52515, 52516, 52517, 52518, 52519, 52520, 52521, 52522, 52523, 52524, 52525, 52526, 52527, 52528, 52529, 52530, 52531, 52532, 52533, 52534, 52535, 52536, 52537, 52538, 52539, 52540, 52541, 52542, 52543, 52544, 52545, 52546, 52547, 52548, 52549, 52550, 52551, 52552, 52553, 52554, 52555, 52556, 52557, 52558, 52559, 52560, 52561, 52562, 52563, 52564, 52565, 52566, 52567, 52568, 52569, 52570, 52571, 52572, 52573, 52574, 52575, 52576, 52577, 52578, 52579, 52580, 52581, 52582, 52583, 52584, 52585, 52586, 52587, 52588, 52589, 52590, 52591, 52592, 52593, 52594, 52595, 52596, 52597, 52598, 52599, 52600, 52601, 52602, 52603, 52604, 52605, 52606, 52607, 52608, 52609, 52610, 52611, 52612, 52613, 52614, 52615, 52616, 52617, 52618, 52619, 52620, 52621, 52622, 52623, 52624, 52625, 52626, 52627, 52628, 52629, 52630, 52631, 52632, 52633, 52634, 52635, 52636, 52637, 52638, 52639, 52640, 52641, 52642, 52643, 52644, 52645, 52646, 52647, 52648, 52649, 52650, 52651, 52652, 52653, 52654, 52655, 52656, 52657, 52658, 52659, 52660, 52661, 52662, 52663, 52664, 52665, 52666, 52667, 52668, 52669, 52670, 52671, 52672, 52673, 52674, 52675, 52676, 52677, 52678, 52679, 52680, 52681, 52682, 52683, 52684, 52685, 52686, 52687, 52688, 52689, 52690, 52691, 52692, 52693, 52694, 52695, 52696, 52697, 52698, 52699, 52700, 52701, 52702, 52703, 52704, 52705, 52706, 52707, 52708, 52709, 52710, 52711, 52712, 52713, 52714, 52715, 52716, 52717, 52718, 52719, 52720, 52721, 52722, 52723, 52724, 52725, 52726, 52727, 52728, 52729, 52730, 52731, 52732, 52733, 52734, 52735, 52736, 52737, 52738, 52739, 52740, 52741, 52742, 52743, 52744, 52745, 52746, 52747, 52748, 52749, 52750, 52751, 52752, 52753, 52754, 52755, 52756, 52757, 52758, 52759, 52760, 52761, 52762, 52763, 52764, 52765, 52766, 52767, 52768, 52769, 52770, 52771, 52772, 52773, 52774, 52775, 52776, 52777, 52778, 52779, 52780, 52781, 52782, 52783, 52784, 52785, 52786, 52787, 52788, 52789, 52790, 52791, 52792, 52793, 52794, 52795, 52796, 52797, 52798, 52799, 52800, 52801, 52802, 52803, 52804, 52805, 52806, 52807, 52808, 52809, 52810, 52811, 52812, 52813, 52814, 52815, 52816, 52817, 52818, 52819, 52820, 52821, 52822, 52823, 52824, 52825, 52826, 52827, 52828, 52829, 52830, 52831, 52832, 52833, 52834, 52835, 52836, 52837, 52838, 52839, 52840, 52841, 52842, 52843, 52844, 52845, 52846, 52847, 52848, 52849, 52850, 52851, 52852, 52853, 52854, 52855, 52856, 52857, 52858, 52859, 52860, 52861, 52862, 52863, 52864, 52865, 52866, 52867, 52868, 52869, 52870, 52871, 52872, 52873, 52874, 52875, 52876, 52877, 52878, 52879, 52880, 52881, 52882, 52883, 52884, 52885, 52886, 52887, 52888, 52889, 52890, 52891, 52892, 52893, 52894, 52895, 52896, 52897, 52898, 52899, 52900, 52901, 52902, 52903, 52904, 52905, 52906, 52907, 52908, 52909, 52910, 52911, 52912, 52913, 52914, 52915, 52916, 52917, 52918, 52919, 52920, 52921, 52922, 52923, 52924, 52925, 52926, 52927, 52928, 52929, 52930, 52931, 52932, 52933, 52934, 52935, 52936, 52937, 52938, 52939, 52940, 52941, 52942, 52943, 52944, 52945, 52946, 52947, 52948, 52949, 52950, 52951, 52952, 52953, 52954, 52955, 52956, 52957, 52958, 52959, 52960, 52961, 52962, 52963, 52964, 52965, 52966, 52967, 52968, 52969, 52970, 52971, 52972, 52973, 52974, 52975, 52976, 52977, 52978, 52979, 52980, 52981, 52982, 52983, 52984, 52985, 52986, 52987, 52988, 52989, 52990, 52991, 52992, 52993, 52994, 52995, 52996, 52997, 52998, 52999, 53000, 53001, 53002, 53003, 53004, 53005, 53006, 53007, 53008, 53009, 53010, 53011, 53012, 53013, 53014, 53015, 53016, 53017, 53018, 53019, 53020, 53021, 53022, 53023, 53024, 53025, 53026, 53027, 53028, 53029, 53030, 53031, 53032, 53033, 53034, 53035, 53036, 53037, 53038, 53039, 53040, 53041, 53042, 53043, 53044, 53045, 53046, 53047, 53048, 53049, 53050, 53051, 53052, 53053, 53054, 53055, 53056, 53057, 53058, 53059, 53060, 53061, 53062, 53063, 53064, 53065, 53066, 53067, 53068, 53069, 53070, 53071, 53072, 53073, 53074, 53075, 53076, 53077, 53078, 53079, 53080, 53081, 53082, 53083, 53084, 53085, 53086, 53087, 53088, 53089, 53090, 53091, 53092, 53093, 53094, 53095, 53096, 53097, 53098, 53099, 53100, 53101, 53102, 53103, 53104, 53105, 53106, 53107, 53108, 53109, 53110, 53111, 53112, 53113, 53114, 53115, 53116, 53117, 53118, 53119, 53120, 53121, 53122, 53123, 53124, 53125, 53126, 53127, 53128, 53129, 53130, 53131, 53132, 53133, 53134, 53135, 53136, 53137, 53138, 53139, 53140, 53141, 53142, 53143, 53144, 53145, 53146, 53147, 53148, 53149, 53150, 53151, 53152, 53153, 53154, 53155, 53156, 53157, 53158, 53159, 53160, 53161, 53162, 53163, 53164, 53165, 53166, 53167, 53168, 53169, 53170, 53171, 53172, 53173, 53174, 53175, 53176, 53177, 53178, 53179, 53180, 53181, 53182, 53183, 53184, 53185, 53186, 53187, 53188, 53189, 53190, 53191, 53192, 53193, 53194, 53195, 53196, 53197, 53198, 53199, 53200, 53201, 53202, 53203, 53204, 53205, 53206, 53207, 53208, 53209, 53210, 53211, 53212, 53213, 53214, 53215, 53216, 53217, 53218, 53219, 53220, 53221, 53222, 53223, 53224, 53225, 53226, 53227, 53228, 53229, 53230, 53231, 53232, 53233, 53234, 53235, 53236, 53237, 53238, 53239, 53240, 53241, 53242, 53243, 53244, 53245, 53246, 53247, 53248, 53249, 53250, 53251, 53252, 53253, 53254, 53255, 53256, 53257, 53258, 53259, 53260, 53261, 53262, 53263, 53264, 53265, 53266, 53267, 53268, 53269, 53270, 53271, 53272, 53273, 53274, 53275, 53276, 53277, 53278, 53279, 53280, 53281, 53282, 53283, 53284, 53285, 53286, 53287, 53288, 53289, 53290, 53291, 53292, 53293, 53294, 53295, 53296, 53297, 53298, 53299, 53300, 53301, 53302, 53303, 53304, 53305, 53306, 53307, 53308, 53309, 53310, 53311, 53312, 53313, 53314, 53315, 53316, 53317, 53318, 53319, 53320, 53321, 53322, 53323, 53324, 53325, 53326, 53327, 53328, 53329, 53330, 53331, 53332, 53333, 53334, 53335, 53336, 53337, 53338, 53339, 53340, 53341, 53342, 53343, 53344, 53345, 53346, 53347, 53348, 53349, 53350, 53351, 53352, 53353, 53354, 53355, 53356, 53357, 53358, 53359, 53360, 53361, 53362, 53363, 53364, 53365, 53366, 53367, 53368, 53369, 53370, 53371, 53372, 53373, 53374, 53375, 53376, 53377, 53378, 53379, 53380, 53381, 53382, 53383, 53384, 53385, 53386, 53387, 53388, 53389, 53390, 53391, 53392, 53393, 53394, 53395, 53396, 53397, 53398, 53399, 53400, 53401, 53402, 53403, 53404, 53405, 53406, 53407, 53408, 53409, 53410, 53411, 53412, 53413, 53414, 53415, 53416, 53417, 53418, 53419, 53420, 53421, 53422, 53423, 53424, 53425, 53426, 53427, 53428, 53429, 53430, 53431, 53432, 53433, 53434, 53435, 53436, 53437, 53438, 53439, 53440, 53441, 53442, 53443, 53444, 53445, 53446, 53447, 53448, 53449, 53450, 53451, 53452, 53453, 53454, 53455, 53456, 53457, 53458, 53459, 53460, 53461, 53462, 53463, 53464, 53465, 53466, 53467, 53468, 53469, 53470, 53471, 53472, 53473, 53474, 53475, 53476, 53477, 53478, 53479, 53480, 53481, 53482, 53483, 53484, 53485, 53486, 53487, 53488, 53489, 53490, 53491, 53492, 53493, 53494, 53495, 53496, 53497, 53498, 53499, 53500, 53501, 53502, 53503, 53504, 53505, 53506, 53507, 53508, 53509, 53510, 53511, 53512, 53513, 53514, 53515, 53516, 53517, 53518, 53519, 53520, 53521, 53522, 53523, 53524, 53525, 53526, 53527, 53528, 53529, 53530, 53531, 53532, 53533, 53534, 53535, 53536, 53537, 53538, 53539, 53540, 53541, 53542, 53543, 53544, 53545, 53546, 53547, 53548, 53549, 53550, 53551, 53552, 53553, 53554, 53555, 53556, 53557, 53558, 53559, 53560, 53561, 53562, 53563, 53564, 53565, 53566, 53567, 53568, 53569, 53570, 53571, 53572, 53573, 53574, 53575, 53576, 53577, 53578, 53579, 53580, 53581, 53582, 53583, 53584, 53585, 53586, 53587, 53588, 53589, 53590, 53591, 53592, 53593, 53594, 53595, 53596, 53597, 53598, 53599, 53600, 53601, 53602, 53603, 53604, 53605, 53606, 53607, 53608, 53609, 53610, 53611, 53612, 53613, 53614, 53615, 53616, 53617, 53618, 53619, 53620, 53621, 53622, 53623, 53624, 53625, 53626, 53627, 53628, 53629, 53630, 53631, 53632, 53633, 53634, 53635, 53636, 53637, 53638, 53639, 53640, 53641, 53642, 53643, 53644, 53645, 53646, 53647, 53648, 53649, 53650, 53651, 53652, 53653, 53654, 53655, 53656, 53657, 53658, 53659, 53660, 53661, 53662, 53663, 53664, 53665, 53666, 53667, 53668, 53669, 53670, 53671, 53672, 53673, 53674, 53675, 53676, 53677, 53678, 53679, 53680, 53681, 53682, 53683, 53684, 53685, 53686, 53687, 53688, 53689, 53690, 53691, 53692, 53693, 53694, 53695, 53696, 53697, 53698, 53699, 53700, 53701, 53702, 53703, 53704, 53705, 53706, 53707, 53708, 53709, 53710, 53711, 53712, 53713, 53714, 53715, 53716, 53717, 53718, 53719, 53720, 53721, 53722, 53723, 53724, 53725, 53726, 53727, 53728, 53729, 53730, 53731, 53732, 53733, 53734, 53735, 53736, 53737, 53738, 53739, 53740, 53741, 53742, 53743, 53744, 53745, 53746, 53747, 53748, 53749, 53750, 53751, 53752, 53753, 53754, 53755, 53756, 53757, 53758, 53759, 53760, 53761, 53762, 53763, 53764, 53765, 53766, 53767, 53768, 53769, 53770, 53771, 53772, 53773, 53774, 53775, 53776, 53777, 53778, 53779, 53780, 53781, 53782, 53783, 53784, 53785, 53786, 53787, 53788, 53789, 53790, 53791, 53792, 53793, 53794, 53795, 53796, 53797, 53798, 53799, 53800, 53801, 53802, 53803, 53804, 53805, 53806, 53807, 53808, 53809, 53810, 53811, 53812, 53813, 53814, 53815, 53816, 53817, 53818, 53819, 53820, 53821, 53822, 53823, 53824, 53825, 53826, 53827, 53828, 53829, 53830, 53831, 53832, 53833, 53834, 53835, 53836, 53837, 53838, 53839, 53840, 53841, 53842, 53843, 53844, 53845, 53846, 53847, 53848, 53849, 53850, 53851, 53852, 53853, 53854, 53855, 53856, 53857, 53858, 53859, 53860, 53861, 53862, 53863, 53864, 53865, 53866, 53867, 53868, 53869, 53870, 53871, 53872, 53873, 53874, 53875, 53876, 53877, 53878, 53879, 53880, 53881, 53882, 53883, 53884, 53885, 53886, 53887, 53888, 53889, 53890, 53891, 53892, 53893, 53894, 53895, 53896, 53897, 53898, 53899, 53900, 53901, 53902, 53903, 53904, 53905, 53906, 53907, 53908, 53909, 53910, 53911, 53912, 53913, 53914, 53915, 53916, 53917, 53918, 53919, 53920, 53921, 53922, 53923, 53924, 53925, 53926, 53927, 53928, 53929, 53930, 53931, 53932, 53933, 53934, 53935, 53936, 53937, 53938, 53939, 53940, 53941, 53942, 53943, 53944, 53945, 53946, 53947, 53948, 53949, 53950, 53951, 53952, 53953, 53954, 53955, 53956, 53957, 53958, 53959, 53960, 53961, 53962, 53963, 53964, 53965, 53966, 53967, 53968, 53969, 53970, 53971, 53972, 53973, 53974, 53975, 53976, 53977, 53978, 53979, 53980, 53981, 53982, 53983, 53984, 53985, 53986, 53987, 53988, 53989, 53990, 53991, 53992, 53993, 53994, 53995, 53996, 53997, 53998, 53999, 54000, 54001, 54002, 54003, 54004, 54005, 54006, 54007, 54008, 54009, 54010, 54011, 54012, 54013, 54014, 54015, 54016, 54017, 54018, 54019, 54020, 54021, 54022, 54023, 54024, 54025, 54026, 54027, 54028, 54029, 54030, 54031, 54032, 54033, 54034, 54035, 54036, 54037, 54038, 54039, 54040, 54041, 54042, 54043, 54044, 54045, 54046, 54047, 54048, 54049, 54050, 54051, 54052, 54053, 54054, 54055, 54056, 54057, 54058, 54059, 54060, 54061, 54062, 54063, 54064, 54065, 54066, 54067, 54068, 54069, 54070, 54071, 54072, 54073, 54074, 54075, 54076, 54077, 54078, 54079, 54080, 54081, 54082, 54083, 54084, 54085, 54086, 54087, 54088, 54089, 54090, 54091, 54092, 54093, 54094, 54095, 54096, 54097, 54098, 54099, 54100, 54101, 54102, 54103, 54104, 54105, 54106, 54107, 54108, 54109, 54110, 54111, 54112, 54113, 54114, 54115, 54116, 54117, 54118, 54119, 54120, 54121, 54122, 54123, 54124, 54125, 54126, 54127, 54128, 54129, 54130, 54131, 54132, 54133, 54134, 54135, 54136, 54137, 54138, 54139, 54140, 54141, 54142, 54143, 54144, 54145, 54146, 54147, 54148, 54149, 54150, 54151, 54152, 54153, 54154, 54155, 54156, 54157, 54158, 54159, 54160, 54161, 54162, 54163, 54164, 54165, 54166, 54167, 54168, 54169, 54170, 54171, 54172, 54173, 54174, 54175, 54176, 54177, 54178, 54179, 54180, 54181, 54182, 54183, 54184, 54185, 54186, 54187, 54188, 54189, 54190, 54191, 54192, 54193, 54194, 54195, 54196, 54197, 54198, 54199, 54200, 54201, 54202, 54203, 54204, 54205, 54206, 54207, 54208, 54209, 54210, 54211, 54212, 54213, 54214, 54215, 54216, 54217, 54218, 54219, 54220, 54221, 54222, 54223, 54224, 54225, 54226, 54227, 54228, 54229, 54230, 54231, 54232, 54233, 54234, 54235, 54236, 54237, 54238, 54239, 54240, 54241, 54242, 54243, 54244, 54245, 54246, 54247, 54248, 54249, 54250, 54251, 54252, 54253, 54254, 54255, 54256, 54257, 54258, 54259, 54260, 54261, 54262, 54263, 54264, 54265, 54266, 54267, 54268, 54269, 54270, 54271, 54272, 54273, 54274, 54275, 54276, 54277, 54278, 54279, 54280, 54281, 54282, 54283, 54284, 54285, 54286, 54287, 54288, 54289, 54290, 54291, 54292, 54293, 54294, 54295, 54296, 54297, 54298, 54299, 54300, 54301, 54302, 54303, 54304, 54305, 54306, 54307, 54308, 54309, 54310, 54311, 54312, 54313, 54314, 54315, 54316, 54317, 54318, 54319, 54320, 54321, 54322, 54323, 54324, 54325, 54326, 54327, 54328, 54329, 54330, 54331, 54332, 54333, 54334, 54335, 54336, 54337, 54338, 54339, 54340, 54341, 54342, 54343, 54344, 54345, 54346, 54347, 54348, 54349, 54350, 54351, 54352, 54353, 54354, 54355, 54356, 54357, 54358, 54359, 54360, 54361, 54362, 54363, 54364, 54365, 54366, 54367, 54368, 54369, 54370, 54371, 54372, 54373, 54374, 54375, 54376, 54377, 54378, 54379, 54380, 54381, 54382, 54383, 54384, 54385, 54386, 54387, 54388, 54389, 54390, 54391, 54392, 54393, 54394, 54395, 54396, 54397, 54398, 54399, 54400, 54401, 54402, 54403, 54404, 54405, 54406, 54407, 54408, 54409, 54410, 54411, 54412, 54413, 54414, 54415, 54416, 54417, 54418, 54419, 54420, 54421, 54422, 54423, 54424, 54425, 54426, 54427, 54428, 54429, 54430, 54431, 54432, 54433, 54434, 54435, 54436, 54437, 54438, 54439, 54440, 54441, 54442, 54443, 54444, 54445, 54446, 54447, 54448, 54449, 54450, 54451, 54452, 54453, 54454, 54455, 54456, 54457, 54458, 54459, 54460, 54461, 54462, 54463, 54464, 54465, 54466, 54467, 54468, 54469, 54470, 54471, 54472, 54473, 54474, 54475, 54476, 54477, 54478, 54479, 54480, 54481, 54482, 54483, 54484, 54485, 54486, 54487, 54488, 54489, 54490, 54491, 54492, 54493, 54494, 54495, 54496, 54497, 54498, 54499, 54500, 54501, 54502, 54503, 54504, 54505, 54506, 54507, 54508, 54509, 54510, 54511, 54512, 54513, 54514, 54515, 54516, 54517, 54518, 54519, 54520, 54521, 54522, 54523, 54524, 54525, 54526, 54527, 54528, 54529, 54530, 54531, 54532, 54533, 54534, 54535, 54536, 54537, 54538, 54539, 54540, 54541, 54542, 54543, 54544, 54545, 54546, 54547, 54548, 54549, 54550, 54551, 54552, 54553, 54554, 54555, 54556, 54557, 54558, 54559, 54560, 54561, 54562, 54563, 54564, 54565, 54566, 54567, 54568, 54569, 54570, 54571, 54572, 54573, 54574, 54575, 54576, 54577, 54578, 54579, 54580, 54581, 54582, 54583, 54584, 54585, 54586, 54587, 54588, 54589, 54590, 54591, 54592, 54593, 54594, 54595, 54596, 54597, 54598, 54599, 54600, 54601, 54602, 54603, 54604, 54605, 54606, 54607, 54608, 54609, 54610, 54611, 54612, 54613, 54614, 54615, 54616, 54617, 54618, 54619, 54620, 54621, 54622, 54623, 54624, 54625, 54626, 54627, 54628, 54629, 54630, 54631, 54632, 54633, 54634, 54635, 54636, 54637, 54638, 54639, 54640, 54641, 54642, 54643, 54644, 54645, 54646, 54647, 54648, 54649, 54650, 54651, 54652, 54653, 54654, 54655, 54656, 54657, 54658, 54659, 54660, 54661, 54662, 54663, 54664, 54665, 54666, 54667, 54668, 54669, 54670, 54671, 54672, 54673, 54674, 54675, 54676, 54677, 54678, 54679, 54680, 54681, 54682, 54683, 54684, 54685, 54686, 54687, 54688, 54689, 54690, 54691, 54692, 54693, 54694, 54695, 54696, 54697, 54698, 54699, 54700, 54701, 54702, 54703, 54704, 54705, 54706, 54707, 54708, 54709, 54710, 54711, 54712, 54713, 54714, 54715, 54716, 54717, 54718, 54719, 54720, 54721, 54722, 54723, 54724, 54725, 54726, 54727, 54728, 54729, 54730, 54731, 54732, 54733, 54734, 54735, 54736, 54737, 54738, 54739, 54740, 54741, 54742, 54743, 54744, 54745, 54746, 54747, 54748, 54749, 54750, 54751, 54752, 54753, 54754, 54755, 54756, 54757, 54758, 54759, 54760, 54761, 54762, 54763, 54764, 54765, 54766, 54767, 54768, 54769, 54770, 54771, 54772, 54773, 54774, 54775, 54776, 54777, 54778, 54779, 54780, 54781, 54782, 54783, 54784, 54785, 54786, 54787, 54788, 54789, 54790, 54791, 54792, 54793, 54794, 54795, 54796, 54797, 54798, 54799, 54800, 54801, 54802, 54803, 54804, 54805, 54806, 54807, 54808, 54809, 54810, 54811, 54812, 54813, 54814, 54815, 54816, 54817, 54818, 54819, 54820, 54821, 54822, 54823, 54824, 54825, 54826, 54827, 54828, 54829, 54830, 54831, 54832, 54833, 54834, 54835, 54836, 54837, 54838, 54839, 54840, 54841, 54842, 54843, 54844, 54845, 54846, 54847, 54848, 54849, 54850, 54851, 54852, 54853, 54854, 54855, 54856, 54857, 54858, 54859, 54860, 54861, 54862, 54863, 54864, 54865, 54866, 54867, 54868, 54869, 54870, 54871, 54872, 54873, 54874, 54875, 54876, 54877, 54878, 54879, 54880, 54881, 54882, 54883, 54884, 54885, 54886, 54887, 54888, 54889, 54890, 54891, 54892, 54893, 54894, 54895, 54896, 54897, 54898, 54899, 54900, 54901, 54902, 54903, 54904, 54905, 54906, 54907, 54908, 54909, 54910, 54911, 54912, 54913, 54914, 54915, 54916, 54917, 54918, 54919, 54920, 54921, 54922, 54923, 54924, 54925, 54926, 54927, 54928, 54929, 54930, 54931, 54932, 54933, 54934, 54935, 54936, 54937, 54938, 54939, 54940, 54941, 54942, 54943, 54944, 54945, 54946, 54947, 54948, 54949, 54950, 54951, 54952, 54953, 54954, 54955, 54956, 54957, 54958, 54959, 54960, 54961, 54962, 54963, 54964, 54965, 54966, 54967, 54968, 54969, 54970, 54971, 54972, 54973, 54974, 54975, 54976, 54977, 54978, 54979, 54980, 54981, 54982, 54983, 54984, 54985, 54986, 54987, 54988, 54989, 54990, 54991, 54992, 54993, 54994, 54995, 54996, 54997, 54998, 54999, 55000, 55001, 55002, 55003, 55004, 55005, 55006, 55007, 55008, 55009, 55010, 55011, 55012, 55013, 55014, 55015, 55016, 55017, 55018, 55019, 55020, 55021, 55022, 55023, 55024, 55025, 55026, 55027, 55028, 55029, 55030, 55031, 55032, 55033, 55034, 55035, 55036, 55037, 55038, 55039, 55040, 55041, 55042, 55043, 55044, 55045, 55046, 55047, 55048, 55049, 55050, 55051, 55052, 55053, 55054, 55055, 55056, 55057, 55058, 55059, 55060, 55061, 55062, 55063, 55064, 55065, 55066, 55067, 55068, 55069, 55070, 55071, 55072, 55073, 55074, 55075, 55076, 55077, 55078, 55079, 55080, 55081, 55082, 55083, 55084, 55085, 55086, 55087, 55088, 55089, 55090, 55091, 55092, 55093, 55094, 55095, 55096, 55097, 55098, 55099, 55100, 55101, 55102, 55103, 55104, 55105, 55106, 55107, 55108, 55109, 55110, 55111, 55112, 55113, 55114, 55115, 55116, 55117, 55118, 55119, 55120, 55121, 55122, 55123, 55124, 55125, 55126, 55127, 55128, 55129, 55130, 55131, 55132, 55133, 55134, 55135, 55136, 55137, 55138, 55139, 55140, 55141, 55142, 55143, 55144, 55145, 55146, 55147, 55148, 55149, 55150, 55151, 55152, 55153, 55154, 55155, 55156, 55157, 55158, 55159, 55160, 55161, 55162, 55163, 55164, 55165, 55166, 55167, 55168, 55169, 55170, 55171, 55172, 55173, 55174, 55175, 55176, 55177, 55178, 55179, 55180, 55181, 55182, 55183, 55184, 55185, 55186, 55187, 55188, 55189, 55190, 55191, 55192, 55193, 55194, 55195, 55196, 55197, 55198, 55199, 55200, 55201, 55202, 55203, 55204, 55205, 55206, 55207, 55208, 55209, 55210, 55211, 55212, 55213, 55214, 55215, 55216, 55217, 55218, 55219, 55220, 55221, 55222, 55223, 55224, 55225, 55226, 55227, 55228, 55229, 55230, 55231, 55232, 55233, 55234, 55235, 55236, 55237, 55238, 55239, 55240, 55241, 55242, 55243, 55244, 55245, 55246, 55247, 55248, 55249, 55250, 55251, 55252, 55253, 55254, 55255, 55256, 55257, 55258, 55259, 55260, 55261, 55262, 55263, 55264, 55265, 55266, 55267, 55268, 55269, 55270, 55271, 55272, 55273, 55274, 55275, 55276, 55277, 55278, 55279, 55280, 55281, 55282, 55283, 55284, 55285, 55286, 55287, 55288, 55289, 55290, 55291, 55292, 55293, 55294, 55295, 55296, 55297, 55298, 55299, 55300, 55301, 55302, 55303, 55304, 55305, 55306, 55307, 55308, 55309, 55310, 55311, 55312, 55313, 55314, 55315, 55316, 55317, 55318, 55319, 55320, 55321, 55322, 55323, 55324, 55325, 55326, 55327, 55328, 55329, 55330, 55331, 55332, 55333, 55334, 55335, 55336, 55337, 55338, 55339, 55340, 55341, 55342, 55343, 55344, 55345, 55346, 55347, 55348, 55349, 55350, 55351, 55352, 55353, 55354, 55355, 55356, 55357, 55358, 55359, 55360, 55361, 55362, 55363, 55364, 55365, 55366, 55367, 55368, 55369, 55370, 55371, 55372, 55373, 55374, 55375, 55376, 55377, 55378, 55379, 55380, 55381, 55382, 55383, 55384, 55385, 55386, 55387, 55388, 55389, 55390, 55391, 55392, 55393, 55394, 55395, 55396, 55397, 55398, 55399, 55400, 55401, 55402, 55403, 55404, 55405, 55406, 55407, 55408, 55409, 55410, 55411, 55412, 55413, 55414, 55415, 55416, 55417, 55418, 55419, 55420, 55421, 55422, 55423, 55424, 55425, 55426, 55427, 55428, 55429, 55430, 55431, 55432, 55433, 55434, 55435, 55436, 55437, 55438, 55439, 55440, 55441, 55442, 55443, 55444, 55445, 55446, 55447, 55448, 55449, 55450, 55451, 55452, 55453, 55454, 55455, 55456, 55457, 55458, 55459, 55460, 55461, 55462, 55463, 55464, 55465, 55466, 55467, 55468, 55469, 55470, 55471, 55472, 55473, 55474, 55475, 55476, 55477, 55478, 55479, 55480, 55481, 55482, 55483, 55484, 55485, 55486, 55487, 55488, 55489, 55490, 55491, 55492, 55493, 55494, 55495, 55496, 55497, 55498, 55499, 55500, 55501, 55502, 55503, 55504, 55505, 55506, 55507, 55508, 55509, 55510, 55511, 55512, 55513, 55514, 55515, 55516, 55517, 55518, 55519, 55520, 55521, 55522, 55523, 55524, 55525, 55526, 55527, 55528, 55529, 55530, 55531, 55532, 55533, 55534, 55535, 55536, 55537, 55538, 55539, 55540, 55541, 55542, 55543, 55544, 55545, 55546, 55547, 55548, 55549, 55550, 55551, 55552, 55553, 55554, 55555, 55556, 55557, 55558, 55559, 55560, 55561, 55562, 55563, 55564, 55565, 55566, 55567, 55568, 55569, 55570, 55571, 55572, 55573, 55574, 55575, 55576, 55577, 55578, 55579, 55580, 55581, 55582, 55583, 55584, 55585, 55586, 55587, 55588, 55589, 55590, 55591, 55592, 55593, 55594, 55595, 55596, 55597, 55598, 55599, 55600, 55601, 55602, 55603, 55604, 55605, 55606, 55607, 55608, 55609, 55610, 55611, 55612, 55613, 55614, 55615, 55616, 55617, 55618, 55619, 55620, 55621, 55622, 55623, 55624, 55625, 55626, 55627, 55628, 55629, 55630, 55631, 55632, 55633, 55634, 55635, 55636, 55637, 55638, 55639, 55640, 55641, 55642, 55643, 55644, 55645, 55646, 55647, 55648, 55649, 55650, 55651, 55652, 55653, 55654, 55655, 55656, 55657, 55658, 55659, 55660, 55661, 55662, 55663, 55664, 55665, 55666, 55667, 55668, 55669, 55670, 55671, 55672, 55673, 55674, 55675, 55676, 55677, 55678, 55679, 55680, 55681, 55682, 55683, 55684, 55685, 55686, 55687, 55688, 55689, 55690, 55691, 55692, 55693, 55694, 55695, 55696, 55697, 55698, 55699, 55700, 55701, 55702, 55703, 55704, 55705, 55706, 55707, 55708, 55709, 55710, 55711, 55712, 55713, 55714, 55715, 55716, 55717, 55718, 55719, 55720, 55721, 55722, 55723, 55724, 55725, 55726, 55727, 55728, 55729, 55730, 55731, 55732, 55733, 55734, 55735, 55736, 55737, 55738, 55739, 55740, 55741, 55742, 55743, 55744, 55745, 55746, 55747, 55748, 55749, 55750, 55751, 55752, 55753, 55754, 55755, 55756, 55757, 55758, 55759, 55760, 55761, 55762, 55763, 55764, 55765, 55766, 55767, 55768, 55769, 55770, 55771, 55772, 55773, 55774, 55775, 55776, 55777, 55778, 55779, 55780, 55781, 55782, 55783, 55784, 55785, 55786, 55787, 55788, 55789, 55790, 55791, 55792, 55793, 55794, 55795, 55796, 55797, 55798, 55799, 55800, 55801, 55802, 55803, 55804, 55805, 55806, 55807, 55808, 55809, 55810, 55811, 55812, 55813, 55814, 55815, 55816, 55817, 55818, 55819, 55820, 55821, 55822, 55823, 55824, 55825, 55826, 55827, 55828, 55829, 55830, 55831, 55832, 55833, 55834, 55835, 55836, 55837, 55838, 55839, 55840, 55841, 55842, 55843, 55844, 55845, 55846, 55847, 55848, 55849, 55850, 55851, 55852, 55853, 55854, 55855, 55856, 55857, 55858, 55859, 55860, 55861, 55862, 55863, 55864, 55865, 55866, 55867, 55868, 55869, 55870, 55871, 55872, 55873, 55874, 55875, 55876, 55877, 55878, 55879, 55880, 55881, 55882, 55883, 55884, 55885, 55886, 55887, 55888, 55889, 55890, 55891, 55892, 55893, 55894, 55895, 55896, 55897, 55898, 55899, 55900, 55901, 55902, 55903, 55904, 55905, 55906, 55907, 55908, 55909, 55910, 55911, 55912, 55913, 55914, 55915, 55916, 55917, 55918, 55919, 55920, 55921, 55922, 55923, 55924, 55925, 55926, 55927, 55928, 55929, 55930, 55931, 55932, 55933, 55934, 55935, 55936, 55937, 55938, 55939, 55940, 55941, 55942, 55943, 55944, 55945, 55946, 55947, 55948, 55949, 55950, 55951, 55952, 55953, 55954, 55955, 55956, 55957, 55958, 55959, 55960, 55961, 55962, 55963, 55964, 55965, 55966, 55967, 55968, 55969, 55970, 55971, 55972, 55973, 55974, 55975, 55976, 55977, 55978, 55979, 55980, 55981, 55982, 55983, 55984, 55985, 55986, 55987, 55988, 55989, 55990, 55991, 55992, 55993, 55994, 55995, 55996, 55997, 55998, 55999, 56000, 56001, 56002, 56003, 56004, 56005, 56006, 56007, 56008, 56009, 56010, 56011, 56012, 56013, 56014, 56015, 56016, 56017, 56018, 56019, 56020, 56021, 56022, 56023, 56024, 56025, 56026, 56027, 56028, 56029, 56030, 56031, 56032, 56033, 56034, 56035, 56036, 56037, 56038, 56039, 56040, 56041, 56042, 56043, 56044, 56045, 56046, 56047, 56048, 56049, 56050, 56051, 56052, 56053, 56054, 56055, 56056, 56057, 56058, 56059, 56060, 56061, 56062, 56063, 56064, 56065, 56066, 56067, 56068, 56069, 56070, 56071, 56072, 56073, 56074, 56075, 56076, 56077, 56078, 56079, 56080, 56081, 56082, 56083, 56084, 56085, 56086, 56087, 56088, 56089, 56090, 56091, 56092, 56093, 56094, 56095, 56096, 56097, 56098, 56099, 56100, 56101, 56102, 56103, 56104, 56105, 56106, 56107, 56108, 56109, 56110, 56111, 56112, 56113, 56114, 56115, 56116, 56117, 56118, 56119, 56120, 56121, 56122, 56123, 56124, 56125, 56126, 56127, 56128, 56129, 56130, 56131, 56132, 56133, 56134, 56135, 56136, 56137, 56138, 56139, 56140, 56141, 56142, 56143, 56144, 56145, 56146, 56147, 56148, 56149, 56150, 56151, 56152, 56153, 56154, 56155, 56156, 56157, 56158, 56159, 56160, 56161, 56162, 56163, 56164, 56165, 56166, 56167, 56168, 56169, 56170, 56171, 56172, 56173, 56174, 56175, 56176, 56177, 56178, 56179, 56180, 56181, 56182, 56183, 56184, 56185, 56186, 56187, 56188, 56189, 56190, 56191, 56192, 56193, 56194, 56195, 56196, 56197, 56198, 56199, 56200, 56201, 56202, 56203, 56204, 56205, 56206, 56207, 56208, 56209, 56210, 56211, 56212, 56213, 56214, 56215, 56216, 56217, 56218, 56219, 56220, 56221, 56222, 56223, 56224, 56225, 56226, 56227, 56228, 56229, 56230, 56231, 56232, 56233, 56234, 56235, 56236, 56237, 56238, 56239, 56240, 56241, 56242, 56243, 56244, 56245, 56246, 56247, 56248, 56249, 56250, 56251, 56252, 56253, 56254, 56255, 56256, 56257, 56258, 56259, 56260, 56261, 56262, 56263, 56264, 56265, 56266, 56267, 56268, 56269, 56270, 56271, 56272, 56273, 56274, 56275, 56276, 56277, 56278, 56279, 56280, 56281, 56282, 56283, 56284, 56285, 56286, 56287, 56288, 56289, 56290, 56291, 56292, 56293, 56294, 56295, 56296, 56297, 56298, 56299, 56300, 56301, 56302, 56303, 56304, 56305, 56306, 56307, 56308, 56309, 56310, 56311, 56312, 56313, 56314, 56315, 56316, 56317, 56318, 56319, 56320, 56321, 56322, 56323, 56324, 56325, 56326, 56327, 56328, 56329, 56330, 56331, 56332, 56333, 56334, 56335, 56336, 56337, 56338, 56339, 56340, 56341, 56342, 56343, 56344, 56345, 56346, 56347, 56348, 56349, 56350, 56351, 56352, 56353, 56354, 56355, 56356, 56357, 56358, 56359, 56360, 56361, 56362, 56363, 56364, 56365, 56366, 56367, 56368, 56369, 56370, 56371, 56372, 56373, 56374, 56375, 56376, 56377, 56378, 56379, 56380, 56381, 56382, 56383, 56384, 56385, 56386, 56387, 56388, 56389, 56390, 56391, 56392, 56393, 56394, 56395, 56396, 56397, 56398, 56399, 56400, 56401, 56402, 56403, 56404, 56405, 56406, 56407, 56408, 56409, 56410, 56411, 56412, 56413, 56414, 56415, 56416, 56417, 56418, 56419, 56420, 56421, 56422, 56423, 56424, 56425, 56426, 56427, 56428, 56429, 56430, 56431, 56432, 56433, 56434, 56435, 56436, 56437, 56438, 56439, 56440, 56441, 56442, 56443, 56444, 56445, 56446, 56447, 56448, 56449, 56450, 56451, 56452, 56453, 56454, 56455, 56456, 56457, 56458, 56459, 56460, 56461, 56462, 56463, 56464, 56465, 56466, 56467, 56468, 56469, 56470, 56471, 56472, 56473, 56474, 56475, 56476, 56477, 56478, 56479, 56480, 56481, 56482, 56483, 56484, 56485, 56486, 56487, 56488, 56489, 56490, 56491, 56492, 56493, 56494, 56495, 56496, 56497, 56498, 56499, 56500, 56501, 56502, 56503, 56504, 56505, 56506, 56507, 56508, 56509, 56510, 56511, 56512, 56513, 56514, 56515, 56516, 56517, 56518, 56519, 56520, 56521, 56522, 56523, 56524, 56525, 56526, 56527, 56528, 56529, 56530, 56531, 56532, 56533, 56534, 56535, 56536, 56537, 56538, 56539, 56540, 56541, 56542, 56543, 56544, 56545, 56546, 56547, 56548, 56549, 56550, 56551, 56552, 56553, 56554, 56555, 56556, 56557, 56558, 56559, 56560, 56561, 56562, 56563, 56564, 56565, 56566, 56567, 56568, 56569, 56570, 56571, 56572, 56573, 56574, 56575, 56576, 56577, 56578, 56579, 56580, 56581, 56582, 56583, 56584, 56585, 56586, 56587, 56588, 56589, 56590, 56591, 56592, 56593, 56594, 56595, 56596, 56597, 56598, 56599, 56600, 56601, 56602, 56603, 56604, 56605, 56606, 56607, 56608, 56609, 56610, 56611, 56612, 56613, 56614, 56615, 56616, 56617, 56618, 56619, 56620, 56621, 56622, 56623, 56624, 56625, 56626, 56627, 56628, 56629, 56630, 56631, 56632, 56633, 56634, 56635, 56636, 56637, 56638, 56639, 56640, 56641, 56642, 56643, 56644, 56645, 56646, 56647, 56648, 56649, 56650, 56651, 56652, 56653, 56654, 56655, 56656, 56657, 56658, 56659, 56660, 56661, 56662, 56663, 56664, 56665, 56666, 56667, 56668, 56669, 56670, 56671, 56672, 56673, 56674, 56675, 56676, 56677, 56678, 56679, 56680, 56681, 56682, 56683, 56684, 56685, 56686, 56687, 56688, 56689, 56690, 56691, 56692, 56693, 56694, 56695, 56696, 56697, 56698, 56699, 56700, 56701, 56702, 56703, 56704, 56705, 56706, 56707, 56708, 56709, 56710, 56711, 56712, 56713, 56714, 56715, 56716, 56717, 56718, 56719, 56720, 56721, 56722, 56723, 56724, 56725, 56726, 56727, 56728, 56729, 56730, 56731, 56732, 56733, 56734, 56735, 56736, 56737, 56738, 56739, 56740, 56741, 56742, 56743, 56744, 56745, 56746, 56747, 56748, 56749, 56750, 56751, 56752, 56753, 56754, 56755, 56756, 56757, 56758, 56759, 56760, 56761, 56762, 56763, 56764, 56765, 56766, 56767, 56768, 56769, 56770, 56771, 56772, 56773, 56774, 56775, 56776, 56777, 56778, 56779, 56780, 56781, 56782, 56783, 56784, 56785, 56786, 56787, 56788, 56789, 56790, 56791, 56792, 56793, 56794, 56795, 56796, 56797, 56798, 56799, 56800, 56801, 56802, 56803, 56804, 56805, 56806, 56807, 56808, 56809, 56810, 56811, 56812, 56813, 56814, 56815, 56816, 56817, 56818, 56819, 56820, 56821, 56822, 56823, 56824, 56825, 56826, 56827, 56828, 56829, 56830, 56831, 56832, 56833, 56834, 56835, 56836, 56837, 56838, 56839, 56840, 56841, 56842, 56843, 56844, 56845, 56846, 56847, 56848, 56849, 56850, 56851, 56852, 56853, 56854, 56855, 56856, 56857, 56858, 56859, 56860, 56861, 56862, 56863, 56864, 56865, 56866, 56867, 56868, 56869, 56870, 56871, 56872, 56873, 56874, 56875, 56876, 56877, 56878, 56879, 56880, 56881, 56882, 56883, 56884, 56885, 56886, 56887, 56888, 56889, 56890, 56891, 56892, 56893, 56894, 56895, 56896, 56897, 56898, 56899, 56900, 56901, 56902, 56903, 56904, 56905, 56906, 56907, 56908, 56909, 56910, 56911, 56912, 56913, 56914, 56915, 56916, 56917, 56918, 56919, 56920, 56921, 56922, 56923, 56924, 56925, 56926, 56927, 56928, 56929, 56930, 56931, 56932, 56933, 56934, 56935, 56936, 56937, 56938, 56939, 56940, 56941, 56942, 56943, 56944, 56945, 56946, 56947, 56948, 56949, 56950, 56951, 56952, 56953, 56954, 56955, 56956, 56957, 56958, 56959, 56960, 56961, 56962, 56963, 56964, 56965, 56966, 56967, 56968, 56969, 56970, 56971, 56972, 56973, 56974, 56975, 56976, 56977, 56978, 56979, 56980, 56981, 56982, 56983, 56984, 56985, 56986, 56987, 56988, 56989, 56990, 56991, 56992, 56993, 56994, 56995, 56996, 56997, 56998, 56999, 57000, 57001, 57002, 57003, 57004, 57005, 57006, 57007, 57008, 57009, 57010, 57011, 57012, 57013, 57014, 57015, 57016, 57017, 57018, 57019, 57020, 57021, 57022, 57023, 57024, 57025, 57026, 57027, 57028, 57029, 57030, 57031, 57032, 57033, 57034, 57035, 57036, 57037, 57038, 57039, 57040, 57041, 57042, 57043, 57044, 57045, 57046, 57047, 57048, 57049, 57050, 57051, 57052, 57053, 57054, 57055, 57056, 57057, 57058, 57059, 57060, 57061, 57062, 57063, 57064, 57065, 57066, 57067, 57068, 57069, 57070, 57071, 57072, 57073, 57074, 57075, 57076, 57077, 57078, 57079, 57080, 57081, 57082, 57083, 57084, 57085, 57086, 57087, 57088, 57089, 57090, 57091, 57092, 57093, 57094, 57095, 57096, 57097, 57098, 57099, 57100, 57101, 57102, 57103, 57104, 57105, 57106, 57107, 57108, 57109, 57110, 57111, 57112, 57113, 57114, 57115, 57116, 57117, 57118, 57119, 57120, 57121, 57122, 57123, 57124, 57125, 57126, 57127, 57128, 57129, 57130, 57131, 57132, 57133, 57134, 57135, 57136, 57137, 57138, 57139, 57140, 57141, 57142, 57143, 57144, 57145, 57146, 57147, 57148, 57149, 57150, 57151, 57152, 57153, 57154, 57155, 57156, 57157, 57158, 57159, 57160, 57161, 57162, 57163, 57164, 57165, 57166, 57167, 57168, 57169, 57170, 57171, 57172, 57173, 57174, 57175, 57176, 57177, 57178, 57179, 57180, 57181, 57182, 57183, 57184, 57185, 57186, 57187, 57188, 57189, 57190, 57191, 57192, 57193, 57194, 57195, 57196, 57197, 57198, 57199, 57200, 57201, 57202, 57203, 57204, 57205, 57206, 57207, 57208, 57209, 57210, 57211, 57212, 57213, 57214, 57215, 57216, 57217, 57218, 57219, 57220, 57221, 57222, 57223, 57224, 57225, 57226, 57227, 57228, 57229, 57230, 57231, 57232, 57233, 57234, 57235, 57236, 57237, 57238, 57239, 57240, 57241, 57242, 57243, 57244, 57245, 57246, 57247, 57248, 57249, 57250, 57251, 57252, 57253, 57254, 57255, 57256, 57257, 57258, 57259, 57260, 57261, 57262, 57263, 57264, 57265, 57266, 57267, 57268, 57269, 57270, 57271, 57272, 57273, 57274, 57275, 57276, 57277, 57278, 57279, 57280, 57281, 57282, 57283, 57284, 57285, 57286, 57287, 57288, 57289, 57290, 57291, 57292, 57293, 57294, 57295, 57296, 57297, 57298, 57299, 57300, 57301, 57302, 57303, 57304, 57305, 57306, 57307, 57308, 57309, 57310, 57311, 57312, 57313, 57314, 57315, 57316, 57317, 57318, 57319, 57320, 57321, 57322, 57323, 57324, 57325, 57326, 57327, 57328, 57329, 57330, 57331, 57332, 57333, 57334, 57335, 57336, 57337, 57338, 57339, 57340, 57341, 57342, 57343, 57344, 57345, 57346, 57347, 57348, 57349, 57350, 57351, 57352, 57353, 57354, 57355, 57356, 57357, 57358, 57359, 57360, 57361, 57362, 57363, 57364, 57365, 57366, 57367, 57368, 57369, 57370, 57371, 57372, 57373, 57374, 57375, 57376, 57377, 57378, 57379, 57380, 57381, 57382, 57383, 57384, 57385, 57386, 57387, 57388, 57389, 57390, 57391, 57392, 57393, 57394, 57395, 57396, 57397, 57398, 57399, 57400, 57401, 57402, 57403, 57404, 57405, 57406, 57407, 57408, 57409, 57410, 57411, 57412, 57413, 57414, 57415, 57416, 57417, 57418, 57419, 57420, 57421, 57422, 57423, 57424, 57425, 57426, 57427, 57428, 57429, 57430, 57431, 57432, 57433, 57434, 57435, 57436, 57437, 57438, 57439, 57440, 57441, 57442, 57443, 57444, 57445, 57446, 57447, 57448, 57449, 57450, 57451, 57452, 57453, 57454, 57455, 57456, 57457, 57458, 57459, 57460, 57461, 57462, 57463, 57464, 57465, 57466, 57467, 57468, 57469, 57470, 57471, 57472, 57473, 57474, 57475, 57476, 57477, 57478, 57479, 57480, 57481, 57482, 57483, 57484, 57485, 57486, 57487, 57488, 57489, 57490, 57491, 57492, 57493, 57494, 57495, 57496, 57497, 57498, 57499, 57500, 57501, 57502, 57503, 57504, 57505, 57506, 57507, 57508, 57509, 57510, 57511, 57512, 57513, 57514, 57515, 57516, 57517, 57518, 57519, 57520, 57521, 57522, 57523, 57524, 57525, 57526, 57527, 57528, 57529, 57530, 57531, 57532, 57533, 57534, 57535, 57536, 57537, 57538, 57539, 57540, 57541, 57542, 57543, 57544, 57545, 57546, 57547, 57548, 57549, 57550, 57551, 57552, 57553, 57554, 57555, 57556, 57557, 57558, 57559, 57560, 57561, 57562, 57563, 57564, 57565, 57566, 57567, 57568, 57569, 57570, 57571, 57572, 57573, 57574, 57575, 57576, 57577, 57578, 57579, 57580, 57581, 57582, 57583, 57584, 57585, 57586, 57587, 57588, 57589, 57590, 57591, 57592, 57593, 57594, 57595, 57596, 57597, 57598, 57599, 57600, 57601, 57602, 57603, 57604, 57605, 57606, 57607, 57608, 57609, 57610, 57611, 57612, 57613, 57614, 57615, 57616, 57617, 57618, 57619, 57620, 57621, 57622, 57623, 57624, 57625, 57626, 57627, 57628, 57629, 57630, 57631, 57632, 57633, 57634, 57635, 57636, 57637, 57638, 57639, 57640, 57641, 57642, 57643, 57644, 57645, 57646, 57647, 57648, 57649, 57650, 57651, 57652, 57653, 57654, 57655, 57656, 57657, 57658, 57659, 57660, 57661, 57662, 57663, 57664, 57665, 57666, 57667, 57668, 57669, 57670, 57671, 57672, 57673, 57674, 57675, 57676, 57677, 57678, 57679, 57680, 57681, 57682, 57683, 57684, 57685, 57686, 57687, 57688, 57689, 57690, 57691, 57692, 57693, 57694, 57695, 57696, 57697, 57698, 57699, 57700, 57701, 57702, 57703, 57704, 57705, 57706, 57707, 57708, 57709, 57710, 57711, 57712, 57713, 57714, 57715, 57716, 57717, 57718, 57719, 57720, 57721, 57722, 57723, 57724, 57725, 57726, 57727, 57728, 57729, 57730, 57731, 57732, 57733, 57734, 57735, 57736, 57737, 57738, 57739, 57740, 57741, 57742, 57743, 57744, 57745, 57746, 57747, 57748, 57749, 57750, 57751, 57752, 57753, 57754, 57755, 57756, 57757, 57758, 57759, 57760, 57761, 57762, 57763, 57764, 57765, 57766, 57767, 57768, 57769, 57770, 57771, 57772, 57773, 57774, 57775, 57776, 57777, 57778, 57779, 57780, 57781, 57782, 57783, 57784, 57785, 57786, 57787, 57788, 57789, 57790, 57791, 57792, 57793, 57794, 57795, 57796, 57797, 57798, 57799, 57800, 57801, 57802, 57803, 57804, 57805, 57806, 57807, 57808, 57809, 57810, 57811, 57812, 57813, 57814, 57815, 57816, 57817, 57818, 57819, 57820, 57821, 57822, 57823, 57824, 57825, 57826, 57827, 57828, 57829, 57830, 57831, 57832, 57833, 57834, 57835, 57836, 57837, 57838, 57839, 57840, 57841, 57842, 57843, 57844, 57845, 57846, 57847, 57848, 57849, 57850, 57851, 57852, 57853, 57854, 57855, 57856, 57857, 57858, 57859, 57860, 57861, 57862, 57863, 57864, 57865, 57866, 57867, 57868, 57869, 57870, 57871, 57872, 57873, 57874, 57875, 57876, 57877, 57878, 57879, 57880, 57881, 57882, 57883, 57884, 57885, 57886, 57887, 57888, 57889, 57890, 57891, 57892, 57893, 57894, 57895, 57896, 57897, 57898, 57899, 57900, 57901, 57902, 57903, 57904, 57905, 57906, 57907, 57908, 57909, 57910, 57911, 57912, 57913, 57914, 57915, 57916, 57917, 57918, 57919, 57920, 57921, 57922, 57923, 57924, 57925, 57926, 57927, 57928, 57929, 57930, 57931, 57932, 57933, 57934, 57935, 57936, 57937, 57938, 57939, 57940, 57941, 57942, 57943, 57944, 57945, 57946, 57947, 57948, 57949, 57950, 57951, 57952, 57953, 57954, 57955, 57956, 57957, 57958, 57959, 57960, 57961, 57962, 57963, 57964, 57965, 57966, 57967, 57968, 57969, 57970, 57971, 57972, 57973, 57974, 57975, 57976, 57977, 57978, 57979, 57980, 57981, 57982, 57983, 57984, 57985, 57986, 57987, 57988, 57989, 57990, 57991, 57992, 57993, 57994, 57995, 57996, 57997, 57998, 57999, 58000, 58001, 58002, 58003, 58004, 58005, 58006, 58007, 58008, 58009, 58010, 58011, 58012, 58013, 58014, 58015, 58016, 58017, 58018, 58019, 58020, 58021, 58022, 58023, 58024, 58025, 58026, 58027, 58028, 58029, 58030, 58031, 58032, 58033, 58034, 58035, 58036, 58037, 58038, 58039, 58040, 58041, 58042, 58043, 58044, 58045, 58046, 58047, 58048, 58049, 58050, 58051, 58052, 58053, 58054, 58055, 58056, 58057, 58058, 58059, 58060, 58061, 58062, 58063, 58064, 58065, 58066, 58067, 58068, 58069, 58070, 58071, 58072, 58073, 58074, 58075, 58076, 58077, 58078, 58079, 58080, 58081, 58082, 58083, 58084, 58085, 58086, 58087, 58088, 58089, 58090, 58091, 58092, 58093, 58094, 58095, 58096, 58097, 58098, 58099, 58100, 58101, 58102, 58103, 58104, 58105, 58106, 58107, 58108, 58109, 58110, 58111, 58112, 58113, 58114, 58115, 58116, 58117, 58118, 58119, 58120, 58121, 58122, 58123, 58124, 58125, 58126, 58127, 58128, 58129, 58130, 58131, 58132, 58133, 58134, 58135, 58136, 58137, 58138, 58139, 58140, 58141, 58142, 58143, 58144, 58145, 58146, 58147, 58148, 58149, 58150, 58151, 58152, 58153, 58154, 58155, 58156, 58157, 58158, 58159, 58160, 58161, 58162, 58163, 58164, 58165, 58166, 58167, 58168, 58169, 58170, 58171, 58172, 58173, 58174, 58175, 58176, 58177, 58178, 58179, 58180, 58181, 58182, 58183, 58184, 58185, 58186, 58187, 58188, 58189, 58190, 58191, 58192, 58193, 58194, 58195, 58196, 58197, 58198, 58199, 58200, 58201, 58202, 58203, 58204, 58205, 58206, 58207, 58208, 58209, 58210, 58211, 58212, 58213, 58214, 58215, 58216, 58217, 58218, 58219, 58220, 58221, 58222, 58223, 58224, 58225, 58226, 58227, 58228, 58229, 58230, 58231, 58232, 58233, 58234, 58235, 58236, 58237, 58238, 58239, 58240, 58241, 58242, 58243, 58244, 58245, 58246, 58247, 58248, 58249, 58250, 58251, 58252, 58253, 58254, 58255, 58256, 58257, 58258, 58259, 58260, 58261, 58262, 58263, 58264, 58265, 58266, 58267, 58268, 58269, 58270, 58271, 58272, 58273, 58274, 58275, 58276, 58277, 58278, 58279, 58280, 58281, 58282, 58283, 58284, 58285, 58286, 58287, 58288, 58289, 58290, 58291, 58292, 58293, 58294, 58295, 58296, 58297, 58298, 58299, 58300, 58301, 58302, 58303, 58304, 58305, 58306, 58307, 58308, 58309, 58310, 58311, 58312, 58313, 58314, 58315, 58316, 58317, 58318, 58319, 58320, 58321, 58322, 58323, 58324, 58325, 58326, 58327, 58328, 58329, 58330, 58331, 58332, 58333, 58334, 58335, 58336, 58337, 58338, 58339, 58340, 58341, 58342, 58343, 58344, 58345, 58346, 58347, 58348, 58349, 58350, 58351, 58352, 58353, 58354, 58355, 58356, 58357, 58358, 58359, 58360, 58361, 58362, 58363, 58364, 58365, 58366, 58367, 58368, 58369, 58370, 58371, 58372, 58373, 58374, 58375, 58376, 58377, 58378, 58379, 58380, 58381, 58382, 58383, 58384, 58385, 58386, 58387, 58388, 58389, 58390, 58391, 58392, 58393, 58394, 58395, 58396, 58397, 58398, 58399, 58400, 58401, 58402, 58403, 58404, 58405, 58406, 58407, 58408, 58409, 58410, 58411, 58412, 58413, 58414, 58415, 58416, 58417, 58418, 58419, 58420, 58421, 58422, 58423, 58424, 58425, 58426, 58427, 58428, 58429, 58430, 58431, 58432, 58433, 58434, 58435, 58436, 58437, 58438, 58439, 58440, 58441, 58442, 58443, 58444, 58445, 58446, 58447, 58448, 58449, 58450, 58451, 58452, 58453, 58454, 58455, 58456, 58457, 58458, 58459, 58460, 58461, 58462, 58463, 58464, 58465, 58466, 58467, 58468, 58469, 58470, 58471, 58472, 58473, 58474, 58475, 58476, 58477, 58478, 58479, 58480, 58481, 58482, 58483, 58484, 58485, 58486, 58487, 58488, 58489, 58490, 58491, 58492, 58493, 58494, 58495, 58496, 58497, 58498, 58499, 58500, 58501, 58502, 58503, 58504, 58505, 58506, 58507, 58508, 58509, 58510, 58511, 58512, 58513, 58514, 58515, 58516, 58517, 58518, 58519, 58520, 58521, 58522, 58523, 58524, 58525, 58526, 58527, 58528, 58529, 58530, 58531, 58532, 58533, 58534, 58535, 58536, 58537, 58538, 58539, 58540, 58541, 58542, 58543, 58544, 58545, 58546, 58547, 58548, 58549, 58550, 58551, 58552, 58553, 58554, 58555, 58556, 58557, 58558, 58559, 58560, 58561, 58562, 58563, 58564, 58565, 58566, 58567, 58568, 58569, 58570, 58571, 58572, 58573, 58574, 58575, 58576, 58577, 58578, 58579, 58580, 58581, 58582, 58583, 58584, 58585, 58586, 58587, 58588, 58589, 58590, 58591, 58592, 58593, 58594, 58595, 58596, 58597, 58598, 58599, 58600, 58601, 58602, 58603, 58604, 58605, 58606, 58607, 58608, 58609, 58610, 58611, 58612, 58613, 58614, 58615, 58616, 58617, 58618, 58619, 58620, 58621, 58622, 58623, 58624, 58625, 58626, 58627, 58628, 58629, 58630, 58631, 58632, 58633, 58634, 58635, 58636, 58637, 58638, 58639, 58640, 58641, 58642, 58643, 58644, 58645, 58646, 58647, 58648, 58649, 58650, 58651, 58652, 58653, 58654, 58655, 58656, 58657, 58658, 58659, 58660, 58661, 58662, 58663, 58664, 58665, 58666, 58667, 58668, 58669, 58670, 58671, 58672, 58673, 58674, 58675, 58676, 58677, 58678, 58679, 58680, 58681, 58682, 58683, 58684, 58685, 58686, 58687, 58688, 58689, 58690, 58691, 58692, 58693, 58694, 58695, 58696, 58697, 58698, 58699, 58700, 58701, 58702, 58703, 58704, 58705, 58706, 58707, 58708, 58709, 58710, 58711, 58712, 58713, 58714, 58715, 58716, 58717, 58718, 58719, 58720, 58721, 58722, 58723, 58724, 58725, 58726, 58727, 58728, 58729, 58730, 58731, 58732, 58733, 58734, 58735, 58736, 58737, 58738, 58739, 58740, 58741, 58742, 58743, 58744, 58745, 58746, 58747, 58748, 58749, 58750, 58751, 58752, 58753, 58754, 58755, 58756, 58757, 58758, 58759, 58760, 58761, 58762, 58763, 58764, 58765, 58766, 58767, 58768, 58769, 58770, 58771, 58772, 58773, 58774, 58775, 58776, 58777, 58778, 58779, 58780, 58781, 58782, 58783, 58784, 58785, 58786, 58787, 58788, 58789, 58790, 58791, 58792, 58793, 58794, 58795, 58796, 58797, 58798, 58799, 58800, 58801, 58802, 58803, 58804, 58805, 58806, 58807, 58808, 58809, 58810, 58811, 58812, 58813, 58814, 58815, 58816, 58817, 58818, 58819, 58820, 58821, 58822, 58823, 58824, 58825, 58826, 58827, 58828, 58829, 58830, 58831, 58832, 58833, 58834, 58835, 58836, 58837, 58838, 58839, 58840, 58841, 58842, 58843, 58844, 58845, 58846, 58847, 58848, 58849, 58850, 58851, 58852, 58853, 58854, 58855, 58856, 58857, 58858, 58859, 58860, 58861, 58862, 58863, 58864, 58865, 58866, 58867, 58868, 58869, 58870, 58871, 58872, 58873, 58874, 58875, 58876, 58877, 58878, 58879, 58880, 58881, 58882, 58883, 58884, 58885, 58886, 58887, 58888, 58889, 58890, 58891, 58892, 58893, 58894, 58895, 58896, 58897, 58898, 58899, 58900, 58901, 58902, 58903, 58904, 58905, 58906, 58907, 58908, 58909, 58910, 58911, 58912, 58913, 58914, 58915, 58916, 58917, 58918, 58919, 58920, 58921, 58922, 58923, 58924, 58925, 58926, 58927, 58928, 58929, 58930, 58931, 58932, 58933, 58934, 58935, 58936, 58937, 58938, 58939, 58940, 58941, 58942, 58943, 58944, 58945, 58946, 58947, 58948, 58949, 58950, 58951, 58952, 58953, 58954, 58955, 58956, 58957, 58958, 58959, 58960, 58961, 58962, 58963, 58964, 58965, 58966, 58967, 58968, 58969, 58970, 58971, 58972, 58973, 58974, 58975, 58976, 58977, 58978, 58979, 58980, 58981, 58982, 58983, 58984, 58985, 58986, 58987, 58988, 58989, 58990, 58991, 58992, 58993, 58994, 58995, 58996, 58997, 58998, 58999, 59000, 59001, 59002, 59003, 59004, 59005, 59006, 59007, 59008, 59009, 59010, 59011, 59012, 59013, 59014, 59015, 59016, 59017, 59018, 59019, 59020, 59021, 59022, 59023, 59024, 59025, 59026, 59027, 59028, 59029, 59030, 59031, 59032, 59033, 59034, 59035, 59036, 59037, 59038, 59039, 59040, 59041, 59042, 59043, 59044, 59045, 59046, 59047, 59048, 59049, 59050, 59051, 59052, 59053, 59054, 59055, 59056, 59057, 59058, 59059, 59060, 59061, 59062, 59063, 59064, 59065, 59066, 59067, 59068, 59069, 59070, 59071, 59072, 59073, 59074, 59075, 59076, 59077, 59078, 59079, 59080, 59081, 59082, 59083, 59084, 59085, 59086, 59087, 59088, 59089, 59090, 59091, 59092, 59093, 59094, 59095, 59096, 59097, 59098, 59099, 59100, 59101, 59102, 59103, 59104, 59105, 59106, 59107, 59108, 59109, 59110, 59111, 59112, 59113, 59114, 59115, 59116, 59117, 59118, 59119, 59120, 59121, 59122, 59123, 59124, 59125, 59126, 59127, 59128, 59129, 59130, 59131, 59132, 59133, 59134, 59135, 59136, 59137, 59138, 59139, 59140, 59141, 59142, 59143, 59144, 59145, 59146, 59147, 59148, 59149, 59150, 59151, 59152, 59153, 59154, 59155, 59156, 59157, 59158, 59159, 59160, 59161, 59162, 59163, 59164, 59165, 59166, 59167, 59168, 59169, 59170, 59171, 59172, 59173, 59174, 59175, 59176, 59177, 59178, 59179, 59180, 59181, 59182, 59183, 59184, 59185, 59186, 59187, 59188, 59189, 59190, 59191, 59192, 59193, 59194, 59195, 59196, 59197, 59198, 59199, 59200, 59201, 59202, 59203, 59204, 59205, 59206, 59207, 59208, 59209, 59210, 59211, 59212, 59213, 59214, 59215, 59216, 59217, 59218, 59219, 59220, 59221, 59222, 59223, 59224, 59225, 59226, 59227, 59228, 59229, 59230, 59231, 59232, 59233, 59234, 59235, 59236, 59237, 59238, 59239, 59240, 59241, 59242, 59243, 59244, 59245, 59246, 59247, 59248, 59249, 59250, 59251, 59252, 59253, 59254, 59255, 59256, 59257, 59258, 59259, 59260, 59261, 59262, 59263, 59264, 59265, 59266, 59267, 59268, 59269, 59270, 59271, 59272, 59273, 59274, 59275, 59276, 59277, 59278, 59279, 59280, 59281, 59282, 59283, 59284, 59285, 59286, 59287, 59288, 59289, 59290, 59291, 59292, 59293, 59294, 59295, 59296, 59297, 59298, 59299, 59300, 59301, 59302, 59303, 59304, 59305, 59306, 59307, 59308, 59309, 59310, 59311, 59312, 59313, 59314, 59315, 59316, 59317, 59318, 59319, 59320, 59321, 59322, 59323, 59324, 59325, 59326, 59327, 59328, 59329, 59330, 59331, 59332, 59333, 59334, 59335, 59336, 59337, 59338, 59339, 59340, 59341, 59342, 59343, 59344, 59345, 59346, 59347, 59348, 59349, 59350, 59351, 59352, 59353, 59354, 59355, 59356, 59357, 59358, 59359, 59360, 59361, 59362, 59363, 59364, 59365, 59366, 59367, 59368, 59369, 59370, 59371, 59372, 59373, 59374, 59375, 59376, 59377, 59378, 59379, 59380, 59381, 59382, 59383, 59384, 59385, 59386, 59387, 59388, 59389, 59390, 59391, 59392, 59393, 59394, 59395, 59396, 59397, 59398, 59399, 59400, 59401, 59402, 59403, 59404, 59405, 59406, 59407, 59408, 59409, 59410, 59411, 59412, 59413, 59414, 59415, 59416, 59417, 59418, 59419, 59420, 59421, 59422, 59423, 59424, 59425, 59426, 59427, 59428, 59429, 59430, 59431, 59432, 59433, 59434, 59435, 59436, 59437, 59438, 59439, 59440, 59441, 59442, 59443, 59444, 59445, 59446, 59447, 59448, 59449, 59450, 59451, 59452, 59453, 59454, 59455, 59456, 59457, 59458, 59459, 59460, 59461, 59462, 59463, 59464, 59465, 59466, 59467, 59468, 59469, 59470, 59471, 59472, 59473, 59474, 59475, 59476, 59477, 59478, 59479, 59480, 59481, 59482, 59483, 59484, 59485, 59486, 59487, 59488, 59489, 59490, 59491, 59492, 59493, 59494, 59495, 59496, 59497, 59498, 59499, 59500, 59501, 59502, 59503, 59504, 59505, 59506, 59507, 59508, 59509, 59510, 59511, 59512, 59513, 59514, 59515, 59516, 59517, 59518, 59519, 59520, 59521, 59522, 59523, 59524, 59525, 59526, 59527, 59528, 59529, 59530, 59531, 59532, 59533, 59534, 59535, 59536, 59537, 59538, 59539, 59540, 59541, 59542, 59543, 59544, 59545, 59546, 59547, 59548, 59549, 59550, 59551, 59552, 59553, 59554, 59555, 59556, 59557, 59558, 59559, 59560, 59561, 59562, 59563, 59564, 59565, 59566, 59567, 59568, 59569, 59570, 59571, 59572, 59573, 59574, 59575, 59576, 59577, 59578, 59579, 59580, 59581, 59582, 59583, 59584, 59585, 59586, 59587, 59588, 59589, 59590, 59591, 59592, 59593, 59594, 59595, 59596, 59597, 59598, 59599, 59600, 59601, 59602, 59603, 59604, 59605, 59606, 59607, 59608, 59609, 59610, 59611, 59612, 59613, 59614, 59615, 59616, 59617, 59618, 59619, 59620, 59621, 59622, 59623, 59624, 59625, 59626, 59627, 59628, 59629, 59630, 59631, 59632, 59633, 59634, 59635, 59636, 59637, 59638, 59639, 59640, 59641, 59642, 59643, 59644, 59645, 59646, 59647, 59648, 59649, 59650, 59651, 59652, 59653, 59654, 59655, 59656, 59657, 59658, 59659, 59660, 59661, 59662, 59663, 59664, 59665, 59666, 59667, 59668, 59669, 59670, 59671, 59672, 59673, 59674, 59675, 59676, 59677, 59678, 59679, 59680, 59681, 59682, 59683, 59684, 59685, 59686, 59687, 59688, 59689, 59690, 59691, 59692, 59693, 59694, 59695, 59696, 59697, 59698, 59699, 59700, 59701, 59702, 59703, 59704, 59705, 59706, 59707, 59708, 59709, 59710, 59711, 59712, 59713, 59714, 59715, 59716, 59717, 59718, 59719, 59720, 59721, 59722, 59723, 59724, 59725, 59726, 59727, 59728, 59729, 59730, 59731, 59732, 59733, 59734, 59735, 59736, 59737, 59738, 59739, 59740, 59741, 59742, 59743, 59744, 59745, 59746, 59747, 59748, 59749, 59750, 59751, 59752, 59753, 59754, 59755, 59756, 59757, 59758, 59759, 59760, 59761, 59762, 59763, 59764, 59765, 59766, 59767, 59768, 59769, 59770, 59771, 59772, 59773, 59774, 59775, 59776, 59777, 59778, 59779, 59780, 59781, 59782, 59783, 59784, 59785, 59786, 59787, 59788, 59789, 59790, 59791, 59792, 59793, 59794, 59795, 59796, 59797, 59798, 59799, 59800, 59801, 59802, 59803, 59804, 59805, 59806, 59807, 59808, 59809, 59810, 59811, 59812, 59813, 59814, 59815, 59816, 59817, 59818, 59819, 59820, 59821, 59822, 59823, 59824, 59825, 59826, 59827, 59828, 59829, 59830, 59831, 59832, 59833, 59834, 59835, 59836, 59837, 59838, 59839, 59840, 59841, 59842, 59843, 59844, 59845, 59846, 59847, 59848, 59849, 59850, 59851, 59852, 59853, 59854, 59855, 59856, 59857, 59858, 59859, 59860, 59861, 59862, 59863, 59864, 59865, 59866, 59867, 59868, 59869, 59870, 59871, 59872, 59873, 59874, 59875, 59876, 59877, 59878, 59879, 59880, 59881, 59882, 59883, 59884, 59885, 59886, 59887, 59888, 59889, 59890, 59891, 59892, 59893, 59894, 59895, 59896, 59897, 59898, 59899, 59900, 59901, 59902, 59903, 59904, 59905, 59906, 59907, 59908, 59909, 59910, 59911, 59912, 59913, 59914, 59915, 59916, 59917, 59918, 59919, 59920, 59921, 59922, 59923, 59924, 59925, 59926, 59927, 59928, 59929, 59930, 59931, 59932, 59933, 59934, 59935, 59936, 59937, 59938, 59939, 59940, 59941, 59942, 59943, 59944, 59945, 59946, 59947, 59948, 59949, 59950, 59951, 59952, 59953, 59954, 59955, 59956, 59957, 59958, 59959, 59960, 59961, 59962, 59963, 59964, 59965, 59966, 59967, 59968, 59969, 59970, 59971, 59972, 59973, 59974, 59975, 59976, 59977, 59978, 59979, 59980, 59981, 59982, 59983, 59984, 59985, 59986, 59987, 59988, 59989, 59990, 59991, 59992, 59993, 59994, 59995, 59996, 59997, 59998, 59999, 60000, 60001, 60002, 60003, 60004, 60005, 60006, 60007, 60008, 60009, 60010, 60011, 60012, 60013, 60014, 60015, 60016, 60017, 60018, 60019, 60020, 60021, 60022, 60023, 60024, 60025, 60026, 60027, 60028, 60029, 60030, 60031, 60032, 60033, 60034, 60035, 60036, 60037, 60038, 60039, 60040, 60041, 60042, 60043, 60044, 60045, 60046, 60047, 60048, 60049, 60050, 60051, 60052, 60053, 60054, 60055, 60056, 60057, 60058, 60059, 60060, 60061, 60062, 60063, 60064, 60065, 60066, 60067, 60068, 60069, 60070, 60071, 60072, 60073, 60074, 60075, 60076, 60077, 60078, 60079, 60080, 60081, 60082, 60083, 60084, 60085, 60086, 60087, 60088, 60089, 60090, 60091, 60092, 60093, 60094, 60095, 60096, 60097, 60098, 60099, 60100, 60101, 60102, 60103, 60104, 60105, 60106, 60107, 60108, 60109, 60110, 60111, 60112, 60113, 60114, 60115, 60116, 60117, 60118, 60119, 60120, 60121, 60122, 60123, 60124, 60125, 60126, 60127, 60128, 60129, 60130, 60131, 60132, 60133, 60134, 60135, 60136, 60137, 60138, 60139, 60140, 60141, 60142, 60143, 60144, 60145, 60146, 60147, 60148, 60149, 60150, 60151, 60152, 60153, 60154, 60155, 60156, 60157, 60158, 60159, 60160, 60161, 60162, 60163, 60164, 60165, 60166, 60167, 60168, 60169, 60170, 60171, 60172, 60173, 60174, 60175, 60176, 60177, 60178, 60179, 60180, 60181, 60182, 60183, 60184, 60185, 60186, 60187, 60188, 60189, 60190, 60191, 60192, 60193, 60194, 60195, 60196, 60197, 60198, 60199, 60200, 60201, 60202, 60203, 60204, 60205, 60206, 60207, 60208, 60209, 60210, 60211, 60212, 60213, 60214, 60215, 60216, 60217, 60218, 60219, 60220, 60221, 60222, 60223, 60224, 60225, 60226, 60227, 60228, 60229, 60230, 60231, 60232, 60233, 60234, 60235, 60236, 60237, 60238, 60239, 60240, 60241, 60242, 60243, 60244, 60245, 60246, 60247, 60248, 60249, 60250, 60251, 60252, 60253, 60254, 60255, 60256, 60257, 60258, 60259, 60260, 60261, 60262, 60263, 60264, 60265, 60266, 60267, 60268, 60269, 60270, 60271, 60272, 60273, 60274, 60275, 60276, 60277, 60278, 60279, 60280, 60281, 60282, 60283, 60284, 60285, 60286, 60287, 60288, 60289, 60290, 60291, 60292, 60293, 60294, 60295, 60296, 60297, 60298, 60299, 60300, 60301, 60302, 60303, 60304, 60305, 60306, 60307, 60308, 60309, 60310, 60311, 60312, 60313, 60314, 60315, 60316, 60317, 60318, 60319, 60320, 60321, 60322, 60323, 60324, 60325, 60326, 60327, 60328, 60329, 60330, 60331, 60332, 60333, 60334, 60335, 60336, 60337, 60338, 60339, 60340, 60341, 60342, 60343, 60344, 60345, 60346, 60347, 60348, 60349, 60350, 60351, 60352, 60353, 60354, 60355, 60356, 60357, 60358, 60359, 60360, 60361, 60362, 60363, 60364, 60365, 60366, 60367, 60368, 60369, 60370, 60371, 60372, 60373, 60374, 60375, 60376, 60377, 60378, 60379, 60380, 60381, 60382, 60383, 60384, 60385, 60386, 60387, 60388, 60389, 60390, 60391, 60392, 60393, 60394, 60395, 60396, 60397, 60398, 60399, 60400, 60401, 60402, 60403, 60404, 60405, 60406, 60407, 60408, 60409, 60410, 60411, 60412, 60413, 60414, 60415, 60416, 60417, 60418, 60419, 60420, 60421, 60422, 60423, 60424, 60425, 60426, 60427, 60428, 60429, 60430, 60431, 60432, 60433, 60434, 60435, 60436, 60437, 60438, 60439, 60440, 60441, 60442, 60443, 60444, 60445, 60446, 60447, 60448, 60449, 60450, 60451, 60452, 60453, 60454, 60455, 60456, 60457, 60458, 60459, 60460, 60461, 60462, 60463, 60464, 60465, 60466, 60467, 60468, 60469, 60470, 60471, 60472, 60473, 60474, 60475, 60476, 60477, 60478, 60479, 60480, 60481, 60482, 60483, 60484, 60485, 60486, 60487, 60488, 60489, 60490, 60491, 60492, 60493, 60494, 60495, 60496, 60497, 60498, 60499, 60500, 60501, 60502, 60503, 60504, 60505, 60506, 60507, 60508, 60509, 60510, 60511, 60512, 60513, 60514, 60515, 60516, 60517, 60518, 60519, 60520, 60521, 60522, 60523, 60524, 60525, 60526, 60527, 60528, 60529, 60530, 60531, 60532, 60533, 60534, 60535, 60536, 60537, 60538, 60539, 60540, 60541, 60542, 60543, 60544, 60545, 60546, 60547, 60548, 60549, 60550, 60551, 60552, 60553, 60554, 60555, 60556, 60557, 60558, 60559, 60560, 60561, 60562, 60563, 60564, 60565, 60566, 60567, 60568, 60569, 60570, 60571, 60572, 60573, 60574, 60575, 60576, 60577, 60578, 60579, 60580, 60581, 60582, 60583, 60584, 60585, 60586, 60587, 60588, 60589, 60590, 60591, 60592, 60593, 60594, 60595, 60596, 60597, 60598, 60599, 60600, 60601, 60602, 60603, 60604, 60605, 60606, 60607, 60608, 60609, 60610, 60611, 60612, 60613, 60614, 60615, 60616, 60617, 60618, 60619, 60620, 60621, 60622, 60623, 60624, 60625, 60626, 60627, 60628, 60629, 60630, 60631, 60632, 60633, 60634, 60635, 60636, 60637, 60638, 60639, 60640, 60641, 60642, 60643, 60644, 60645, 60646, 60647, 60648, 60649, 60650, 60651, 60652, 60653, 60654, 60655, 60656, 60657, 60658, 60659, 60660, 60661, 60662, 60663, 60664, 60665, 60666, 60667, 60668, 60669, 60670, 60671, 60672, 60673, 60674, 60675, 60676, 60677, 60678, 60679, 60680, 60681, 60682, 60683, 60684, 60685, 60686, 60687, 60688, 60689, 60690, 60691, 60692, 60693, 60694, 60695, 60696, 60697, 60698, 60699, 60700, 60701, 60702, 60703, 60704, 60705, 60706, 60707, 60708, 60709, 60710, 60711, 60712, 60713, 60714, 60715, 60716, 60717, 60718, 60719, 60720, 60721, 60722, 60723, 60724, 60725, 60726, 60727, 60728, 60729, 60730, 60731, 60732, 60733, 60734, 60735, 60736, 60737, 60738, 60739, 60740, 60741, 60742, 60743, 60744, 60745, 60746, 60747, 60748, 60749, 60750, 60751, 60752, 60753, 60754, 60755, 60756, 60757, 60758, 60759, 60760, 60761, 60762, 60763, 60764, 60765, 60766, 60767, 60768, 60769, 60770, 60771, 60772, 60773, 60774, 60775, 60776, 60777, 60778, 60779, 60780, 60781, 60782, 60783, 60784, 60785, 60786, 60787, 60788, 60789, 60790, 60791, 60792, 60793, 60794, 60795, 60796, 60797, 60798, 60799, 60800, 60801, 60802, 60803, 60804, 60805, 60806, 60807, 60808, 60809, 60810, 60811, 60812, 60813, 60814, 60815, 60816, 60817, 60818, 60819, 60820, 60821, 60822, 60823, 60824, 60825, 60826, 60827, 60828, 60829, 60830, 60831, 60832, 60833, 60834, 60835, 60836, 60837, 60838, 60839, 60840, 60841, 60842, 60843, 60844, 60845, 60846, 60847, 60848, 60849, 60850, 60851, 60852, 60853, 60854, 60855, 60856, 60857, 60858, 60859, 60860, 60861, 60862, 60863, 60864, 60865, 60866, 60867, 60868, 60869, 60870, 60871, 60872, 60873, 60874, 60875, 60876, 60877, 60878, 60879, 60880, 60881, 60882, 60883, 60884, 60885, 60886, 60887, 60888, 60889, 60890, 60891, 60892, 60893, 60894, 60895, 60896, 60897, 60898, 60899, 60900, 60901, 60902, 60903, 60904, 60905, 60906, 60907, 60908, 60909, 60910, 60911, 60912, 60913, 60914, 60915, 60916, 60917, 60918, 60919, 60920, 60921, 60922, 60923, 60924, 60925, 60926, 60927, 60928, 60929, 60930, 60931, 60932, 60933, 60934, 60935, 60936, 60937, 60938, 60939, 60940, 60941, 60942, 60943, 60944, 60945, 60946, 60947, 60948, 60949, 60950, 60951, 60952, 60953, 60954, 60955, 60956, 60957, 60958, 60959, 60960, 60961, 60962, 60963, 60964, 60965, 60966, 60967, 60968, 60969, 60970, 60971, 60972, 60973, 60974, 60975, 60976, 60977, 60978, 60979, 60980, 60981, 60982, 60983, 60984, 60985, 60986, 60987, 60988, 60989, 60990, 60991, 60992, 60993, 60994, 60995, 60996, 60997, 60998, 60999, 61000, 61001, 61002, 61003, 61004, 61005, 61006, 61007, 61008, 61009, 61010, 61011, 61012, 61013, 61014, 61015, 61016, 61017, 61018, 61019, 61020, 61021, 61022, 61023, 61024, 61025, 61026, 61027, 61028, 61029, 61030, 61031, 61032, 61033, 61034, 61035, 61036, 61037, 61038, 61039, 61040, 61041, 61042, 61043, 61044, 61045, 61046, 61047, 61048, 61049, 61050, 61051, 61052, 61053, 61054, 61055, 61056, 61057, 61058, 61059, 61060, 61061, 61062, 61063, 61064, 61065, 61066, 61067, 61068, 61069, 61070, 61071, 61072, 61073, 61074, 61075, 61076, 61077, 61078, 61079, 61080, 61081, 61082, 61083, 61084, 61085, 61086, 61087, 61088, 61089, 61090, 61091, 61092, 61093, 61094, 61095, 61096, 61097, 61098, 61099, 61100, 61101, 61102, 61103, 61104, 61105, 61106, 61107, 61108, 61109, 61110, 61111, 61112, 61113, 61114, 61115, 61116, 61117, 61118, 61119, 61120, 61121, 61122, 61123, 61124, 61125, 61126, 61127, 61128, 61129, 61130, 61131, 61132, 61133, 61134, 61135, 61136, 61137, 61138, 61139, 61140, 61141, 61142, 61143, 61144, 61145, 61146, 61147, 61148, 61149, 61150, 61151, 61152, 61153, 61154, 61155, 61156, 61157, 61158, 61159, 61160, 61161, 61162, 61163, 61164, 61165, 61166, 61167, 61168, 61169, 61170, 61171, 61172, 61173, 61174, 61175, 61176, 61177, 61178, 61179, 61180, 61181, 61182, 61183, 61184, 61185, 61186, 61187, 61188, 61189, 61190, 61191, 61192, 61193, 61194, 61195, 61196, 61197, 61198, 61199, 61200, 61201, 61202, 61203, 61204, 61205, 61206, 61207, 61208, 61209, 61210, 61211, 61212, 61213, 61214, 61215, 61216, 61217, 61218, 61219, 61220, 61221, 61222, 61223, 61224, 61225, 61226, 61227, 61228, 61229, 61230, 61231, 61232, 61233, 61234, 61235, 61236, 61237, 61238, 61239, 61240, 61241, 61242, 61243, 61244, 61245, 61246, 61247, 61248, 61249, 61250, 61251, 61252, 61253, 61254, 61255, 61256, 61257, 61258, 61259, 61260, 61261, 61262, 61263, 61264, 61265, 61266, 61267, 61268, 61269, 61270, 61271, 61272, 61273, 61274, 61275, 61276, 61277, 61278, 61279, 61280, 61281, 61282, 61283, 61284, 61285, 61286, 61287, 61288, 61289, 61290, 61291, 61292, 61293, 61294, 61295, 61296, 61297, 61298, 61299, 61300, 61301, 61302, 61303, 61304, 61305, 61306, 61307, 61308, 61309, 61310, 61311, 61312, 61313, 61314, 61315, 61316, 61317, 61318, 61319, 61320, 61321, 61322, 61323, 61324, 61325, 61326, 61327, 61328, 61329, 61330, 61331, 61332, 61333, 61334, 61335, 61336, 61337, 61338, 61339, 61340, 61341, 61342, 61343, 61344, 61345, 61346, 61347, 61348, 61349, 61350, 61351, 61352, 61353, 61354, 61355, 61356, 61357, 61358, 61359, 61360, 61361, 61362, 61363, 61364, 61365, 61366, 61367, 61368, 61369, 61370, 61371, 61372, 61373, 61374, 61375, 61376, 61377, 61378, 61379, 61380, 61381, 61382, 61383, 61384, 61385, 61386, 61387, 61388, 61389, 61390, 61391, 61392, 61393, 61394, 61395, 61396, 61397, 61398, 61399, 61400, 61401, 61402, 61403, 61404, 61405, 61406, 61407, 61408, 61409, 61410, 61411, 61412, 61413, 61414, 61415, 61416, 61417, 61418, 61419, 61420, 61421, 61422, 61423, 61424, 61425, 61426, 61427, 61428, 61429, 61430, 61431, 61432, 61433, 61434, 61435, 61436, 61437, 61438, 61439, 61440, 61441, 61442, 61443, 61444, 61445, 61446, 61447, 61448, 61449, 61450, 61451, 61452, 61453, 61454, 61455, 61456, 61457, 61458, 61459, 61460, 61461, 61462, 61463, 61464, 61465, 61466, 61467, 61468, 61469, 61470, 61471, 61472, 61473, 61474, 61475, 61476, 61477, 61478, 61479, 61480, 61481, 61482, 61483, 61484, 61485, 61486, 61487, 61488, 61489, 61490, 61491, 61492, 61493, 61494, 61495, 61496, 61497, 61498, 61499, 61500, 61501, 61502, 61503, 61504, 61505, 61506, 61507, 61508, 61509, 61510, 61511, 61512, 61513, 61514, 61515, 61516, 61517, 61518, 61519, 61520, 61521, 61522, 61523, 61524, 61525, 61526, 61527, 61528, 61529, 61530, 61531, 61532, 61533, 61534, 61535, 61536, 61537, 61538, 61539, 61540, 61541, 61542, 61543, 61544, 61545, 61546, 61547, 61548, 61549, 61550, 61551, 61552, 61553, 61554, 61555, 61556, 61557, 61558, 61559, 61560, 61561, 61562, 61563, 61564, 61565, 61566, 61567, 61568, 61569, 61570, 61571, 61572, 61573, 61574, 61575, 61576, 61577, 61578, 61579, 61580, 61581, 61582, 61583, 61584, 61585, 61586, 61587, 61588, 61589, 61590, 61591, 61592, 61593, 61594, 61595, 61596, 61597, 61598, 61599, 61600, 61601, 61602, 61603, 61604, 61605, 61606, 61607, 61608, 61609, 61610, 61611, 61612, 61613, 61614, 61615, 61616, 61617, 61618, 61619, 61620, 61621, 61622, 61623, 61624, 61625, 61626, 61627, 61628, 61629, 61630, 61631, 61632, 61633, 61634, 61635, 61636, 61637, 61638, 61639, 61640, 61641, 61642, 61643, 61644, 61645, 61646, 61647, 61648, 61649, 61650, 61651, 61652, 61653, 61654, 61655, 61656, 61657, 61658, 61659, 61660, 61661, 61662, 61663, 61664, 61665, 61666, 61667, 61668, 61669, 61670, 61671, 61672, 61673, 61674, 61675, 61676, 61677, 61678, 61679, 61680, 61681, 61682, 61683, 61684, 61685, 61686, 61687, 61688, 61689, 61690, 61691, 61692, 61693, 61694, 61695, 61696, 61697, 61698, 61699, 61700, 61701, 61702, 61703, 61704, 61705, 61706, 61707, 61708, 61709, 61710, 61711, 61712, 61713, 61714, 61715, 61716, 61717, 61718, 61719, 61720, 61721, 61722, 61723, 61724, 61725, 61726, 61727, 61728, 61729, 61730, 61731, 61732, 61733, 61734, 61735, 61736, 61737, 61738, 61739, 61740, 61741, 61742, 61743, 61744, 61745, 61746, 61747, 61748, 61749, 61750, 61751, 61752, 61753, 61754, 61755, 61756, 61757, 61758, 61759, 61760, 61761, 61762, 61763, 61764, 61765, 61766, 61767, 61768, 61769, 61770, 61771, 61772, 61773, 61774, 61775, 61776, 61777, 61778, 61779, 61780, 61781, 61782, 61783, 61784, 61785, 61786, 61787, 61788, 61789, 61790, 61791, 61792, 61793, 61794, 61795, 61796, 61797, 61798, 61799, 61800, 61801, 61802, 61803, 61804, 61805, 61806, 61807, 61808, 61809, 61810, 61811, 61812, 61813, 61814, 61815, 61816, 61817, 61818, 61819, 61820, 61821, 61822, 61823, 61824, 61825, 61826, 61827, 61828, 61829, 61830, 61831, 61832, 61833, 61834, 61835, 61836, 61837, 61838, 61839, 61840, 61841, 61842, 61843, 61844, 61845, 61846, 61847, 61848, 61849, 61850, 61851, 61852, 61853, 61854, 61855, 61856, 61857, 61858, 61859, 61860, 61861, 61862, 61863, 61864, 61865, 61866, 61867, 61868, 61869, 61870, 61871, 61872, 61873, 61874, 61875, 61876, 61877, 61878, 61879, 61880, 61881, 61882, 61883, 61884, 61885, 61886, 61887, 61888, 61889, 61890, 61891, 61892, 61893, 61894, 61895, 61896, 61897, 61898, 61899, 61900, 61901, 61902, 61903, 61904, 61905, 61906, 61907, 61908, 61909, 61910, 61911, 61912, 61913, 61914, 61915, 61916, 61917, 61918, 61919, 61920, 61921, 61922, 61923, 61924, 61925, 61926, 61927, 61928, 61929, 61930, 61931, 61932, 61933, 61934, 61935, 61936, 61937, 61938, 61939, 61940, 61941, 61942, 61943, 61944, 61945, 61946, 61947, 61948, 61949, 61950, 61951, 61952, 61953, 61954, 61955, 61956, 61957, 61958, 61959, 61960, 61961, 61962, 61963, 61964, 61965, 61966, 61967, 61968, 61969, 61970, 61971, 61972, 61973, 61974, 61975, 61976, 61977, 61978, 61979, 61980, 61981, 61982, 61983, 61984, 61985, 61986, 61987, 61988, 61989, 61990, 61991, 61992, 61993, 61994, 61995, 61996, 61997, 61998, 61999, 62000, 62001, 62002, 62003, 62004, 62005, 62006, 62007, 62008, 62009, 62010, 62011, 62012, 62013, 62014, 62015, 62016, 62017, 62018, 62019, 62020, 62021, 62022, 62023, 62024, 62025, 62026, 62027, 62028, 62029, 62030, 62031, 62032, 62033, 62034, 62035, 62036, 62037, 62038, 62039, 62040, 62041, 62042, 62043, 62044, 62045, 62046, 62047, 62048, 62049, 62050, 62051, 62052, 62053, 62054, 62055, 62056, 62057, 62058, 62059, 62060, 62061, 62062, 62063, 62064, 62065, 62066, 62067, 62068, 62069, 62070, 62071, 62072, 62073, 62074, 62075, 62076, 62077, 62078, 62079, 62080, 62081, 62082, 62083, 62084, 62085, 62086, 62087, 62088, 62089, 62090, 62091, 62092, 62093, 62094, 62095, 62096, 62097, 62098, 62099, 62100, 62101, 62102, 62103, 62104, 62105, 62106, 62107, 62108, 62109, 62110, 62111, 62112, 62113, 62114, 62115, 62116, 62117, 62118, 62119, 62120, 62121, 62122, 62123, 62124, 62125, 62126, 62127, 62128, 62129, 62130, 62131, 62132, 62133, 62134, 62135, 62136, 62137, 62138, 62139, 62140, 62141, 62142, 62143, 62144, 62145, 62146, 62147, 62148, 62149, 62150, 62151, 62152, 62153, 62154, 62155, 62156, 62157, 62158, 62159, 62160, 62161, 62162, 62163, 62164, 62165, 62166, 62167, 62168, 62169, 62170, 62171, 62172, 62173, 62174, 62175, 62176, 62177, 62178, 62179, 62180, 62181, 62182, 62183, 62184, 62185, 62186, 62187, 62188, 62189, 62190, 62191, 62192, 62193, 62194, 62195, 62196, 62197, 62198, 62199, 62200, 62201, 62202, 62203, 62204, 62205, 62206, 62207, 62208, 62209, 62210, 62211, 62212, 62213, 62214, 62215, 62216, 62217, 62218, 62219, 62220, 62221, 62222, 62223, 62224, 62225, 62226, 62227, 62228, 62229, 62230, 62231, 62232, 62233, 62234, 62235, 62236, 62237, 62238, 62239, 62240, 62241, 62242, 62243, 62244, 62245, 62246, 62247, 62248, 62249, 62250, 62251, 62252, 62253, 62254, 62255, 62256, 62257, 62258, 62259, 62260, 62261, 62262, 62263, 62264, 62265, 62266, 62267, 62268, 62269, 62270, 62271, 62272, 62273, 62274, 62275, 62276, 62277, 62278, 62279, 62280, 62281, 62282, 62283, 62284, 62285, 62286, 62287, 62288, 62289, 62290, 62291, 62292, 62293, 62294, 62295, 62296, 62297, 62298, 62299, 62300, 62301, 62302, 62303, 62304, 62305, 62306, 62307, 62308, 62309, 62310, 62311, 62312, 62313, 62314, 62315, 62316, 62317, 62318, 62319, 62320, 62321, 62322, 62323, 62324, 62325, 62326, 62327, 62328, 62329, 62330, 62331, 62332, 62333, 62334, 62335, 62336, 62337, 62338, 62339, 62340, 62341, 62342, 62343, 62344, 62345, 62346, 62347, 62348, 62349, 62350, 62351, 62352, 62353, 62354, 62355, 62356, 62357, 62358, 62359, 62360, 62361, 62362, 62363, 62364, 62365, 62366, 62367, 62368, 62369, 62370, 62371, 62372, 62373, 62374, 62375, 62376, 62377, 62378, 62379, 62380, 62381, 62382, 62383, 62384, 62385, 62386, 62387, 62388, 62389, 62390, 62391, 62392, 62393, 62394, 62395, 62396, 62397, 62398, 62399, 62400, 62401, 62402, 62403, 62404, 62405, 62406, 62407, 62408, 62409, 62410, 62411, 62412, 62413, 62414, 62415, 62416, 62417, 62418, 62419, 62420, 62421, 62422, 62423, 62424, 62425, 62426, 62427, 62428, 62429, 62430, 62431, 62432, 62433, 62434, 62435, 62436, 62437, 62438, 62439, 62440, 62441, 62442, 62443, 62444, 62445, 62446, 62447, 62448, 62449, 62450, 62451, 62452, 62453, 62454, 62455, 62456, 62457, 62458, 62459, 62460, 62461, 62462, 62463, 62464, 62465, 62466, 62467, 62468, 62469, 62470, 62471, 62472, 62473, 62474, 62475, 62476, 62477, 62478, 62479, 62480, 62481, 62482, 62483, 62484, 62485, 62486, 62487, 62488, 62489, 62490, 62491, 62492, 62493, 62494, 62495, 62496, 62497, 62498, 62499, 62500, 62501, 62502, 62503, 62504, 62505, 62506, 62507, 62508, 62509, 62510, 62511, 62512, 62513, 62514, 62515, 62516, 62517, 62518, 62519, 62520, 62521, 62522, 62523, 62524, 62525, 62526, 62527, 62528, 62529, 62530, 62531, 62532, 62533, 62534, 62535, 62536, 62537, 62538, 62539, 62540, 62541, 62542, 62543, 62544, 62545, 62546, 62547, 62548, 62549, 62550, 62551, 62552, 62553, 62554, 62555, 62556, 62557, 62558, 62559, 62560, 62561, 62562, 62563, 62564, 62565, 62566, 62567, 62568, 62569, 62570, 62571, 62572, 62573, 62574, 62575, 62576, 62577, 62578, 62579, 62580, 62581, 62582, 62583, 62584, 62585, 62586, 62587, 62588, 62589, 62590, 62591, 62592, 62593, 62594, 62595, 62596, 62597, 62598, 62599, 62600, 62601, 62602, 62603, 62604, 62605, 62606, 62607, 62608, 62609, 62610, 62611, 62612, 62613, 62614, 62615, 62616, 62617, 62618, 62619, 62620, 62621, 62622, 62623, 62624, 62625, 62626, 62627, 62628, 62629, 62630, 62631, 62632, 62633, 62634, 62635, 62636, 62637, 62638, 62639, 62640, 62641, 62642, 62643, 62644, 62645, 62646, 62647, 62648, 62649, 62650, 62651, 62652, 62653, 62654, 62655, 62656, 62657, 62658, 62659, 62660, 62661, 62662, 62663, 62664, 62665, 62666, 62667, 62668, 62669, 62670, 62671, 62672, 62673, 62674, 62675, 62676, 62677, 62678, 62679, 62680, 62681, 62682, 62683, 62684, 62685, 62686, 62687, 62688, 62689, 62690, 62691, 62692, 62693, 62694, 62695, 62696, 62697, 62698, 62699, 62700, 62701, 62702, 62703, 62704, 62705, 62706, 62707, 62708, 62709, 62710, 62711, 62712, 62713, 62714, 62715, 62716, 62717, 62718, 62719, 62720, 62721, 62722, 62723, 62724, 62725, 62726, 62727, 62728, 62729, 62730, 62731, 62732, 62733, 62734, 62735, 62736, 62737, 62738, 62739, 62740, 62741, 62742, 62743, 62744, 62745, 62746, 62747, 62748, 62749, 62750, 62751, 62752, 62753, 62754, 62755, 62756, 62757, 62758, 62759, 62760, 62761, 62762, 62763, 62764, 62765, 62766, 62767, 62768, 62769, 62770, 62771, 62772, 62773, 62774, 62775, 62776, 62777, 62778, 62779, 62780, 62781, 62782, 62783, 62784, 62785, 62786, 62787, 62788, 62789, 62790, 62791, 62792, 62793, 62794, 62795, 62796, 62797, 62798, 62799, 62800, 62801, 62802, 62803, 62804, 62805, 62806, 62807, 62808, 62809, 62810, 62811, 62812, 62813, 62814, 62815, 62816, 62817, 62818, 62819, 62820, 62821, 62822, 62823, 62824, 62825, 62826, 62827, 62828, 62829, 62830, 62831, 62832, 62833, 62834, 62835, 62836, 62837, 62838, 62839, 62840, 62841, 62842, 62843, 62844, 62845, 62846, 62847, 62848, 62849, 62850, 62851, 62852, 62853, 62854, 62855, 62856, 62857, 62858, 62859, 62860, 62861, 62862, 62863, 62864, 62865, 62866, 62867, 62868, 62869, 62870, 62871, 62872, 62873, 62874, 62875, 62876, 62877, 62878, 62879, 62880, 62881, 62882, 62883, 62884, 62885, 62886, 62887, 62888, 62889, 62890, 62891, 62892, 62893, 62894, 62895, 62896, 62897, 62898, 62899, 62900, 62901, 62902, 62903, 62904, 62905, 62906, 62907, 62908, 62909, 62910, 62911, 62912, 62913, 62914, 62915, 62916, 62917, 62918, 62919, 62920, 62921, 62922, 62923, 62924, 62925, 62926, 62927, 62928, 62929, 62930, 62931, 62932, 62933, 62934, 62935, 62936, 62937, 62938, 62939, 62940, 62941, 62942, 62943, 62944, 62945, 62946, 62947, 62948, 62949, 62950, 62951, 62952, 62953, 62954, 62955, 62956, 62957, 62958, 62959, 62960, 62961, 62962, 62963, 62964, 62965, 62966, 62967, 62968, 62969, 62970, 62971, 62972, 62973, 62974, 62975, 62976, 62977, 62978, 62979, 62980, 62981, 62982, 62983, 62984, 62985, 62986, 62987, 62988, 62989, 62990, 62991, 62992, 62993, 62994, 62995, 62996, 62997, 62998, 62999, 63000, 63001, 63002, 63003, 63004, 63005, 63006, 63007, 63008, 63009, 63010, 63011, 63012, 63013, 63014, 63015, 63016, 63017, 63018, 63019, 63020, 63021, 63022, 63023, 63024, 63025, 63026, 63027, 63028, 63029, 63030, 63031, 63032, 63033, 63034, 63035, 63036, 63037, 63038, 63039, 63040, 63041, 63042, 63043, 63044, 63045, 63046, 63047, 63048, 63049, 63050, 63051, 63052, 63053, 63054, 63055, 63056, 63057, 63058, 63059, 63060, 63061, 63062, 63063, 63064, 63065, 63066, 63067, 63068, 63069, 63070, 63071, 63072, 63073, 63074, 63075, 63076, 63077, 63078, 63079, 63080, 63081, 63082, 63083, 63084, 63085, 63086, 63087, 63088, 63089, 63090, 63091, 63092, 63093, 63094, 63095, 63096, 63097, 63098, 63099, 63100, 63101, 63102, 63103, 63104, 63105, 63106, 63107, 63108, 63109, 63110, 63111, 63112, 63113, 63114, 63115, 63116, 63117, 63118, 63119, 63120, 63121, 63122, 63123, 63124, 63125, 63126, 63127, 63128, 63129, 63130, 63131, 63132, 63133, 63134, 63135, 63136, 63137, 63138, 63139, 63140, 63141, 63142, 63143, 63144, 63145, 63146, 63147, 63148, 63149, 63150, 63151, 63152, 63153, 63154, 63155, 63156, 63157, 63158, 63159, 63160, 63161, 63162, 63163, 63164, 63165, 63166, 63167, 63168, 63169, 63170, 63171, 63172, 63173, 63174, 63175, 63176, 63177, 63178, 63179, 63180, 63181, 63182, 63183, 63184, 63185, 63186, 63187, 63188, 63189, 63190, 63191, 63192, 63193, 63194, 63195, 63196, 63197, 63198, 63199, 63200, 63201, 63202, 63203, 63204, 63205, 63206, 63207, 63208, 63209, 63210, 63211, 63212, 63213, 63214, 63215, 63216, 63217, 63218, 63219, 63220, 63221, 63222, 63223, 63224, 63225, 63226, 63227, 63228, 63229, 63230, 63231, 63232, 63233, 63234, 63235, 63236, 63237, 63238, 63239, 63240, 63241, 63242, 63243, 63244, 63245, 63246, 63247, 63248, 63249, 63250, 63251, 63252, 63253, 63254, 63255, 63256, 63257, 63258, 63259, 63260, 63261, 63262, 63263, 63264, 63265, 63266, 63267, 63268, 63269, 63270, 63271, 63272, 63273, 63274, 63275, 63276, 63277, 63278, 63279, 63280, 63281, 63282, 63283, 63284, 63285, 63286, 63287, 63288, 63289, 63290, 63291, 63292, 63293, 63294, 63295, 63296, 63297, 63298, 63299, 63300, 63301, 63302, 63303, 63304, 63305, 63306, 63307, 63308, 63309, 63310, 63311, 63312, 63313, 63314, 63315, 63316, 63317, 63318, 63319, 63320, 63321, 63322, 63323, 63324, 63325, 63326, 63327, 63328, 63329, 63330, 63331, 63332, 63333, 63334, 63335, 63336, 63337, 63338, 63339, 63340, 63341, 63342, 63343, 63344, 63345, 63346, 63347, 63348, 63349, 63350, 63351, 63352, 63353, 63354, 63355, 63356, 63357, 63358, 63359, 63360, 63361, 63362, 63363, 63364, 63365, 63366, 63367, 63368, 63369, 63370, 63371, 63372, 63373, 63374, 63375, 63376, 63377, 63378, 63379, 63380, 63381, 63382, 63383, 63384, 63385, 63386, 63387, 63388, 63389, 63390, 63391, 63392, 63393, 63394, 63395, 63396, 63397, 63398, 63399, 63400, 63401, 63402, 63403, 63404, 63405, 63406, 63407, 63408, 63409, 63410, 63411, 63412, 63413, 63414, 63415, 63416, 63417, 63418, 63419, 63420, 63421, 63422, 63423, 63424, 63425, 63426, 63427, 63428, 63429, 63430, 63431, 63432, 63433, 63434, 63435, 63436, 63437, 63438, 63439, 63440, 63441, 63442, 63443, 63444, 63445, 63446, 63447, 63448, 63449, 63450, 63451, 63452, 63453, 63454, 63455, 63456, 63457, 63458, 63459, 63460, 63461, 63462, 63463, 63464, 63465, 63466, 63467, 63468, 63469, 63470, 63471, 63472, 63473, 63474, 63475, 63476, 63477, 63478, 63479, 63480, 63481, 63482, 63483, 63484, 63485, 63486, 63487, 63488, 63489, 63490, 63491, 63492, 63493, 63494, 63495, 63496, 63497, 63498, 63499, 63500, 63501, 63502, 63503, 63504, 63505, 63506, 63507, 63508, 63509, 63510, 63511, 63512, 63513, 63514, 63515, 63516, 63517, 63518, 63519, 63520, 63521, 63522, 63523, 63524, 63525, 63526, 63527, 63528, 63529, 63530, 63531, 63532, 63533, 63534, 63535, 63536, 63537, 63538, 63539, 63540, 63541, 63542, 63543, 63544, 63545, 63546, 63547, 63548, 63549, 63550, 63551, 63552, 63553, 63554, 63555, 63556, 63557, 63558, 63559, 63560, 63561, 63562, 63563, 63564, 63565, 63566, 63567, 63568, 63569, 63570, 63571, 63572, 63573, 63574, 63575, 63576, 63577, 63578, 63579, 63580, 63581, 63582, 63583, 63584, 63585, 63586, 63587, 63588, 63589, 63590, 63591, 63592, 63593, 63594, 63595, 63596, 63597, 63598, 63599, 63600, 63601, 63602, 63603, 63604, 63605, 63606, 63607, 63608, 63609, 63610, 63611, 63612, 63613, 63614, 63615, 63616, 63617, 63618, 63619, 63620, 63621, 63622, 63623, 63624, 63625, 63626, 63627, 63628, 63629, 63630, 63631, 63632, 63633, 63634, 63635, 63636, 63637, 63638, 63639, 63640, 63641, 63642, 63643, 63644, 63645, 63646, 63647, 63648, 63649, 63650, 63651, 63652, 63653, 63654, 63655, 63656, 63657, 63658, 63659, 63660, 63661, 63662, 63663, 63664, 63665, 63666, 63667, 63668, 63669, 63670, 63671, 63672, 63673, 63674, 63675, 63676, 63677, 63678, 63679, 63680, 63681, 63682, 63683, 63684, 63685, 63686, 63687, 63688, 63689, 63690, 63691, 63692, 63693, 63694, 63695, 63696, 63697, 63698, 63699, 63700, 63701, 63702, 63703, 63704, 63705, 63706, 63707, 63708, 63709, 63710, 63711, 63712, 63713, 63714, 63715, 63716, 63717, 63718, 63719, 63720, 63721, 63722, 63723, 63724, 63725, 63726, 63727, 63728, 63729, 63730, 63731, 63732, 63733, 63734, 63735, 63736, 63737, 63738, 63739, 63740, 63741, 63742, 63743, 63744, 63745, 63746, 63747, 63748, 63749, 63750, 63751, 63752, 63753, 63754, 63755, 63756, 63757, 63758, 63759, 63760, 63761, 63762, 63763, 63764, 63765, 63766, 63767, 63768, 63769, 63770, 63771, 63772, 63773, 63774, 63775, 63776, 63777, 63778, 63779, 63780, 63781, 63782, 63783, 63784, 63785, 63786, 63787, 63788, 63789, 63790, 63791, 63792, 63793, 63794, 63795, 63796, 63797, 63798, 63799, 63800, 63801, 63802, 63803, 63804, 63805, 63806, 63807, 63808, 63809, 63810, 63811, 63812, 63813, 63814, 63815, 63816, 63817, 63818, 63819, 63820, 63821, 63822, 63823, 63824, 63825, 63826, 63827, 63828, 63829, 63830, 63831, 63832, 63833, 63834, 63835, 63836, 63837, 63838, 63839, 63840, 63841, 63842, 63843, 63844, 63845, 63846, 63847, 63848, 63849, 63850, 63851, 63852, 63853, 63854, 63855, 63856, 63857, 63858, 63859, 63860, 63861, 63862, 63863, 63864, 63865, 63866, 63867, 63868, 63869, 63870, 63871, 63872, 63873, 63874, 63875, 63876, 63877, 63878, 63879, 63880, 63881, 63882, 63883, 63884, 63885, 63886, 63887, 63888, 63889, 63890, 63891, 63892, 63893, 63894, 63895, 63896, 63897, 63898, 63899, 63900, 63901, 63902, 63903, 63904, 63905, 63906, 63907, 63908, 63909, 63910, 63911, 63912, 63913, 63914, 63915, 63916, 63917, 63918, 63919, 63920, 63921, 63922, 63923, 63924, 63925, 63926, 63927, 63928, 63929, 63930, 63931, 63932, 63933, 63934, 63935, 63936, 63937, 63938, 63939, 63940, 63941, 63942, 63943, 63944, 63945, 63946, 63947, 63948, 63949, 63950, 63951, 63952, 63953, 63954, 63955, 63956, 63957, 63958, 63959, 63960, 63961, 63962, 63963, 63964, 63965, 63966, 63967, 63968, 63969, 63970, 63971, 63972, 63973, 63974, 63975, 63976, 63977, 63978, 63979, 63980, 63981, 63982, 63983, 63984, 63985, 63986, 63987, 63988, 63989, 63990, 63991, 63992, 63993, 63994, 63995, 63996, 63997, 63998, 63999, 64000, 64001, 64002, 64003, 64004, 64005, 64006, 64007, 64008, 64009, 64010, 64011, 64012, 64013, 64014, 64015, 64016, 64017, 64018, 64019, 64020, 64021, 64022, 64023, 64024, 64025, 64026, 64027, 64028, 64029, 64030, 64031, 64032, 64033, 64034, 64035, 64036, 64037, 64038, 64039, 64040, 64041, 64042, 64043, 64044, 64045, 64046, 64047, 64048, 64049, 64050, 64051, 64052, 64053, 64054, 64055, 64056, 64057, 64058, 64059, 64060, 64061, 64062, 64063, 64064, 64065, 64066, 64067, 64068, 64069, 64070, 64071, 64072, 64073, 64074, 64075, 64076, 64077, 64078, 64079, 64080, 64081, 64082, 64083, 64084, 64085, 64086, 64087, 64088, 64089, 64090, 64091, 64092, 64093, 64094, 64095, 64096, 64097, 64098, 64099, 64100, 64101, 64102, 64103, 64104, 64105, 64106, 64107, 64108, 64109, 64110, 64111, 64112, 64113, 64114, 64115, 64116, 64117, 64118, 64119, 64120, 64121, 64122, 64123, 64124, 64125, 64126, 64127, 64128, 64129, 64130, 64131, 64132, 64133, 64134, 64135, 64136, 64137, 64138, 64139, 64140, 64141, 64142, 64143, 64144, 64145, 64146, 64147, 64148, 64149, 64150, 64151, 64152, 64153, 64154, 64155, 64156, 64157, 64158, 64159, 64160, 64161, 64162, 64163, 64164, 64165, 64166, 64167, 64168, 64169, 64170, 64171, 64172, 64173, 64174, 64175, 64176, 64177, 64178, 64179, 64180, 64181, 64182, 64183, 64184, 64185, 64186, 64187, 64188, 64189, 64190, 64191, 64192, 64193, 64194, 64195, 64196, 64197, 64198, 64199, 64200, 64201, 64202, 64203, 64204, 64205, 64206, 64207, 64208, 64209, 64210, 64211, 64212, 64213, 64214, 64215, 64216, 64217, 64218, 64219, 64220, 64221, 64222, 64223, 64224, 64225, 64226, 64227, 64228, 64229, 64230, 64231, 64232, 64233, 64234, 64235, 64236, 64237, 64238, 64239, 64240, 64241, 64242, 64243, 64244, 64245, 64246, 64247, 64248, 64249, 64250, 64251, 64252, 64253, 64254, 64255, 64256, 64257, 64258, 64259, 64260, 64261, 64262, 64263, 64264, 64265, 64266, 64267, 64268, 64269, 64270, 64271, 64272, 64273, 64274, 64275, 64276, 64277, 64278, 64279, 64280, 64281, 64282, 64283, 64284, 64285, 64286, 64287, 64288, 64289, 64290, 64291, 64292, 64293, 64294, 64295, 64296, 64297, 64298, 64299, 64300, 64301, 64302, 64303, 64304, 64305, 64306, 64307, 64308, 64309, 64310, 64311, 64312, 64313, 64314, 64315, 64316, 64317, 64318, 64319, 64320, 64321, 64322, 64323, 64324, 64325, 64326, 64327, 64328, 64329, 64330, 64331, 64332, 64333, 64334, 64335, 64336, 64337, 64338, 64339, 64340, 64341, 64342, 64343, 64344, 64345, 64346, 64347, 64348, 64349, 64350, 64351, 64352, 64353, 64354, 64355, 64356, 64357, 64358, 64359, 64360, 64361, 64362, 64363, 64364, 64365, 64366, 64367, 64368, 64369, 64370, 64371, 64372, 64373, 64374, 64375, 64376, 64377, 64378, 64379, 64380, 64381, 64382, 64383, 64384, 64385, 64386, 64387, 64388, 64389, 64390, 64391, 64392, 64393, 64394, 64395, 64396, 64397, 64398, 64399, 64400, 64401, 64402, 64403, 64404, 64405, 64406, 64407, 64408, 64409, 64410, 64411, 64412, 64413, 64414, 64415, 64416, 64417, 64418, 64419, 64420, 64421, 64422, 64423, 64424, 64425, 64426, 64427, 64428, 64429, 64430, 64431, 64432, 64433, 64434, 64435, 64436, 64437, 64438, 64439, 64440, 64441, 64442, 64443, 64444, 64445, 64446, 64447, 64448, 64449, 64450, 64451, 64452, 64453, 64454, 64455, 64456, 64457, 64458, 64459, 64460, 64461, 64462, 64463, 64464, 64465, 64466, 64467, 64468, 64469, 64470, 64471, 64472, 64473, 64474, 64475, 64476, 64477, 64478, 64479, 64480, 64481, 64482, 64483, 64484, 64485, 64486, 64487, 64488, 64489, 64490, 64491, 64492, 64493, 64494, 64495, 64496, 64497, 64498, 64499, 64500, 64501, 64502, 64503, 64504, 64505, 64506, 64507, 64508, 64509, 64510, 64511, 64512, 64513, 64514, 64515, 64516, 64517, 64518, 64519, 64520, 64521, 64522, 64523, 64524, 64525, 64526, 64527, 64528, 64529, 64530, 64531, 64532, 64533, 64534, 64535, 64536, 64537, 64538, 64539, 64540, 64541, 64542, 64543, 64544, 64545, 64546, 64547, 64548, 64549, 64550, 64551, 64552, 64553, 64554, 64555, 64556, 64557, 64558, 64559, 64560, 64561, 64562, 64563, 64564, 64565, 64566, 64567, 64568, 64569, 64570, 64571, 64572, 64573, 64574, 64575, 64576, 64577, 64578, 64579, 64580, 64581, 64582, 64583, 64584, 64585, 64586, 64587, 64588, 64589, 64590, 64591, 64592, 64593, 64594, 64595, 64596, 64597, 64598, 64599, 64600, 64601, 64602, 64603, 64604, 64605, 64606, 64607, 64608, 64609, 64610, 64611, 64612, 64613, 64614, 64615, 64616, 64617, 64618, 64619, 64620, 64621, 64622, 64623, 64624, 64625, 64626, 64627, 64628, 64629, 64630, 64631, 64632, 64633, 64634, 64635, 64636, 64637, 64638, 64639, 64640, 64641, 64642, 64643, 64644, 64645, 64646, 64647, 64648, 64649, 64650, 64651, 64652, 64653, 64654, 64655, 64656, 64657, 64658, 64659, 64660, 64661, 64662, 64663, 64664, 64665, 64666, 64667, 64668, 64669, 64670, 64671, 64672, 64673, 64674, 64675, 64676, 64677, 64678, 64679, 64680, 64681, 64682, 64683, 64684, 64685, 64686, 64687, 64688, 64689, 64690, 64691, 64692, 64693, 64694, 64695, 64696, 64697, 64698, 64699, 64700, 64701, 64702, 64703, 64704, 64705, 64706, 64707, 64708, 64709, 64710, 64711, 64712, 64713, 64714, 64715, 64716, 64717, 64718, 64719, 64720, 64721, 64722, 64723, 64724, 64725, 64726, 64727, 64728, 64729, 64730, 64731, 64732, 64733, 64734, 64735, 64736, 64737, 64738, 64739, 64740, 64741, 64742, 64743, 64744, 64745, 64746, 64747, 64748, 64749, 64750, 64751, 64752, 64753, 64754, 64755, 64756, 64757, 64758, 64759, 64760, 64761, 64762, 64763, 64764, 64765, 64766, 64767, 64768, 64769, 64770, 64771, 64772, 64773, 64774, 64775, 64776, 64777, 64778, 64779, 64780, 64781, 64782, 64783, 64784, 64785, 64786, 64787, 64788, 64789, 64790, 64791, 64792, 64793, 64794, 64795, 64796, 64797, 64798, 64799, 64800, 64801, 64802, 64803, 64804, 64805, 64806, 64807, 64808, 64809, 64810, 64811, 64812, 64813, 64814, 64815, 64816, 64817, 64818, 64819, 64820, 64821, 64822, 64823, 64824, 64825, 64826, 64827, 64828, 64829, 64830, 64831, 64832, 64833, 64834, 64835, 64836, 64837, 64838, 64839, 64840, 64841, 64842, 64843, 64844, 64845, 64846, 64847, 64848, 64849, 64850, 64851, 64852, 64853, 64854, 64855, 64856, 64857, 64858, 64859, 64860, 64861, 64862, 64863, 64864, 64865, 64866, 64867, 64868, 64869, 64870, 64871, 64872, 64873, 64874, 64875, 64876, 64877, 64878, 64879, 64880, 64881, 64882, 64883, 64884, 64885, 64886, 64887, 64888, 64889, 64890, 64891, 64892, 64893, 64894, 64895, 64896, 64897, 64898, 64899, 64900, 64901, 64902, 64903, 64904, 64905, 64906, 64907, 64908, 64909, 64910, 64911, 64912, 64913, 64914, 64915, 64916, 64917, 64918, 64919, 64920, 64921, 64922, 64923, 64924, 64925, 64926, 64927, 64928, 64929, 64930, 64931, 64932, 64933, 64934, 64935, 64936, 64937, 64938, 64939, 64940, 64941, 64942, 64943, 64944, 64945, 64946, 64947, 64948, 64949, 64950, 64951, 64952, 64953, 64954, 64955, 64956, 64957, 64958, 64959, 64960, 64961, 64962, 64963, 64964, 64965, 64966, 64967, 64968, 64969, 64970, 64971, 64972, 64973, 64974, 64975, 64976, 64977, 64978, 64979, 64980, 64981, 64982, 64983, 64984, 64985, 64986, 64987, 64988, 64989, 64990, 64991, 64992, 64993, 64994, 64995, 64996, 64997, 64998, 64999, 65000, 65001, 65002, 65003, 65004, 65005, 65006, 65007, 65008, 65009, 65010, 65011, 65012, 65013, 65014, 65015, 65016, 65017, 65018, 65019, 65020, 65021, 65022, 65023, 65024, 65025, 65026, 65027, 65028, 65029, 65030, 65031, 65032, 65033, 65034, 65035, 65036, 65037, 65038, 65039, 65040, 65041, 65042, 65043, 65044, 65045, 65046, 65047, 65048, 65049, 65050, 65051, 65052, 65053, 65054, 65055, 65056, 65057, 65058, 65059, 65060, 65061, 65062, 65063, 65064, 65065, 65066, 65067, 65068, 65069, 65070, 65071, 65072, 65073, 65074, 65075, 65076, 65077, 65078, 65079, 65080, 65081, 65082, 65083, 65084, 65085, 65086, 65087, 65088, 65089, 65090, 65091, 65092, 65093, 65094, 65095, 65096, 65097, 65098, 65099, 65100, 65101, 65102, 65103, 65104, 65105, 65106, 65107, 65108, 65109, 65110, 65111, 65112, 65113, 65114, 65115, 65116, 65117, 65118, 65119, 65120, 65121, 65122, 65123, 65124, 65125, 65126, 65127, 65128, 65129, 65130, 65131, 65132, 65133, 65134, 65135, 65136, 65137, 65138, 65139, 65140, 65141, 65142, 65143, 65144, 65145, 65146, 65147, 65148, 65149, 65150, 65151, 65152, 65153, 65154, 65155, 65156, 65157, 65158, 65159, 65160, 65161, 65162, 65163, 65164, 65165, 65166, 65167, 65168, 65169, 65170, 65171, 65172, 65173, 65174, 65175, 65176, 65177, 65178, 65179, 65180, 65181, 65182, 65183, 65184, 65185, 65186, 65187, 65188, 65189, 65190, 65191, 65192, 65193, 65194, 65195, 65196, 65197, 65198, 65199, 65200, 65201, 65202, 65203, 65204, 65205, 65206, 65207, 65208, 65209, 65210, 65211, 65212, 65213, 65214, 65215, 65216, 65217, 65218, 65219, 65220, 65221, 65222, 65223, 65224, 65225, 65226, 65227, 65228, 65229, 65230, 65231, 65232, 65233, 65234, 65235, 65236, 65237, 65238, 65239, 65240, 65241, 65242, 65243, 65244, 65245, 65246, 65247, 65248, 65249, 65250, 65251, 65252, 65253, 65254, 65255, 65256, 65257, 65258, 65259, 65260, 65261, 65262, 65263, 65264, 65265, 65266, 65267, 65268, 65269, 65270, 65271, 65272, 65273, 65274, 65275, 65276, 65277, 65278, 65279, 65280, 65281, 65282, 65283, 65284, 65285, 65286, 65287, 65288, 65289, 65290, 65291, 65292, 65293, 65294, 65295, 65296, 65297, 65298, 65299, 65300, 65301, 65302, 65303, 65304, 65305, 65306, 65307, 65308, 65309, 65310, 65311, 65312, 65313, 65314, 65315, 65316, 65317, 65318, 65319, 65320, 65321, 65322, 65323, 65324, 65325, 65326, 65327, 65328, 65329, 65330, 65331, 65332, 65333, 65334, 65335, 65336, 65337, 65338, 65339, 65340, 65341, 65342, 65343, 65344, 65345, 65346, 65347, 65348, 65349, 65350, 65351, 65352, 65353, 65354, 65355, 65356, 65357, 65358, 65359, 65360, 65361, 65362, 65363, 65364, 65365, 65366, 65367, 65368, 65369, 65370, 65371, 65372, 65373, 65374, 65375, 65376, 65377, 65378, 65379, 65380, 65381, 65382, 65383, 65384, 65385, 65386, 65387, 65388, 65389, 65390, 65391, 65392, 65393, 65394, 65395, 65396, 65397, 65398, 65399, 65400, 65401, 65402, 65403, 65404, 65405, 65406, 65407, 65408, 65409, 65410, 65411, 65412, 65413, 65414, 65415, 65416, 65417, 65418, 65419, 65420, 65421, 65422, 65423, 65424, 65425, 65426, 65427, 65428, 65429, 65430, 65431, 65432, 65433, 65434, 65435, 65436, 65437, 65438, 65439, 65440, 65441, 65442, 65443, 65444, 65445, 65446, 65447, 65448, 65449, 65450, 65451, 65452, 65453, 65454, 65455, 65456, 65457, 65458, 65459, 65460, 65461, 65462, 65463, 65464, 65465, 65466, 65467, 65468, 65469, 65470, 65471, 65472, 65473, 65474, 65475, 65476, 65477, 65478, 65479, 65480, 65481, 65482, 65483, 65484, 65485, 65486, 65487, 65488, 65489, 65490, 65491, 65492, 65493, 65494, 65495, 65496, 65497, 65498, 65499, 65500, 65501, 65502, 65503, 65504, 65505, 65506, 65507, 65508, 65509, 65510, 65511, 65512, 65513, 65514, 65515, 65516, 65517, 65518, 65519, 65520, 65521, 65522, 65523, 65524, 65525, 65526, 65527, 65528, 65529, 65530, 65531, 65532, 65533, 65534, 65535, 65536, 65537, 65538, 65539, 65540, 65541, 65542, 65543, 65544, 65545, 65546, 65547, 65548, 65549, 65550, 65551, 65552, 65553, 65554, 65555, 65556, 65557, 65558, 65559, 65560, 65561, 65562, 65563, 65564, 65565, 65566, 65567, 65568, 65569, 65570, 65571, 65572, 65573, 65574, 65575, 65576, 65577, 65578, 65579, 65580, 65581, 65582, 65583, 65584, 65585, 65586, 65587, 65588, 65589, 65590, 65591, 65592, 65593, 65594, 65595, 65596, 65597, 65598, 65599, 65600, 65601, 65602, 65603, 65604, 65605, 65606, 65607, 65608, 65609, 65610, 65611, 65612, 65613, 65614, 65615, 65616, 65617, 65618, 65619, 65620, 65621, 65622, 65623, 65624, 65625, 65626, 65627, 65628, 65629, 65630, 65631, 65632, 65633, 65634, 65635, 65636, 65637, 65638, 65639, 65640, 65641, 65642, 65643, 65644, 65645, 65646, 65647, 65648, 65649, 65650, 65651, 65652, 65653, 65654, 65655, 65656, 65657, 65658, 65659, 65660, 65661, 65662, 65663, 65664, 65665, 65666, 65667, 65668, 65669, 65670, 65671, 65672, 65673, 65674, 65675, 65676, 65677, 65678, 65679, 65680, 65681, 65682, 65683, 65684, 65685, 65686, 65687, 65688, 65689, 65690, 65691, 65692, 65693, 65694, 65695, 65696, 65697, 65698, 65699, 65700, 65701, 65702, 65703, 65704, 65705, 65706, 65707, 65708, 65709, 65710, 65711, 65712, 65713, 65714, 65715, 65716, 65717, 65718, 65719, 65720, 65721, 65722, 65723, 65724, 65725, 65726, 65727, 65728, 65729, 65730, 65731, 65732, 65733, 65734, 65735, 65736, 65737, 65738, 65739, 65740, 65741, 65742, 65743, 65744, 65745, 65746, 65747, 65748, 65749, 65750, 65751, 65752, 65753, 65754, 65755, 65756, 65757, 65758, 65759, 65760, 65761, 65762, 65763, 65764, 65765, 65766, 65767, 65768, 65769, 65770, 65771, 65772, 65773, 65774, 65775, 65776, 65777, 65778, 65779, 65780, 65781, 65782, 65783, 65784, 65785, 65786, 65787, 65788, 65789, 65790, 65791, 65792, 65793, 65794, 65795, 65796, 65797, 65798, 65799, 65800, 65801, 65802, 65803, 65804, 65805, 65806, 65807, 65808, 65809, 65810, 65811, 65812, 65813, 65814, 65815, 65816, 65817, 65818, 65819, 65820, 65821, 65822, 65823, 65824, 65825, 65826, 65827, 65828, 65829, 65830, 65831, 65832, 65833, 65834, 65835, 65836, 65837, 65838, 65839, 65840, 65841, 65842, 65843, 65844, 65845, 65846, 65847, 65848, 65849, 65850, 65851, 65852, 65853, 65854, 65855, 65856, 65857, 65858, 65859, 65860, 65861, 65862, 65863, 65864, 65865, 65866, 65867, 65868, 65869, 65870, 65871, 65872, 65873, 65874, 65875, 65876, 65877, 65878, 65879, 65880, 65881, 65882, 65883, 65884, 65885, 65886, 65887, 65888, 65889, 65890, 65891, 65892, 65893, 65894, 65895, 65896, 65897, 65898, 65899, 65900, 65901, 65902, 65903, 65904, 65905, 65906, 65907, 65908, 65909, 65910, 65911, 65912, 65913, 65914, 65915, 65916, 65917, 65918, 65919, 65920, 65921, 65922, 65923, 65924, 65925, 65926, 65927, 65928, 65929, 65930, 65931, 65932, 65933, 65934, 65935, 65936, 65937, 65938, 65939, 65940, 65941, 65942, 65943, 65944, 65945, 65946, 65947, 65948, 65949, 65950, 65951, 65952, 65953, 65954, 65955, 65956, 65957, 65958, 65959, 65960, 65961, 65962, 65963, 65964, 65965, 65966, 65967, 65968, 65969, 65970, 65971, 65972, 65973, 65974, 65975, 65976, 65977, 65978, 65979, 65980, 65981, 65982, 65983, 65984, 65985, 65986, 65987, 65988, 65989, 65990, 65991, 65992, 65993, 65994, 65995, 65996, 65997, 65998, 65999, 66000, 66001, 66002, 66003, 66004, 66005, 66006, 66007, 66008, 66009, 66010, 66011, 66012, 66013, 66014, 66015, 66016, 66017, 66018, 66019, 66020, 66021, 66022, 66023, 66024, 66025, 66026, 66027, 66028, 66029, 66030, 66031, 66032, 66033, 66034, 66035, 66036, 66037, 66038, 66039, 66040, 66041, 66042, 66043, 66044, 66045, 66046, 66047, 66048, 66049, 66050, 66051, 66052, 66053, 66054, 66055, 66056, 66057, 66058, 66059, 66060, 66061, 66062, 66063, 66064, 66065, 66066, 66067, 66068, 66069, 66070, 66071, 66072, 66073, 66074, 66075, 66076, 66077, 66078, 66079, 66080, 66081, 66082, 66083, 66084, 66085, 66086, 66087, 66088, 66089, 66090, 66091, 66092, 66093, 66094, 66095, 66096, 66097, 66098, 66099, 66100, 66101, 66102, 66103, 66104, 66105, 66106, 66107, 66108, 66109, 66110, 66111, 66112, 66113, 66114, 66115, 66116, 66117, 66118, 66119, 66120, 66121, 66122, 66123, 66124, 66125, 66126, 66127, 66128, 66129, 66130, 66131, 66132, 66133, 66134, 66135, 66136, 66137, 66138, 66139, 66140, 66141, 66142, 66143, 66144, 66145, 66146, 66147, 66148, 66149, 66150, 66151, 66152, 66153, 66154, 66155, 66156, 66157, 66158, 66159, 66160, 66161, 66162, 66163, 66164, 66165, 66166, 66167, 66168, 66169, 66170, 66171, 66172, 66173, 66174, 66175, 66176, 66177, 66178, 66179, 66180, 66181, 66182, 66183, 66184, 66185, 66186, 66187, 66188, 66189, 66190, 66191, 66192, 66193, 66194, 66195, 66196, 66197, 66198, 66199, 66200, 66201, 66202, 66203, 66204, 66205, 66206, 66207, 66208, 66209, 66210, 66211, 66212, 66213, 66214, 66215, 66216, 66217, 66218, 66219, 66220, 66221, 66222, 66223, 66224, 66225, 66226, 66227, 66228, 66229, 66230, 66231, 66232, 66233, 66234, 66235, 66236, 66237, 66238, 66239, 66240, 66241, 66242, 66243, 66244, 66245, 66246, 66247, 66248, 66249, 66250, 66251, 66252, 66253, 66254, 66255, 66256, 66257, 66258, 66259, 66260, 66261, 66262, 66263, 66264, 66265, 66266, 66267, 66268, 66269, 66270, 66271, 66272, 66273, 66274, 66275, 66276, 66277, 66278, 66279, 66280, 66281, 66282, 66283, 66284, 66285, 66286, 66287, 66288, 66289, 66290, 66291, 66292, 66293, 66294, 66295, 66296, 66297, 66298, 66299, 66300, 66301, 66302, 66303, 66304, 66305, 66306, 66307, 66308, 66309, 66310, 66311, 66312, 66313, 66314, 66315, 66316, 66317, 66318, 66319, 66320, 66321, 66322, 66323, 66324, 66325, 66326, 66327, 66328, 66329, 66330, 66331, 66332, 66333, 66334, 66335, 66336, 66337, 66338, 66339, 66340, 66341, 66342, 66343, 66344, 66345, 66346, 66347, 66348, 66349, 66350, 66351, 66352, 66353, 66354, 66355, 66356, 66357, 66358, 66359, 66360, 66361, 66362, 66363, 66364, 66365, 66366, 66367, 66368, 66369, 66370, 66371, 66372, 66373, 66374, 66375, 66376, 66377, 66378, 66379, 66380, 66381, 66382, 66383, 66384, 66385, 66386, 66387, 66388, 66389, 66390, 66391, 66392, 66393, 66394, 66395, 66396, 66397, 66398, 66399, 66400, 66401, 66402, 66403, 66404, 66405, 66406, 66407, 66408, 66409, 66410, 66411, 66412, 66413, 66414, 66415, 66416, 66417, 66418, 66419, 66420, 66421, 66422, 66423, 66424, 66425, 66426, 66427, 66428, 66429, 66430, 66431, 66432, 66433, 66434, 66435, 66436, 66437, 66438, 66439, 66440, 66441, 66442, 66443, 66444, 66445, 66446, 66447, 66448, 66449, 66450, 66451, 66452, 66453, 66454, 66455, 66456, 66457, 66458, 66459, 66460, 66461, 66462, 66463, 66464, 66465, 66466, 66467, 66468, 66469, 66470, 66471, 66472, 66473, 66474, 66475, 66476, 66477, 66478, 66479, 66480, 66481, 66482, 66483, 66484, 66485, 66486, 66487, 66488, 66489, 66490, 66491, 66492, 66493, 66494, 66495, 66496, 66497, 66498, 66499, 66500, 66501, 66502, 66503, 66504, 66505, 66506, 66507, 66508, 66509, 66510, 66511, 66512, 66513, 66514, 66515, 66516, 66517, 66518, 66519, 66520, 66521, 66522, 66523, 66524, 66525, 66526, 66527, 66528, 66529, 66530, 66531, 66532, 66533, 66534, 66535, 66536, 66537, 66538, 66539, 66540, 66541, 66542, 66543, 66544, 66545, 66546, 66547, 66548, 66549, 66550, 66551, 66552, 66553, 66554, 66555, 66556, 66557, 66558, 66559, 66560, 66561, 66562, 66563, 66564, 66565, 66566, 66567, 66568, 66569, 66570, 66571, 66572, 66573, 66574, 66575, 66576, 66577, 66578, 66579, 66580, 66581, 66582, 66583, 66584, 66585, 66586, 66587, 66588, 66589, 66590, 66591, 66592, 66593, 66594, 66595, 66596, 66597, 66598, 66599, 66600, 66601, 66602, 66603, 66604, 66605, 66606, 66607, 66608, 66609, 66610, 66611, 66612, 66613, 66614, 66615, 66616, 66617, 66618, 66619, 66620, 66621, 66622, 66623, 66624, 66625, 66626, 66627, 66628, 66629, 66630, 66631, 66632, 66633, 66634, 66635, 66636, 66637, 66638, 66639, 66640, 66641, 66642, 66643, 66644, 66645, 66646, 66647, 66648, 66649, 66650, 66651, 66652, 66653, 66654, 66655, 66656, 66657, 66658, 66659, 66660, 66661, 66662, 66663, 66664, 66665, 66666, 66667, 66668, 66669, 66670, 66671, 66672, 66673, 66674, 66675, 66676, 66677, 66678, 66679, 66680, 66681, 66682, 66683, 66684, 66685, 66686, 66687, 66688, 66689, 66690, 66691, 66692, 66693, 66694, 66695, 66696, 66697, 66698, 66699, 66700, 66701, 66702, 66703, 66704, 66705, 66706, 66707, 66708, 66709, 66710, 66711, 66712, 66713, 66714, 66715, 66716, 66717, 66718, 66719, 66720, 66721, 66722, 66723, 66724, 66725, 66726, 66727, 66728, 66729, 66730, 66731, 66732, 66733, 66734, 66735, 66736, 66737, 66738, 66739, 66740, 66741, 66742, 66743, 66744, 66745, 66746, 66747, 66748, 66749, 66750, 66751, 66752, 66753, 66754, 66755, 66756, 66757, 66758, 66759, 66760, 66761, 66762, 66763, 66764, 66765, 66766, 66767, 66768, 66769, 66770, 66771, 66772, 66773, 66774, 66775, 66776, 66777, 66778, 66779, 66780, 66781, 66782, 66783, 66784, 66785, 66786, 66787, 66788, 66789, 66790, 66791, 66792, 66793, 66794, 66795, 66796, 66797, 66798, 66799, 66800, 66801, 66802, 66803, 66804, 66805, 66806, 66807, 66808, 66809, 66810, 66811, 66812, 66813, 66814, 66815, 66816, 66817, 66818, 66819, 66820, 66821, 66822, 66823, 66824, 66825, 66826, 66827, 66828, 66829, 66830, 66831, 66832, 66833, 66834, 66835, 66836, 66837, 66838, 66839, 66840, 66841, 66842, 66843, 66844, 66845, 66846, 66847, 66848, 66849, 66850, 66851, 66852, 66853, 66854, 66855, 66856, 66857, 66858, 66859, 66860, 66861, 66862, 66863, 66864, 66865, 66866, 66867, 66868, 66869, 66870, 66871, 66872, 66873, 66874, 66875, 66876, 66877, 66878, 66879, 66880, 66881, 66882, 66883, 66884, 66885, 66886, 66887, 66888, 66889, 66890, 66891, 66892, 66893, 66894, 66895, 66896, 66897, 66898, 66899, 66900, 66901, 66902, 66903, 66904, 66905, 66906, 66907, 66908, 66909, 66910, 66911, 66912, 66913, 66914, 66915, 66916, 66917, 66918, 66919, 66920, 66921, 66922, 66923, 66924, 66925, 66926, 66927, 66928, 66929, 66930, 66931, 66932, 66933, 66934, 66935, 66936, 66937, 66938, 66939, 66940, 66941, 66942, 66943, 66944, 66945, 66946, 66947, 66948, 66949, 66950, 66951, 66952, 66953, 66954, 66955, 66956, 66957, 66958, 66959, 66960, 66961, 66962, 66963, 66964, 66965, 66966, 66967, 66968, 66969, 66970, 66971, 66972, 66973, 66974, 66975, 66976, 66977, 66978, 66979, 66980, 66981, 66982, 66983, 66984, 66985, 66986, 66987, 66988, 66989, 66990, 66991, 66992, 66993, 66994, 66995, 66996, 66997, 66998, 66999, 67000, 67001, 67002, 67003, 67004, 67005, 67006, 67007, 67008, 67009, 67010, 67011, 67012, 67013, 67014, 67015, 67016, 67017, 67018, 67019, 67020, 67021, 67022, 67023, 67024, 67025, 67026, 67027, 67028, 67029, 67030, 67031, 67032, 67033, 67034, 67035, 67036, 67037, 67038, 67039, 67040, 67041, 67042, 67043, 67044, 67045, 67046, 67047, 67048, 67049, 67050, 67051, 67052, 67053, 67054, 67055, 67056, 67057, 67058, 67059, 67060, 67061, 67062, 67063, 67064, 67065, 67066, 67067, 67068, 67069, 67070, 67071, 67072, 67073, 67074, 67075, 67076, 67077, 67078, 67079, 67080, 67081, 67082, 67083, 67084, 67085, 67086, 67087, 67088, 67089, 67090, 67091, 67092, 67093, 67094, 67095, 67096, 67097, 67098, 67099, 67100, 67101, 67102, 67103, 67104, 67105, 67106, 67107, 67108, 67109, 67110, 67111, 67112, 67113, 67114, 67115, 67116, 67117, 67118, 67119, 67120, 67121, 67122, 67123, 67124, 67125, 67126, 67127, 67128, 67129, 67130, 67131, 67132, 67133, 67134, 67135, 67136, 67137, 67138, 67139, 67140, 67141, 67142, 67143, 67144, 67145, 67146, 67147, 67148, 67149, 67150, 67151, 67152, 67153, 67154, 67155, 67156, 67157, 67158, 67159, 67160, 67161, 67162, 67163, 67164, 67165, 67166, 67167, 67168, 67169, 67170, 67171, 67172, 67173, 67174, 67175, 67176, 67177, 67178, 67179, 67180, 67181, 67182, 67183, 67184, 67185, 67186, 67187, 67188, 67189, 67190, 67191, 67192, 67193, 67194, 67195, 67196, 67197, 67198, 67199, 67200, 67201, 67202, 67203, 67204, 67205, 67206, 67207, 67208, 67209, 67210, 67211, 67212, 67213, 67214, 67215, 67216, 67217, 67218, 67219, 67220, 67221, 67222, 67223, 67224, 67225, 67226, 67227, 67228, 67229, 67230, 67231, 67232, 67233, 67234, 67235, 67236, 67237, 67238, 67239, 67240, 67241, 67242, 67243, 67244, 67245, 67246, 67247, 67248, 67249, 67250, 67251, 67252, 67253, 67254, 67255, 67256, 67257, 67258, 67259, 67260, 67261, 67262, 67263, 67264, 67265, 67266, 67267, 67268, 67269, 67270, 67271, 67272, 67273, 67274, 67275, 67276, 67277, 67278, 67279, 67280, 67281, 67282, 67283, 67284, 67285, 67286, 67287, 67288, 67289, 67290, 67291, 67292, 67293, 67294, 67295, 67296, 67297, 67298, 67299, 67300, 67301, 67302, 67303, 67304, 67305, 67306, 67307, 67308, 67309, 67310, 67311, 67312, 67313, 67314, 67315, 67316, 67317, 67318, 67319, 67320, 67321, 67322, 67323, 67324, 67325, 67326, 67327, 67328, 67329, 67330, 67331, 67332, 67333, 67334, 67335, 67336, 67337, 67338, 67339, 67340, 67341, 67342, 67343, 67344, 67345, 67346, 67347, 67348, 67349, 67350, 67351, 67352, 67353, 67354, 67355, 67356, 67357, 67358, 67359, 67360, 67361, 67362, 67363, 67364, 67365, 67366, 67367, 67368, 67369, 67370, 67371, 67372, 67373, 67374, 67375, 67376, 67377, 67378, 67379, 67380, 67381, 67382, 67383, 67384, 67385, 67386, 67387, 67388, 67389, 67390, 67391, 67392, 67393, 67394, 67395, 67396, 67397, 67398, 67399, 67400, 67401, 67402, 67403, 67404, 67405, 67406, 67407, 67408, 67409, 67410, 67411, 67412, 67413, 67414, 67415, 67416, 67417, 67418, 67419, 67420, 67421, 67422, 67423, 67424, 67425, 67426, 67427, 67428, 67429, 67430, 67431, 67432, 67433, 67434, 67435, 67436, 67437, 67438, 67439, 67440, 67441, 67442, 67443, 67444, 67445, 67446, 67447, 67448, 67449, 67450, 67451, 67452, 67453, 67454, 67455, 67456, 67457, 67458, 67459, 67460, 67461, 67462, 67463, 67464, 67465, 67466, 67467, 67468, 67469, 67470, 67471, 67472, 67473, 67474, 67475, 67476, 67477, 67478, 67479, 67480, 67481, 67482, 67483, 67484, 67485, 67486, 67487, 67488, 67489, 67490, 67491, 67492, 67493, 67494, 67495, 67496, 67497, 67498, 67499, 67500, 67501, 67502, 67503, 67504, 67505, 67506, 67507, 67508, 67509, 67510, 67511, 67512, 67513, 67514, 67515, 67516, 67517, 67518, 67519, 67520, 67521, 67522, 67523, 67524, 67525, 67526, 67527, 67528, 67529, 67530, 67531, 67532, 67533, 67534, 67535, 67536, 67537, 67538, 67539, 67540, 67541, 67542, 67543, 67544, 67545, 67546, 67547, 67548, 67549, 67550, 67551, 67552, 67553, 67554, 67555, 67556, 67557, 67558, 67559, 67560, 67561, 67562, 67563, 67564, 67565, 67566, 67567, 67568, 67569, 67570, 67571, 67572, 67573, 67574, 67575, 67576, 67577, 67578, 67579, 67580, 67581, 67582, 67583, 67584, 67585, 67586, 67587, 67588, 67589, 67590, 67591, 67592, 67593, 67594, 67595, 67596, 67597, 67598, 67599, 67600, 67601, 67602, 67603, 67604, 67605, 67606, 67607, 67608, 67609, 67610, 67611, 67612, 67613, 67614, 67615, 67616, 67617, 67618, 67619, 67620, 67621, 67622, 67623, 67624, 67625, 67626, 67627, 67628, 67629, 67630, 67631, 67632, 67633, 67634, 67635, 67636, 67637, 67638, 67639, 67640, 67641, 67642, 67643, 67644, 67645, 67646, 67647, 67648, 67649, 67650, 67651, 67652, 67653, 67654, 67655, 67656, 67657, 67658, 67659, 67660, 67661, 67662, 67663, 67664, 67665, 67666, 67667, 67668, 67669, 67670, 67671, 67672, 67673, 67674, 67675, 67676, 67677, 67678, 67679, 67680, 67681, 67682, 67683, 67684, 67685, 67686, 67687, 67688, 67689, 67690, 67691, 67692, 67693, 67694, 67695, 67696, 67697, 67698, 67699, 67700, 67701, 67702, 67703, 67704, 67705, 67706, 67707, 67708, 67709, 67710, 67711, 67712, 67713, 67714, 67715, 67716, 67717, 67718, 67719, 67720, 67721, 67722, 67723, 67724, 67725, 67726, 67727, 67728, 67729, 67730, 67731, 67732, 67733, 67734, 67735, 67736, 67737, 67738, 67739, 67740, 67741, 67742, 67743, 67744, 67745, 67746, 67747, 67748, 67749, 67750, 67751, 67752, 67753, 67754, 67755, 67756, 67757, 67758, 67759, 67760, 67761, 67762, 67763, 67764, 67765, 67766, 67767, 67768, 67769, 67770, 67771, 67772, 67773, 67774, 67775, 67776, 67777, 67778, 67779, 67780, 67781, 67782, 67783, 67784, 67785, 67786, 67787, 67788, 67789, 67790, 67791, 67792, 67793, 67794, 67795, 67796, 67797, 67798, 67799, 67800, 67801, 67802, 67803, 67804, 67805, 67806, 67807, 67808, 67809, 67810, 67811, 67812, 67813, 67814, 67815, 67816, 67817, 67818, 67819, 67820, 67821, 67822, 67823, 67824, 67825, 67826, 67827, 67828, 67829, 67830, 67831, 67832, 67833, 67834, 67835, 67836, 67837, 67838, 67839, 67840, 67841, 67842, 67843, 67844, 67845, 67846, 67847, 67848, 67849, 67850, 67851, 67852, 67853, 67854, 67855, 67856, 67857, 67858, 67859, 67860, 67861, 67862, 67863, 67864, 67865, 67866, 67867, 67868, 67869, 67870, 67871, 67872, 67873, 67874, 67875, 67876, 67877, 67878, 67879, 67880, 67881, 67882, 67883, 67884, 67885, 67886, 67887, 67888, 67889, 67890, 67891, 67892, 67893, 67894, 67895, 67896, 67897, 67898, 67899, 67900, 67901, 67902, 67903, 67904, 67905, 67906, 67907, 67908, 67909, 67910, 67911, 67912, 67913, 67914, 67915, 67916, 67917, 67918, 67919, 67920, 67921, 67922, 67923, 67924, 67925, 67926, 67927, 67928, 67929, 67930, 67931, 67932, 67933, 67934, 67935, 67936, 67937, 67938, 67939, 67940, 67941, 67942, 67943, 67944, 67945, 67946, 67947, 67948, 67949, 67950, 67951, 67952, 67953, 67954, 67955, 67956, 67957, 67958, 67959, 67960, 67961, 67962, 67963, 67964, 67965, 67966, 67967, 67968, 67969, 67970, 67971, 67972, 67973, 67974, 67975, 67976, 67977, 67978, 67979, 67980, 67981, 67982, 67983, 67984, 67985, 67986, 67987, 67988, 67989, 67990, 67991, 67992, 67993, 67994, 67995, 67996, 67997, 67998, 67999, 68000, 68001, 68002, 68003, 68004, 68005, 68006, 68007, 68008, 68009, 68010, 68011, 68012, 68013, 68014, 68015, 68016, 68017, 68018, 68019, 68020, 68021, 68022, 68023, 68024, 68025, 68026, 68027, 68028, 68029, 68030, 68031, 68032, 68033, 68034, 68035, 68036, 68037, 68038, 68039, 68040, 68041, 68042, 68043, 68044, 68045, 68046, 68047, 68048, 68049, 68050, 68051, 68052, 68053, 68054, 68055, 68056, 68057, 68058, 68059, 68060, 68061, 68062, 68063, 68064, 68065, 68066, 68067, 68068, 68069, 68070, 68071, 68072, 68073, 68074, 68075, 68076, 68077, 68078, 68079, 68080, 68081, 68082, 68083, 68084, 68085, 68086, 68087, 68088, 68089, 68090, 68091, 68092, 68093, 68094, 68095, 68096, 68097, 68098, 68099, 68100, 68101, 68102, 68103, 68104, 68105, 68106, 68107, 68108, 68109, 68110, 68111, 68112, 68113, 68114, 68115, 68116, 68117, 68118, 68119, 68120, 68121, 68122, 68123, 68124, 68125, 68126, 68127, 68128, 68129, 68130, 68131, 68132, 68133, 68134, 68135, 68136, 68137, 68138, 68139, 68140, 68141, 68142, 68143, 68144, 68145, 68146, 68147, 68148, 68149, 68150, 68151, 68152, 68153, 68154, 68155, 68156, 68157, 68158, 68159, 68160, 68161, 68162, 68163, 68164, 68165, 68166, 68167, 68168, 68169, 68170, 68171, 68172, 68173, 68174, 68175, 68176, 68177, 68178, 68179, 68180, 68181, 68182, 68183, 68184, 68185, 68186, 68187, 68188, 68189, 68190, 68191, 68192, 68193, 68194, 68195, 68196, 68197, 68198, 68199, 68200, 68201, 68202, 68203, 68204, 68205, 68206, 68207, 68208, 68209, 68210, 68211, 68212, 68213, 68214, 68215, 68216, 68217, 68218, 68219, 68220, 68221, 68222, 68223, 68224, 68225, 68226, 68227, 68228, 68229, 68230, 68231, 68232, 68233, 68234, 68235, 68236, 68237, 68238, 68239, 68240, 68241, 68242, 68243, 68244, 68245, 68246, 68247, 68248, 68249, 68250, 68251, 68252, 68253, 68254, 68255, 68256, 68257, 68258, 68259, 68260, 68261, 68262, 68263, 68264, 68265, 68266, 68267, 68268, 68269, 68270, 68271, 68272, 68273, 68274, 68275, 68276, 68277, 68278, 68279, 68280, 68281, 68282, 68283, 68284, 68285, 68286, 68287, 68288, 68289, 68290, 68291, 68292, 68293, 68294, 68295, 68296, 68297, 68298, 68299, 68300, 68301, 68302, 68303, 68304, 68305, 68306, 68307, 68308, 68309, 68310, 68311, 68312, 68313, 68314, 68315, 68316, 68317, 68318, 68319, 68320, 68321, 68322, 68323, 68324, 68325, 68326, 68327, 68328, 68329, 68330, 68331, 68332, 68333, 68334, 68335, 68336, 68337, 68338, 68339, 68340, 68341, 68342, 68343, 68344, 68345, 68346, 68347, 68348, 68349, 68350, 68351, 68352, 68353, 68354, 68355, 68356, 68357, 68358, 68359, 68360, 68361, 68362, 68363, 68364, 68365, 68366, 68367, 68368, 68369, 68370, 68371, 68372, 68373, 68374, 68375, 68376, 68377, 68378, 68379, 68380, 68381, 68382, 68383, 68384, 68385, 68386, 68387, 68388, 68389, 68390, 68391, 68392, 68393, 68394, 68395, 68396, 68397, 68398, 68399, 68400, 68401, 68402, 68403, 68404, 68405, 68406, 68407, 68408, 68409, 68410, 68411, 68412, 68413, 68414, 68415, 68416, 68417, 68418, 68419, 68420, 68421, 68422, 68423, 68424, 68425, 68426, 68427, 68428, 68429, 68430, 68431, 68432, 68433, 68434, 68435, 68436, 68437, 68438, 68439, 68440, 68441, 68442, 68443, 68444, 68445, 68446, 68447, 68448, 68449, 68450, 68451, 68452, 68453, 68454, 68455, 68456, 68457, 68458, 68459, 68460, 68461, 68462, 68463, 68464, 68465, 68466, 68467, 68468, 68469, 68470, 68471, 68472, 68473, 68474, 68475, 68476, 68477, 68478, 68479, 68480, 68481, 68482, 68483, 68484, 68485, 68486, 68487, 68488, 68489, 68490, 68491, 68492, 68493, 68494, 68495, 68496, 68497, 68498, 68499, 68500, 68501, 68502, 68503, 68504, 68505, 68506, 68507, 68508, 68509, 68510, 68511, 68512, 68513, 68514, 68515, 68516, 68517, 68518, 68519, 68520, 68521, 68522, 68523, 68524, 68525, 68526, 68527, 68528, 68529, 68530, 68531, 68532, 68533, 68534, 68535, 68536, 68537, 68538, 68539, 68540, 68541, 68542, 68543, 68544, 68545, 68546, 68547, 68548, 68549, 68550, 68551, 68552, 68553, 68554, 68555, 68556, 68557, 68558, 68559, 68560, 68561, 68562, 68563, 68564, 68565, 68566, 68567, 68568, 68569, 68570, 68571, 68572, 68573, 68574, 68575, 68576, 68577, 68578, 68579, 68580, 68581, 68582, 68583, 68584, 68585, 68586, 68587, 68588, 68589, 68590, 68591, 68592, 68593, 68594, 68595, 68596, 68597, 68598, 68599, 68600, 68601, 68602, 68603, 68604, 68605, 68606, 68607, 68608, 68609, 68610, 68611, 68612, 68613, 68614, 68615, 68616, 68617, 68618, 68619, 68620, 68621, 68622, 68623, 68624, 68625, 68626, 68627, 68628, 68629, 68630, 68631, 68632, 68633, 68634, 68635, 68636, 68637, 68638, 68639, 68640, 68641, 68642, 68643, 68644, 68645, 68646, 68647, 68648, 68649, 68650, 68651, 68652, 68653, 68654, 68655, 68656, 68657, 68658, 68659, 68660, 68661, 68662, 68663, 68664, 68665, 68666, 68667, 68668, 68669, 68670, 68671, 68672, 68673, 68674, 68675, 68676, 68677, 68678, 68679, 68680, 68681, 68682, 68683, 68684, 68685, 68686, 68687, 68688, 68689, 68690, 68691, 68692, 68693, 68694, 68695, 68696, 68697, 68698, 68699, 68700, 68701, 68702, 68703, 68704, 68705, 68706, 68707, 68708, 68709, 68710, 68711, 68712, 68713, 68714, 68715, 68716, 68717, 68718, 68719, 68720, 68721, 68722, 68723, 68724, 68725, 68726, 68727, 68728, 68729, 68730, 68731, 68732, 68733, 68734, 68735, 68736, 68737, 68738, 68739, 68740, 68741, 68742, 68743, 68744, 68745, 68746, 68747, 68748, 68749, 68750, 68751, 68752, 68753, 68754, 68755, 68756, 68757, 68758, 68759, 68760, 68761, 68762, 68763, 68764, 68765, 68766, 68767, 68768, 68769, 68770, 68771, 68772, 68773, 68774, 68775, 68776, 68777, 68778, 68779, 68780, 68781, 68782, 68783, 68784, 68785, 68786, 68787, 68788, 68789, 68790, 68791, 68792, 68793, 68794, 68795, 68796, 68797, 68798, 68799, 68800, 68801, 68802, 68803, 68804, 68805, 68806, 68807, 68808, 68809, 68810, 68811, 68812, 68813, 68814, 68815, 68816, 68817, 68818, 68819, 68820, 68821, 68822, 68823, 68824, 68825, 68826, 68827, 68828, 68829, 68830, 68831, 68832, 68833, 68834, 68835, 68836, 68837, 68838, 68839, 68840, 68841, 68842, 68843, 68844, 68845, 68846, 68847, 68848, 68849, 68850, 68851, 68852, 68853, 68854, 68855, 68856, 68857, 68858, 68859, 68860, 68861, 68862, 68863, 68864, 68865, 68866, 68867, 68868, 68869, 68870, 68871, 68872, 68873, 68874, 68875, 68876, 68877, 68878, 68879, 68880, 68881, 68882, 68883, 68884, 68885, 68886, 68887, 68888, 68889, 68890, 68891, 68892, 68893, 68894, 68895, 68896, 68897, 68898, 68899, 68900, 68901, 68902, 68903, 68904, 68905, 68906, 68907, 68908, 68909, 68910, 68911, 68912, 68913, 68914, 68915, 68916, 68917, 68918, 68919, 68920, 68921, 68922, 68923, 68924, 68925, 68926, 68927, 68928, 68929, 68930, 68931, 68932, 68933, 68934, 68935, 68936, 68937, 68938, 68939, 68940, 68941, 68942, 68943, 68944, 68945, 68946, 68947, 68948, 68949, 68950, 68951, 68952, 68953, 68954, 68955, 68956, 68957, 68958, 68959, 68960, 68961, 68962, 68963, 68964, 68965, 68966, 68967, 68968, 68969, 68970, 68971, 68972, 68973, 68974, 68975, 68976, 68977, 68978, 68979, 68980, 68981, 68982, 68983, 68984, 68985, 68986, 68987, 68988, 68989, 68990, 68991, 68992, 68993, 68994, 68995, 68996, 68997, 68998, 68999, 69000, 69001, 69002, 69003, 69004, 69005, 69006, 69007, 69008, 69009, 69010, 69011, 69012, 69013, 69014, 69015, 69016, 69017, 69018, 69019, 69020, 69021, 69022, 69023, 69024, 69025, 69026, 69027, 69028, 69029, 69030, 69031, 69032, 69033, 69034, 69035, 69036, 69037, 69038, 69039, 69040, 69041, 69042, 69043, 69044, 69045, 69046, 69047, 69048, 69049, 69050, 69051, 69052, 69053, 69054, 69055, 69056, 69057, 69058, 69059, 69060, 69061, 69062, 69063, 69064, 69065, 69066, 69067, 69068, 69069, 69070, 69071, 69072, 69073, 69074, 69075, 69076, 69077, 69078, 69079, 69080, 69081, 69082, 69083, 69084, 69085, 69086, 69087, 69088, 69089, 69090, 69091, 69092, 69093, 69094, 69095, 69096, 69097, 69098, 69099, 69100, 69101, 69102, 69103, 69104, 69105, 69106, 69107, 69108, 69109, 69110, 69111, 69112, 69113, 69114, 69115, 69116, 69117, 69118, 69119, 69120, 69121, 69122, 69123, 69124, 69125, 69126, 69127, 69128, 69129, 69130, 69131, 69132, 69133, 69134, 69135, 69136, 69137, 69138, 69139, 69140, 69141, 69142, 69143, 69144, 69145, 69146, 69147, 69148, 69149, 69150, 69151, 69152, 69153, 69154, 69155, 69156, 69157, 69158, 69159, 69160, 69161, 69162, 69163, 69164, 69165, 69166, 69167, 69168, 69169, 69170, 69171, 69172, 69173, 69174, 69175, 69176, 69177, 69178, 69179, 69180, 69181, 69182, 69183, 69184, 69185, 69186, 69187, 69188, 69189, 69190, 69191, 69192, 69193, 69194, 69195, 69196, 69197, 69198, 69199, 69200, 69201, 69202, 69203, 69204, 69205, 69206, 69207, 69208, 69209, 69210, 69211, 69212, 69213, 69214, 69215, 69216, 69217, 69218, 69219, 69220, 69221, 69222, 69223, 69224, 69225, 69226, 69227, 69228, 69229, 69230, 69231, 69232, 69233, 69234, 69235, 69236, 69237, 69238, 69239, 69240, 69241, 69242, 69243, 69244, 69245, 69246, 69247, 69248, 69249, 69250, 69251, 69252, 69253, 69254, 69255, 69256, 69257, 69258, 69259, 69260, 69261, 69262, 69263, 69264, 69265, 69266, 69267, 69268, 69269, 69270, 69271, 69272, 69273, 69274, 69275, 69276, 69277, 69278, 69279, 69280, 69281, 69282, 69283, 69284, 69285, 69286, 69287, 69288, 69289, 69290, 69291, 69292, 69293, 69294, 69295, 69296, 69297, 69298, 69299, 69300, 69301, 69302, 69303, 69304, 69305, 69306, 69307, 69308, 69309, 69310, 69311, 69312, 69313, 69314, 69315, 69316, 69317, 69318, 69319, 69320, 69321, 69322, 69323, 69324, 69325, 69326, 69327, 69328, 69329, 69330, 69331, 69332, 69333, 69334, 69335, 69336, 69337, 69338, 69339, 69340, 69341, 69342, 69343, 69344, 69345, 69346, 69347, 69348, 69349, 69350, 69351, 69352, 69353, 69354, 69355, 69356, 69357, 69358, 69359, 69360, 69361, 69362, 69363, 69364, 69365, 69366, 69367, 69368, 69369, 69370, 69371, 69372, 69373, 69374, 69375, 69376, 69377, 69378, 69379, 69380, 69381, 69382, 69383, 69384, 69385, 69386, 69387, 69388, 69389, 69390, 69391, 69392, 69393, 69394, 69395, 69396, 69397, 69398, 69399, 69400, 69401, 69402, 69403, 69404, 69405, 69406, 69407, 69408, 69409, 69410, 69411, 69412, 69413, 69414, 69415, 69416, 69417, 69418, 69419, 69420, 69421, 69422, 69423, 69424, 69425, 69426, 69427, 69428, 69429, 69430, 69431, 69432, 69433, 69434, 69435, 69436, 69437, 69438, 69439, 69440, 69441, 69442, 69443, 69444, 69445, 69446, 69447, 69448, 69449, 69450, 69451, 69452, 69453, 69454, 69455, 69456, 69457, 69458, 69459, 69460, 69461, 69462, 69463, 69464, 69465, 69466, 69467, 69468, 69469, 69470, 69471, 69472, 69473, 69474, 69475, 69476, 69477, 69478, 69479, 69480, 69481, 69482, 69483, 69484, 69485, 69486, 69487, 69488, 69489, 69490, 69491, 69492, 69493, 69494, 69495, 69496, 69497, 69498, 69499, 69500, 69501, 69502, 69503, 69504, 69505, 69506, 69507, 69508, 69509, 69510, 69511, 69512, 69513, 69514, 69515, 69516, 69517, 69518, 69519, 69520, 69521, 69522, 69523, 69524, 69525, 69526, 69527, 69528, 69529, 69530, 69531, 69532, 69533, 69534, 69535, 69536, 69537, 69538, 69539, 69540, 69541, 69542, 69543, 69544, 69545, 69546, 69547, 69548, 69549, 69550, 69551, 69552, 69553, 69554, 69555, 69556, 69557, 69558, 69559, 69560, 69561, 69562, 69563, 69564, 69565, 69566, 69567, 69568, 69569, 69570, 69571, 69572, 69573, 69574, 69575, 69576, 69577, 69578, 69579, 69580, 69581, 69582, 69583, 69584, 69585, 69586, 69587, 69588, 69589, 69590, 69591, 69592, 69593, 69594, 69595, 69596, 69597, 69598, 69599, 69600, 69601, 69602, 69603, 69604, 69605, 69606, 69607, 69608, 69609, 69610, 69611, 69612, 69613, 69614, 69615, 69616, 69617, 69618, 69619, 69620, 69621, 69622, 69623, 69624, 69625, 69626, 69627, 69628, 69629, 69630, 69631, 69632, 69633, 69634, 69635, 69636, 69637, 69638, 69639, 69640, 69641, 69642, 69643, 69644, 69645, 69646, 69647, 69648, 69649, 69650, 69651, 69652, 69653, 69654, 69655, 69656, 69657, 69658, 69659, 69660, 69661, 69662, 69663, 69664, 69665, 69666, 69667, 69668, 69669, 69670, 69671, 69672, 69673, 69674, 69675, 69676, 69677, 69678, 69679, 69680, 69681, 69682, 69683, 69684, 69685, 69686, 69687, 69688, 69689, 69690, 69691, 69692, 69693, 69694, 69695, 69696, 69697, 69698, 69699, 69700, 69701, 69702, 69703, 69704, 69705, 69706, 69707, 69708, 69709, 69710, 69711, 69712, 69713, 69714, 69715, 69716, 69717, 69718, 69719, 69720, 69721, 69722, 69723, 69724, 69725, 69726, 69727, 69728, 69729, 69730, 69731, 69732, 69733, 69734, 69735, 69736, 69737, 69738, 69739, 69740, 69741, 69742, 69743, 69744, 69745, 69746, 69747, 69748, 69749, 69750, 69751, 69752, 69753, 69754, 69755, 69756, 69757, 69758, 69759, 69760, 69761, 69762, 69763, 69764, 69765, 69766, 69767, 69768, 69769, 69770, 69771, 69772, 69773, 69774, 69775, 69776, 69777, 69778, 69779, 69780, 69781, 69782, 69783, 69784, 69785, 69786, 69787, 69788, 69789, 69790, 69791, 69792, 69793, 69794, 69795, 69796, 69797, 69798, 69799, 69800, 69801, 69802, 69803, 69804, 69805, 69806, 69807, 69808, 69809, 69810, 69811, 69812, 69813, 69814, 69815, 69816, 69817, 69818, 69819, 69820, 69821, 69822, 69823, 69824, 69825, 69826, 69827, 69828, 69829, 69830, 69831, 69832, 69833, 69834, 69835, 69836, 69837, 69838, 69839, 69840, 69841, 69842, 69843, 69844, 69845, 69846, 69847, 69848, 69849, 69850, 69851, 69852, 69853, 69854, 69855, 69856, 69857, 69858, 69859, 69860, 69861, 69862, 69863, 69864, 69865, 69866, 69867, 69868, 69869, 69870, 69871, 69872, 69873, 69874, 69875, 69876, 69877, 69878, 69879, 69880, 69881, 69882, 69883, 69884, 69885, 69886, 69887, 69888, 69889, 69890, 69891, 69892, 69893, 69894, 69895, 69896, 69897, 69898, 69899, 69900, 69901, 69902, 69903, 69904, 69905, 69906, 69907, 69908, 69909, 69910, 69911, 69912, 69913, 69914, 69915, 69916, 69917, 69918, 69919, 69920, 69921, 69922, 69923, 69924, 69925, 69926, 69927, 69928, 69929, 69930, 69931, 69932, 69933, 69934, 69935, 69936, 69937, 69938, 69939, 69940, 69941, 69942, 69943, 69944, 69945, 69946, 69947, 69948, 69949, 69950, 69951, 69952, 69953, 69954, 69955, 69956, 69957, 69958, 69959, 69960, 69961, 69962, 69963, 69964, 69965, 69966, 69967, 69968, 69969, 69970, 69971, 69972, 69973, 69974, 69975, 69976, 69977, 69978, 69979, 69980, 69981, 69982, 69983, 69984, 69985, 69986, 69987, 69988, 69989, 69990, 69991, 69992, 69993, 69994, 69995, 69996, 69997, 69998, 69999, 70000, 70001, 70002, 70003, 70004, 70005, 70006, 70007, 70008, 70009, 70010, 70011, 70012, 70013, 70014, 70015, 70016, 70017, 70018, 70019, 70020, 70021, 70022, 70023, 70024, 70025, 70026, 70027, 70028, 70029, 70030, 70031, 70032, 70033, 70034, 70035, 70036, 70037, 70038, 70039, 70040, 70041, 70042, 70043, 70044, 70045, 70046, 70047, 70048, 70049, 70050, 70051, 70052, 70053, 70054, 70055, 70056, 70057, 70058, 70059, 70060, 70061, 70062, 70063, 70064, 70065, 70066, 70067, 70068, 70069, 70070, 70071, 70072, 70073, 70074, 70075, 70076, 70077, 70078, 70079, 70080, 70081, 70082, 70083, 70084, 70085, 70086, 70087, 70088, 70089, 70090, 70091, 70092, 70093, 70094, 70095, 70096, 70097, 70098, 70099, 70100, 70101, 70102, 70103, 70104, 70105, 70106, 70107, 70108, 70109, 70110, 70111, 70112, 70113, 70114, 70115, 70116, 70117, 70118, 70119, 70120, 70121, 70122, 70123, 70124, 70125, 70126, 70127, 70128, 70129, 70130, 70131, 70132, 70133, 70134, 70135, 70136, 70137, 70138, 70139, 70140, 70141, 70142, 70143, 70144, 70145, 70146, 70147, 70148, 70149, 70150, 70151, 70152, 70153, 70154, 70155, 70156, 70157, 70158, 70159, 70160, 70161, 70162, 70163, 70164, 70165, 70166, 70167, 70168, 70169, 70170, 70171, 70172, 70173, 70174, 70175, 70176, 70177, 70178, 70179, 70180, 70181, 70182, 70183, 70184, 70185, 70186, 70187, 70188, 70189, 70190, 70191, 70192, 70193, 70194, 70195, 70196, 70197, 70198, 70199, 70200, 70201, 70202, 70203, 70204, 70205, 70206, 70207, 70208, 70209, 70210, 70211, 70212, 70213, 70214, 70215, 70216, 70217, 70218, 70219, 70220, 70221, 70222, 70223, 70224, 70225, 70226, 70227, 70228, 70229, 70230, 70231, 70232, 70233, 70234, 70235, 70236, 70237, 70238, 70239, 70240, 70241, 70242, 70243, 70244, 70245, 70246, 70247, 70248, 70249, 70250, 70251, 70252, 70253, 70254, 70255, 70256, 70257, 70258, 70259, 70260, 70261, 70262, 70263, 70264, 70265, 70266, 70267, 70268, 70269, 70270, 70271, 70272, 70273, 70274, 70275, 70276, 70277, 70278, 70279, 70280, 70281, 70282, 70283, 70284, 70285, 70286, 70287, 70288, 70289, 70290, 70291, 70292, 70293, 70294, 70295, 70296, 70297, 70298, 70299, 70300, 70301, 70302, 70303, 70304, 70305, 70306, 70307, 70308, 70309, 70310, 70311, 70312, 70313, 70314, 70315, 70316, 70317, 70318, 70319, 70320, 70321, 70322, 70323, 70324, 70325, 70326, 70327, 70328, 70329, 70330, 70331, 70332, 70333, 70334, 70335, 70336, 70337, 70338, 70339, 70340, 70341, 70342, 70343, 70344, 70345, 70346, 70347, 70348, 70349, 70350, 70351, 70352, 70353, 70354, 70355, 70356, 70357, 70358, 70359, 70360, 70361, 70362, 70363, 70364, 70365, 70366, 70367, 70368, 70369, 70370, 70371, 70372, 70373, 70374, 70375, 70376, 70377, 70378, 70379, 70380, 70381, 70382, 70383, 70384, 70385, 70386, 70387, 70388, 70389, 70390, 70391, 70392, 70393, 70394, 70395, 70396, 70397, 70398, 70399, 70400, 70401, 70402, 70403, 70404, 70405, 70406, 70407, 70408, 70409, 70410, 70411, 70412, 70413, 70414, 70415, 70416, 70417, 70418, 70419, 70420, 70421, 70422, 70423, 70424, 70425, 70426, 70427, 70428, 70429, 70430, 70431, 70432, 70433, 70434, 70435, 70436, 70437, 70438, 70439, 70440, 70441, 70442, 70443, 70444, 70445, 70446, 70447, 70448, 70449, 70450, 70451, 70452, 70453, 70454, 70455, 70456, 70457, 70458, 70459, 70460, 70461, 70462, 70463, 70464, 70465, 70466, 70467, 70468, 70469, 70470, 70471, 70472, 70473, 70474, 70475, 70476, 70477, 70478, 70479, 70480, 70481, 70482, 70483, 70484, 70485, 70486, 70487, 70488, 70489, 70490, 70491, 70492, 70493, 70494, 70495, 70496, 70497, 70498, 70499, 70500, 70501, 70502, 70503, 70504, 70505, 70506, 70507, 70508, 70509, 70510, 70511, 70512, 70513, 70514, 70515, 70516, 70517, 70518, 70519, 70520, 70521, 70522, 70523, 70524, 70525, 70526, 70527, 70528, 70529, 70530, 70531, 70532, 70533, 70534, 70535, 70536, 70537, 70538, 70539, 70540, 70541, 70542, 70543, 70544, 70545, 70546, 70547, 70548, 70549, 70550, 70551, 70552, 70553, 70554, 70555, 70556, 70557, 70558, 70559, 70560, 70561, 70562, 70563, 70564, 70565, 70566, 70567, 70568, 70569, 70570, 70571, 70572, 70573, 70574, 70575, 70576, 70577, 70578, 70579, 70580, 70581, 70582, 70583, 70584, 70585, 70586, 70587, 70588, 70589, 70590, 70591, 70592, 70593, 70594, 70595, 70596, 70597, 70598, 70599, 70600, 70601, 70602, 70603, 70604, 70605, 70606, 70607, 70608, 70609, 70610, 70611, 70612, 70613, 70614, 70615, 70616, 70617, 70618, 70619, 70620, 70621, 70622, 70623, 70624, 70625, 70626, 70627, 70628, 70629, 70630, 70631, 70632, 70633, 70634, 70635, 70636, 70637, 70638, 70639, 70640, 70641, 70642, 70643, 70644, 70645, 70646, 70647, 70648, 70649, 70650, 70651, 70652, 70653, 70654, 70655, 70656, 70657, 70658, 70659, 70660, 70661, 70662, 70663, 70664, 70665, 70666, 70667, 70668, 70669, 70670, 70671, 70672, 70673, 70674, 70675, 70676, 70677, 70678, 70679, 70680, 70681, 70682, 70683, 70684, 70685, 70686, 70687, 70688, 70689, 70690, 70691, 70692, 70693, 70694, 70695, 70696, 70697, 70698, 70699, 70700, 70701, 70702, 70703, 70704, 70705, 70706, 70707, 70708, 70709, 70710, 70711, 70712, 70713, 70714, 70715, 70716, 70717, 70718, 70719, 70720, 70721, 70722, 70723, 70724, 70725, 70726, 70727, 70728, 70729, 70730, 70731, 70732, 70733, 70734, 70735, 70736, 70737, 70738, 70739, 70740, 70741, 70742, 70743, 70744, 70745, 70746, 70747, 70748, 70749, 70750, 70751, 70752, 70753, 70754, 70755, 70756, 70757, 70758, 70759, 70760, 70761, 70762, 70763, 70764, 70765, 70766, 70767, 70768, 70769, 70770, 70771, 70772, 70773, 70774, 70775, 70776, 70777, 70778, 70779, 70780, 70781, 70782, 70783, 70784, 70785, 70786, 70787, 70788, 70789, 70790, 70791, 70792, 70793, 70794, 70795, 70796, 70797, 70798, 70799, 70800, 70801, 70802, 70803, 70804, 70805, 70806, 70807, 70808, 70809, 70810, 70811, 70812, 70813, 70814, 70815, 70816, 70817, 70818, 70819, 70820, 70821, 70822, 70823, 70824, 70825, 70826, 70827, 70828, 70829, 70830, 70831, 70832, 70833, 70834, 70835, 70836, 70837, 70838, 70839, 70840, 70841, 70842, 70843, 70844, 70845, 70846, 70847, 70848, 70849, 70850, 70851, 70852, 70853, 70854, 70855, 70856, 70857, 70858, 70859, 70860, 70861, 70862, 70863, 70864, 70865, 70866, 70867, 70868, 70869, 70870, 70871, 70872, 70873, 70874, 70875, 70876, 70877, 70878, 70879, 70880, 70881, 70882, 70883, 70884, 70885, 70886, 70887, 70888, 70889, 70890, 70891, 70892, 70893, 70894, 70895, 70896, 70897, 70898, 70899, 70900, 70901, 70902, 70903, 70904, 70905, 70906, 70907, 70908, 70909, 70910, 70911, 70912, 70913, 70914, 70915, 70916, 70917, 70918, 70919, 70920, 70921, 70922, 70923, 70924, 70925, 70926, 70927, 70928, 70929, 70930, 70931, 70932, 70933, 70934, 70935, 70936, 70937, 70938, 70939, 70940, 70941, 70942, 70943, 70944, 70945, 70946, 70947, 70948, 70949, 70950, 70951, 70952, 70953, 70954, 70955, 70956, 70957, 70958, 70959, 70960, 70961, 70962, 70963, 70964, 70965, 70966, 70967, 70968, 70969, 70970, 70971, 70972, 70973, 70974, 70975, 70976, 70977, 70978, 70979, 70980, 70981, 70982, 70983, 70984, 70985, 70986, 70987, 70988, 70989, 70990, 70991, 70992, 70993, 70994, 70995, 70996, 70997, 70998, 70999, 71000, 71001, 71002, 71003, 71004, 71005. The term “identity” as known in the art, refers to a relationship between the sequences of two or more peptides, as determined by comparing the sequences. In the art, identity also means the degree of sequence relatedness between peptides, as determined by the number of matches between strings of two or more amino acid residues. Identity measures the percent of identical matches between the smaller of two or more sequences with gap alignments (if any) addressed by a particular mathematical model or computer program (i.e., “algorithms”). Identity of related peptides can be readily calculated by known methods. Such methods include, but are not limited to, those described in Computational Molecular Biology, Lesk, A. M., ed., Oxford University Press, New York, 1988; Biocomputing: Informatics and Genome Projects, Smith, D. W., ed., Academic Press, New York, 1993; Computer Analysis of Sequence Data, Part 1, Griffin, A. M., and Griffin, H. G., eds., Humana Press, New Jersey, 1994; Sequence Analysis in Molecular Biology, von Heinje, G., Academic Press, 1987; Sequence Analysis Primer, Gribskov, M. and Devereux, J., eds., M. Stockton Press, New York, 1991; and Carillo et al., SIAM J. Applied Math. 48, 1073 (1988).

[0091] In some embodiments, the polypeptide variant may have the same or a similar activity as the reference polypeptide. Alternatively, the variant may have an altered activity (e.g., increased or decreased) relative to a reference polypeptide. Generally, variants of a particular polynucleotide or polypeptide of the invention will have at least about 40%, 45%, 50%, 55%, 60%, 65%, 70%, 75%, 80%, 85%, 90%, 91%, 92%, 93%, 94%, 95%, 96%, 97%, 98%, 99% but less than 100% sequence identity to that particular reference polynucleotide or polypeptide as determined by sequence alignment programs and parameters described herein and known to those skilled in the art. Such tools for alignment include those of the BLAST suite (Stephen F. Altschul, Thomas L. Madden, Alejandro A. Schäffer, Jinghui Zhang, Zheng Zhang, Webb Miller, and David J. Lipman (1997), “Gapped BLAST and PSI-BLAST: a new generation of protein database search programs”, Nucleic Acids Res. 25:3389-3402.) Other tools are described herein, specifically in the definition of “Identity.”

[0092] Default parameters in the BLAST algorithm include, for example, an expect threshold of 10, Word size of 28, Match/Mismatch Scores 1, −2, Gap costs Linear. Any filter can be applied as well as a selection for species specific repeats, e.g., Homo sapiens.

### Biologics

[0093] The polynucleotides, primary constructs or mmRNA disclosed herein, may encode one or more biologics. As used herein, a “biologic” is a polypeptide-based molecule produced by the methods provided herein and which may be used to treat, cure, mitigate, prevent, or diagnose a serious or life-threatening disease or medical condition. Biologics, according to the present invention include, but are not limited to, allergenic extracts (e.g. for allergy shots and tests), blood components, gene therapy products, human tissue or cellular products used in transplantation, vaccines, monoclonal antibodies, cytokines, growth factors, enzymes, thrombolytics, and immunomodulators, among others.

[0094] According to the present invention, one or more biologics currently being marketed or in development may be encoded by the polynucleotides, primary constructs or mmRNA of the present invention. While not wishing to be bound by theory, it is believed that incorporation of the encoding polynucleotides of a known biologic into the primary constructs or mmRNA of the invention will result in improved therapeutic efficacy due at least in part to the specificity, purity and/or selectivity of the construct designs.

### Antibodies

[0095] The primary constructs or mmRNA disclosed herein, may encode one or more antibodies or fragments thereof. The term “antibody” includes monoclonal antibodies (including full length antibodies which have an immunoglobulin Fc region), antibody compositions with polyepitopic specificity, multispecific antibodies (e.g., bispecific antibodies, diabodies, and single-chain molecules), as well as antibody fragments. The term “immunoglobulin” (Ig) is used interchangeably with “antibody” herein. As used herein, the term “monoclonal antibody” refers to an antibody obtained from a population of substantially homogeneous antibodies, i.e., the individual antibodies comprising the population are identical except for possible naturally occurring mutations and/or post-translation modifications (e.g., isomerizations, amidations) that may be present in minor amounts. Monoclonal antibodies are highly specific, being directed against a single antigenic site.

[0096] The monoclonal antibodies herein specifically include “chimeric” antibodies (immunoglobulins) in which a portion of the heavy and/or light chain is identical with or homologous to corresponding sequences in antibodies derived from a particular species or belonging to a particular antibody class or subclass, while the remainder of the chain(s) is (are) identical with or homologous to corresponding sequences in antibodies derived from another species or belonging to another antibody class or subclass, as well as fragments of such antibodies, so long as they exhibit the desired biological activity. Chimeric antibodies of interest herein include, but are not limited to, “primatized” antibodies comprising variable domain antigen-binding sequences derived from a non-human primate (e.g., Old World Monkey, Ape etc.) and human constant region sequences.

[0097] An “antibody fragment” comprises a portion of an intact antibody, preferably the antigen binding and/or the variable region of the intact antibody. Examples of antibody fragments include Fab, Fab′, F(ab′)₂ and Fv fragments; diabodies; linear antibodies; nanobodies; single-chain antibody molecules and multispecific antibodies formed from antibody fragments.

[0098] Any of the five classes of immunoglobulins, IgA, IgD, IgE, IgG and IgM, may be encoded by the mmRNA of the invention, including the heavy chains designated alpha, delta, epsilon, gamma and mu, respectively. Also included are polynucleotide sequences encoding the subclasses, gamma and mu. Hence any of the subclasses of antibodies may be encoded in part or in whole and include the following subclasses: IgG1, IgG2, IgG3, IgG4, IgA1 and IgA2.

[0099] According to the present invention, one or more antibodies or fragments currently being marketed or in development may be encoded by the polynucleotides, primary constructs or mmRNA of the present invention. While not wishing to be bound by theory, it is believed that incorporation into the primary constructs of the invention will result in improved therapeutic efficacy due at least in part to the specificity, purity and selectivity of the mmRNA designs.

[0100] Antibodies encoded in the polynucleotides, primary constructs or mmRNA of the invention may be utilized to treat conditions or diseases in many therapeutic areas such as, but not limited to, blood, cardiovascular, CNS, poisoning (including antivenoms), dermatology, endocrinology, gastrointestinal, medical imaging, musculoskeletal, oncology, immunology, respiratory, sensory and anti-infective.

[0101] In one embodiment, primary constructs or mmRNA disclosed herein may encode monoclonal antibodies and/or variants thereof. Variants of antibodies may also include, but are not limited to, substitutional variants, conservative amino acid substitution, insertional variants, deletional variants and/or covalent derivatives. In one embodiment, the primary construct and/or mmRNA disclosed herein may encode an immunoglobulin Fc region. In another embodiment, the primary constructs and/or mmRNA may encode a variant immunoglobulin Fc region. As a non-limiting example, the primary constructs and/or mmRNA may encode an antibody having a variant immunoglobulin Fc region as described in U.S. Pat. No. 8,217,147 herein incorporated by reference in its entirety.

### Vaccines

[0102] The primary constructs or mmRNA disclosed herein, may encode one or more vaccines. As used herein, a “vaccine” is a biological preparation that improves immunity to a particular disease or infectious agent. According to the present invention, one or more vaccines currently being marketed or in development may be encoded by the polynucleotides, primary constructs or mmRNA of the present invention. While not wishing to be bound by theory, it is believed that incorporation into the primary constructs or mmRNA of the invention will result in improved therapeutic efficacy due at least in part to the specificity, purity and selectivity of the construct designs.

[0103] Vaccines encoded in the polynucleotides, primary constructs or mmRNA of the invention may be utilized to treat conditions or diseases in many therapeutic areas such as, but not limited to, cardiovascular, CNS, dermatology, endocrinology, oncology, immunology, respiratory, and anti-infective.

### Therapeutic Proteins or Peptides

[0104] The primary constructs or mmRNA disclosed herein, may encode one or more validated or “in testing” therapeutic proteins or peptides.

[0105] According to the present invention, one or more therapeutic proteins or peptides currently being marketed or in development may be encoded by the polynucleotides, primary constructs or mmRNA of the present invention. While not wishing to be bound by theory, it is believed that incorporation into the primary constructs or mmRNA of the invention will result in improved therapeutic efficacy due at least in part to the specificity, purity and selectivity of the construct designs.

[0106] Therapeutic proteins and peptides encoded in the polynucleotides, primary constructs or mmRNA of the invention may be utilized to treat conditions or diseases in many therapeutic areas such as, but not limited to, blood, cardiovascular, CNS, poisoning (including antivenoms), dermatology, endocrinology, genetic, genitourinary, gastrointestinal, musculoskeletal, oncology, and immunology, respiratory, sensory and anti-infective.

### Cell-Penetrating Polypeptides

[0107] The primary constructs or mmRNA disclosed herein, may encode one or more cell-penetrating polypeptides. As used herein, “cell-penetrating polypeptide” or CPP refers to a polypeptide which may facilitate the cellular uptake of molecules. A cell-penetrating polypeptide of the present invention may contain one or more detectable labels. The polypeptides may be partially labeled or completely labeled throughout. The polynucleotide, primary construct or mmRNA may encode the detectable label completely, partially or not at all. The cell-penetrating peptide may also include a signal sequence. As used herein, a “signal sequence” refers to a sequence of amino acid residues bound at the amino terminus of a nascent protein during protein translation. The signal sequence may be used to signal the secretion of the cell-penetrating polypeptide.

[0108] In one embodiment, the polynucleotides, primary constructs or mmRNA may also encode a fusion protein. The fusion protein may be created by operably linking a charged protein to a therapeutic protein. As used herein, “operably linked” refers to the therapeutic protein and the charged protein being connected in such a way to permit the expression of the complex when introduced into the cell. As used herein, “charged protein” refers to a protein that carries a positive, negative or overall neutral electrical charge. Preferably, the therapeutic protein may be covalently linked to the charged protein in the formation of the fusion protein. The ratio of surface charge to total or surface amino acids may be approximately 0.1, 0.2, 0.3, 0.4, 0.5, 0.6, 0.7, 0.8 or 0.9.

[0109] The cell-penetrating polypeptide encoded by the polynucleotides, primary constructs or mmRNA may form a complex after being translated. The complex may comprise a charged protein linked, e.g. covalently linked, to the cell-penetrating polypeptide. “Therapeutic protein” refers to a protein that, when administered to a cell has a therapeutic, diagnostic, and/or prophylactic effect and/or elicits a desired biological and/or pharmacological effect.

[0110] In one embodiment, the cell-penetrating polypeptide may comprise a first domain and a second domain. The first domain may comprise a supercharged polypeptide. The second domain may comprise a protein-binding partner. As used herein, “protein-binding partner” includes, but is not limited to, antibodies and functional fragments thereof, scaffold proteins, or peptides. The cell-penetrating polypeptide may further comprise an intracellular binding partner for the protein-binding partner. The cell-penetrating polypeptide may be capable of being secreted from a cell where the polynucleotide, primary construct or mmRNA may be introduced. The cell-penetrating polypeptide may also be capable of penetrating the first cell.

[0111] In a further embodiment, the cell-penetrating polypeptide is capable of penetrating a second cell. The second cell may be from the same area as the first cell, or it may be from a different area. The area may include, but is not limited to, tissues and organs. The second cell may also be proximal or distal to the first cell.

[0112] In one embodiment, the polynucleotides, primary constructs or mmRNA may encode a cell-penetrating polypeptide which may comprise a protein-binding partner. The protein binding partner may include, but is not limited to, an antibody, a supercharged antibody or a functional fragment. The polynucleotides, primary constructs or mmRNA may be introduced into the cell where a cell-penetrating polypeptide comprising the protein-binding partner is introduced.

### Secreted Proteins

[0113] Human and other eukaryotic cells are subdivided by membranes into many functionally distinct compartments. Each membrane-bounded compartment, or organelle, contains different proteins essential for the function of the organelle. The cell uses “sorting signals,” which are amino acid motifs located within the protein, to target proteins to particular cellular organelles.

[0114] One type of sorting signal, called a signal sequence, a signal peptide, or a leader sequence, directs a class of proteins to an organelle called the endoplasmic reticulum (ER).

[0115] Proteins targeted to the ER by a signal sequence can be released into the extracellular space as a secreted protein. Similarly, proteins residing on the cell membrane can also be secreted into the extracellular space by proteolytic cleavage of a “linker” holding the protein to the membrane. While not wishing to be bound by theory, the molecules of the present invention may be used to exploit the cellular trafficking described above. As such, in some embodiments of the invention, polynucleotides, primary constructs or mmRNA are provided to express a secreted protein. The secreted proteins may be selected from those described herein or those in US Patent Publication, 20100255574, the contents of which are incorporated herein by reference in their entirety.

[0116] In one embodiment, these may be used in the manufacture of large quantities of valuable human gene products.

### Plasma Membrane Proteins

[0117] In some embodiments of the invention, polynucleotides, primary constructs or mmRNA are provided to express a protein of the plasma membrane.

### Cytoplasmic or Cytoskeletal Proteins

[0118] In some embodiments of the invention, polynucleotides, primary constructs or mmRNA are provided to express a cytoplasmic or cytoskeletal protein.

### Intracellular Membrane Bound Proteins

[0119] In some embodiments of the invention, polynucleotides, primary constructs or mmRNA are provided to express an intracellular membrane bound protein.

### Nuclear Proteins

[0120] In some embodiments of the invention, polynucleotides, primary constructs or mmRNA are provided to express a nuclear protein.

Proteins Associated with Human Disease

[0121] In some embodiments of the invention, polynucleotides, primary constructs or mmRNA are provided to express a protein associated with human disease.

### Miscellaneous Proteins

[0122] In some embodiments of the invention, polynucleotides, primary constructs or mmRNA are provided to express a protein with a presently unknown therapeutic function.

### Targeting Moieties

[0123] In some embodiments of the invention, polynucleotides, primary constructs or mmRNA are provided to express a targeting moiety. These include a protein-binding partner or a receptor on the surface of the cell, which functions to target the cell to a specific tissue space or to interact with a specific moiety, either in vivo or in vitro. Suitable protein-binding partners include, but are not limited to, antibodies and functional fragments thereof, scaffold proteins, or peptides. Additionally, polynucleotide, primary construct or mmRNA can be employed to direct the synthesis and extracellular localization of lipids, carbohydrates, or other biological moieties or biomolecules.

### Polypeptide Libraries

[0124] In one embodiment, the polynucleotides, primary constructs or mmRNA may be used to produce polypeptide libraries. These libraries may arise from the production of a population of polynucleotides, primary constructs or mmRNA, each containing various structural or chemical modification designs. In this embodiment, a population of polynucleotides, primary constructs or mmRNA may comprise a plurality of encoded polypeptides, including but not limited to, an antibody or antibody fragment, protein binding partner, scaffold protein, and other polypeptides taught herein or known in the art. In a preferred embodiment, the polynucleotides are primary constructs of the present invention, including mmRNA which may be suitable for direct introduction into a target cell or culture which in turn may synthesize the encoded polypeptides.

[0125] In certain embodiments, multiple variants of a protein, each with different amino acid modification(s), may be produced and tested to determine the best variant in terms of pharmacokinetics, stability, biocompatibility, and/or biological activity, or a biophysical property such as expression level. Such a library may contain 10, 10², 10³, 10⁴, 10⁵, 10⁶, 10⁷, 10⁸, 10⁹, or over 10⁹ possible variants (including, but not limited to, substitutions, deletions of one or more residues, and insertion of one or more residues).

### Anti-Microbial and Anti-Viral Polypeptides

[0126] The polynucleotides, primary constructs and mmRNA of the present invention may be designed to encode on or more antimicrobial peptides (AMP) or antiviral peptides (AVP). AMPs and AVPs have been isolated and described from a wide range of animals such as, but not limited to, microorganisms, invertebrates, plants, amphibians, birds, fish, and mammals (Wang et al., Nucleic Acids Res. 2009; 37 (Database issue): D933-7). For example, anti-microbial polypeptides are described in Antimicrobial Peptide Database (aps.unmc.edu/AP/main.php; Wang et al., Nucleic Acids Res. 2009; 37 (Database issue): D933-7), CAMP: Collection of Anti-Microbial Peptides (www.bicnirrh.res.in/antimicrobial/); Thomas et al., Nucleic Acids Res. 2010; 38 (Database issue): D774-80), U.S. Pat. Nos. 5,221,732, 5,447,914, 5,519,115, 5,607,914, 5,714,577, 5,734,015, 5,798,336, 5,821,224, 5,849,490, 5,856,127, 5,905,187, 5,994,308, 5,998,374, 6,107,460, 6,191,254, 6,211,148, 6,300,489, 6,329,504, 6,399,370, 6,476,189, 6,478,825, 6,492,328, 6,514,701, 6,573,361, 6,573,361, 6,576,755, 6,605,698, 6,624,140, 6,638,531, 6,642,203, 6,653,280, 6,696,238, 6,727,066, 6,730,659, 6,743,598, 6,743,769, 6,747,007, 6,790,833, 6,794,490, 6,818,407, 6,835,536, 6,835,713, 6,838,435, 6,872,705, 6,875,907, 6,884,776, 6,887,847, 6,906,035, 6,911,524, 6,936,432, 7,001,924, 7,071,293, 7,078,380, 7,091,185, 7,094,759, 7,166,769, 7,244,710, 7,314,858, and 7,582,301, the contents of which are incorporated by reference in their entirety.

[0127] The anti-microbial polypeptides described herein may block cell fusion and/or viral entry by one or more enveloped viruses (e.g., HIV, HCV). For example, the anti-microbial polypeptide can comprise or consist of a synthetic peptide corresponding to a region, e.g., a consecutive sequence of at least about 5, 10, 15, 20, 25, 30, 35, 40, 45, 50, 55, or 60 amino acids of the transmembrane subunit of a viral envelope protein, e.g., HIV-1 gp120 or gp41. The amino acid and nucleotide sequences of HIV-1 gp 120 or gp41 are described in, e.g., Kuiken et al., (2008). “HIV Sequence Compendium,” Los Alamos National Laboratory.

[0128] In some embodiments, the anti-microbial polypeptide may have at least about 75%, 80%, 85%, 90%, 95%, 100% sequence homology to the corresponding viral protein sequence. In some embodiments, the anti-microbial polypeptide may have at least about 75%, 80%, 85%, 90%, 95%, or 100% sequence homology to the corresponding viral protein sequence.

[0129] In other embodiments, the anti-microbial polypeptide may comprise or consist of a synthetic peptide corresponding to a region, e.g., a consecutive sequence of at least about 5, 10, 15, 20, 25, 30, 35, 40, 45, 50, 55, or 60 amino acids of the binding domain of a capsid binding protein. In some embodiments, the anti-microbial polypeptide may have at least about 75%, 80%, 85%, 90%, 95%, or 100% sequence homology to the corresponding sequence of the capsid binding protein.

[0130] The anti-microbial polypeptides described herein may block protease dimerization and inhibit cleavage of viral proproteins (e.g., HIV Gag-pol processing) into functional proteins thereby preventing release of one or more enveloped viruses (e.g., HIV, HCV). In some embodiments, the anti-microbial polypeptide may have at least about 75%, 80%, 85%, 90%, 95%, 100% sequence homology to the corresponding viral protein sequence.

[0131] In other embodiments, the anti-microbial polypeptide can comprise or consist of a synthetic peptide corresponding to a region, e.g., a consecutive sequence of at least about 5, 10, 15, 20, 25, 30, 35, 40, 45, 50, 55, or 60 amino acids of the binding domain of a protease binding protein. In some embodiments, the anti-microbial polypeptide may have at least about 75%, 80%, 85%, 90%, 95%, 100% sequence homology to the corresponding sequence of the protease binding protein.

[0132] The anti-microbial polypeptides described herein can include an in vitro-evolved polypeptide directed against a viral pathogen.

### Anti-Microbial Polypeptides

[0133] Anti-microbial polypeptides (AMPs) are small peptides of variable length, sequence and structure with broad spectrum activity against a wide range of microorganisms including, but not limited to, bacteria, viruses, fungi, protozoa, parasites, prions, and tumor/cancer cells. (See, e.g., Zaiou, J Mol Med, 2007; 85:317; herein incorporated by reference in its entirety). It has been shown that AMPs have broad-spectrum of rapid onset of killing activities, with potentially low levels of induced resistance and concomitant broad anti-inflammatory effects.

[0134] In some embodiments, the anti-microbial polypeptide (e.g., an anti-bacterial polypeptide) may be under 10 kDa, e.g., under 8 kDa, 6 kDa, 4 kDa, 2 kDa, or 1 kDa. In some embodiments, the anti-microbial polypeptide (e.g., an anti-bacterial polypeptide) consists of from about 6 to about 100 amino acids, e.g., from about 6 to about 75 amino acids, about 6 to about 50 amino acids, about 6 to about 25 amino acids, about 25 to about 100 amino acids, about 50 to about 100 amino acids, or about 75 to about 100 amino acids. In certain embodiments, the anti-microbial polypeptide (e.g., an anti-bacterial polypeptide) may consist of from about 15 to about 45 amino acids. In some embodiments, the anti-microbial polypeptide (e.g., an anti-bacterial polypeptide) is substantially cationic.

[0135] In some embodiments, the anti-microbial polypeptide (e.g., an anti-bacterial polypeptide) may be substantially amphipathic. In certain embodiments, the anti-microbial polypeptide (e.g., an anti-bacterial polypeptide) may be substantially cationic and amphipathic. In some embodiments, the anti-microbial polypeptide (e.g., an anti-bacterial polypeptide) may be cytostatic to a Gram-positive bacterium. In some embodiments, the anti-microbial polypeptide (e.g., an anti-bacterial polypeptide) may be cytotoxic to a Gram-positive bacterium. In some embodiments, the anti-microbial polypeptide (e.g., an anti-bacterial polypeptide) may be cytostatic and cytotoxic to a Gram-positive bacterium. In some embodiments, the anti-microbial polypeptide (e.g., an anti-bacterial polypeptide) may be cytostatic to a Gram-negative bacterium. In some embodiments, the anti-microbial polypeptide (e.g., an anti-bacterial polypeptide) may be cytotoxic to a Gram-negative bacterium. In some embodiments, the anti-microbial polypeptide (e.g., an anti-bacterial polypeptide) may be cytostatic and cytotoxic to a Gram-positive bacterium. In some embodiments, the anti-microbial polypeptide may be cytostatic to a virus, fungus, protozoan, parasite, prion, or a combination thereof. In some embodiments, the anti-microbial polypeptide may be cytotoxic to a virus, fungus, protozoan, parasite, prion, or a combination thereof. In certain embodiments, the anti-microbial polypeptide may be cytostatic and cytotoxic to a virus, fungus, protozoan, parasite, prion, or a combination thereof. In some embodiments, the anti-microbial polypeptide may be cytotoxic to a tumor or cancer cell (e.g., a human tumor and/or cancer cell). In some embodiments, the anti-microbial polypeptide may be cytostatic to a tumor or cancer cell (e.g., a human tumor and/or cancer cell). In certain embodiments, the anti-microbial polypeptide may be cytotoxic and cytostatic to a tumor or cancer cell (e.g., a human tumor or cancer cell). In some embodiments, the anti-microbial polypeptide (e.g., an anti-bacterial polypeptide) may be a secreted polypeptide.

[0136] In some embodiments, the anti-microbial polypeptide comprises or consists of a defensin. Exemplary defensins include, but are not limited to, α-defensins (e.g., neutrophil defensin 1, defensin alpha 1, neutrophil defensin 3, neutrophil defensin 4, defensin 5, defensin 6), β-defensins (e.g., beta-defensin 1, beta-defensin 2, beta-defensin 103, beta-defensin 107, beta-defensin 110, beta-defensin 136), and θ-defensins. In other embodiments, the anti-microbial polypeptide comprises or consists of a cathelicidin (e.g., hCAP18).

### Anti-Viral Polypeptides

[0137] Anti-viral polypeptides (AVPs) are small peptides of variable length, sequence and structure with broad spectrum activity against a wide range of viruses. See, e.g., Zaiou, J Mol Med, 2007; 85:317. It has been shown that AVPs have a broad-spectrum of rapid onset of killing activities, with potentially low levels of induced resistance and concomitant broad anti-inflammatory effects. In some embodiments, the anti-viral polypeptide is under 10 kDa, e.g., under 8 kDa, 6 kDa, 4 kDa, 2 kDa, or 1 kDa. In some embodiments, the anti-viral polypeptide comprises or consists of from about 6 to about 100 amino acids, e.g., from about 6 to about 75 amino acids, about 6 to about 50 amino acids, about 6 to about 25 amino acids, about 25 to about 100 amino acids, about 50 to about 100 amino acids, or about 75 to about 100 amino acids. In certain embodiments, the anti-viral polypeptide comprises or consists of from about 15 to about 45 amino acids. In some embodiments, the anti-viral polypeptide is substantially cationic. In some embodiments, the anti-viral polypeptide is substantially amphipathic. In certain embodiments, the anti-viral polypeptide is substantially cationic and amphipathic. In some embodiments, the anti-viral polypeptide is cytostatic to a virus. In some embodiments, the anti-viral polypeptide is cytotoxic to a virus. In some embodiments, the anti-viral polypeptide is cytostatic and cytotoxic to a virus. In some embodiments, the anti-viral polypeptide is cytostatic to a bacterium, fungus, protozoan, parasite, prion, or a combination thereof. In some embodiments, the anti-viral polypeptide is cytotoxic to a bacterium, fungus, protozoan, parasite, prion or a combination thereof. In certain embodiments, the anti-viral polypeptide is cytostatic and cytotoxic to a bacterium, fungus, protozoan, parasite, prion, or a combination thereof. In some embodiments, the anti-viral polypeptide is cytotoxic to a tumor or cancer cell (e.g., a human cancer cell). In some embodiments, the anti-viral polypeptide is cytostatic to a tumor or cancer cell (e.g., a human cancer cell). In certain embodiments, the anti-viral polypeptide is cytotoxic and cytostatic to a tumor or cancer cell (e.g., a human cancer cell). In some embodiments, the anti-viral polypeptide is a secreted polypeptide.

### Cytotoxic Nucleosides

[0138] In one embodiment, the polynucleotides, primary constructs or mmRNA of the present invention may incorporate one or more cytotoxic nucleosides. For example, cytotoxic nucleosides may be incorporated into polynucleotides, primary constructs or mmRNA such as bifunctional modified RNAs or mRNAs. Cytotoxic nucleoside anti-cancer agents include, but are not limited to, adenosine arabinoside, cytarabine, cytosine arabinoside, 5-fluorouracil, fludarabine, floxuridine, FTORAFUR® (a combination of tegafur and uracil), tegafur ((RS)-5-fluoro-1-(tetrahydrofuran-2-yl) pyrimidine-2,4 (1H,3H)-dione), and 6-mercaptopurine.

[0139] A number of cytotoxic nucleoside analogues are in clinical use, or have been the subject of clinical trials, as anticancer agents. Examples of such analogues include, but are not limited to, cytarabine, gemcitabine, troxacitabine, decitabine, tezacitabine, 2′-deoxy-2′-methylidenecytidine (DMDC), cladribine, clofarabine, 5-azacytidine, 4′-thio-aracytidine, cyclopentenylcytosine and 1-(2-C-cyano-2-deoxy-beta-D-arabino-pentofuranosyl)-cytosine. Another example of such a compound is fludarabine phosphate. These compounds may be administered systemically and may have side effects which are typical of cytotoxic agents such as, but not limited to, little or no specificity for tumor cells over proliferating normal cells.

[0140] A number of prodrugs of cytotoxic nucleoside analogues are also reported in the art. Examples include, but are not limited to, N4-behenoyl-1-beta-D-arabinofuranosylcytosine, N4-octadecyl-1-beta-D-arabinofuranosylcytosine, N4-palmitoyl-1-(2-C-cyano-2-deoxy-beta-D-arabino-pentofuranosyl) cytosine, and P-4055 (cytarabine 5′-elaidic acid ester). In general, these prodrugs may be converted into the active drugs mainly in the liver and systemic circulation and display little or no selective release of active drug in the tumor tissue. For example, capecitabine, a prodrug of 5′-deoxy-5-fluorocytidine (and eventually of 5-fluorouracil), is metabolized both in the liver and in the tumor tissue. A series of capecitabine analogues containing “an easily hydrolysable radical under physiological conditions” has been claimed by Fujiu et al. (U.S. Pat. No. 4,966,891) and is herein incorporated by reference. The series described by Fujiu includes N4 alkyl and aralkyl carbamates of 5′-deoxy-5-fluorocytidine and the implication that these compounds will be activated by hydrolysis under normal physiological conditions to provide 5′-deoxy-5-fluorocytidine.

[0141] A series of cytarabine N4-carbamates has been by reported by Fadl et al (Pharmazie. 1995, 50, 382-7, herein incorporated by reference) in which compounds were designed to convert into cytarabine in the liver and plasma. WO 2004/041203, herein incorporated by reference, discloses prodrugs of gemcitabine, where some of the prodrugs are N4-carbamates. These compounds were designed to overcome the gastrointestinal toxicity of gemcitabine and were intended to provide gemcitabine by hydrolytic release in the liver and plasma after absorption of the intact prodrug from the gastrointestinal tract. Nomura et al (Bioorg Med. Chem. 2003, 11, 2453-61, herein incorporated by reference) have described acetal derivatives of 1-(3-C-ethynyl-β-D-ribo-pentofaranosyl) cytosine which, on bioreduction, produced an intermediate that required further hydrolysis under acidic conditions to produce a cytotoxic nucleoside compound.

[0142] Cytotoxic nucleotides which may be chemotherapeutic also include, but are not limited to, pyrazolo[3,4-D]-pyrimidines, allopurinol, azathioprine, capecitabine, cytosine arabinoside, fluorouracil, mercaptopurine, 6-thioguanine, acyclovir, ara-adenosine, ribavirin, 7-deaza-adenosine, 7-deaza-guanosine, 6-aza-uracil, 6-aza-cytidine, thymidine ribonucleotide, 5-bromodeoxyuridine, 2-chloro-purine, and inosine, or combinations thereof.

### Flanking Regions: Untranslated Regions (UTRs)

[0143] Untranslated regions (UTRs) of a gene are transcribed but not translated. The 5′UTR starts at the transcription start site and continues to the start codon but does not include the start codon; whereas, the 3′UTR starts immediately following the stop codon and continues until the transcriptional termination signal. There is growing body of evidence about the regulatory roles played by the UTRs in terms of stability of the nucleic acid molecule and translation. The regulatory features of a UTR can be incorporated into the polynucleotides, primary constructs and/or mmRNA of the present invention to enhance the stability of the molecule. The specific features can also be incorporated to ensure controlled down-regulation of the transcript in case they are misdirected to undesired organs sites.

### 5′ UTR and Translation Initiation

[0144] Natural 5′UTRs bear features which play roles in for translation initiation. They harbor signatures like Kozak sequences which are commonly known to be involved in the process by which the ribosome initiates translation of many genes. Kozak sequences have the consensus CCR(A/G)CCAUGG, where R is a purine (adenine or guanine) three bases upstream of the start codon (AUG), which is followed by another ‘G’. 5′UTR also have been known to form secondary structures which are involved in elongation factor binding.

[0145] By engineering the features typically found in abundantly expressed genes of specific target organs, one can enhance the stability and protein production of the polynucleotides, primary constructs or mmRNA of the invention. For example, introduction of 5′ UTR of liver-expressed mRNA, such as albumin, serum amyloid A, Apolipoprotein A/B/E, transferrin, alpha fetoprotein, erythropoietin, or Factor VIII, could be used to enhance expression of a nucleic acid molecule, such as a mmRNA, in hepatic cell lines or liver. Likewise, use of 5′ UTR from other tissue-specific mRNA to improve expression in that tissue is possible for muscle (MyoD, Myosin, Myoglobin, Myogenin, Herculin), for endothelial cells (Tie-1, CD36), for myeloid cells (C/EBP, AML1, G-CSF, GM-CSF, CD11b, MSR, Fr-1, i-NOS), for leukocytes (CD45, CD18), for adipose tissue (CD36, GLUT4, ACRP30, adiponectin) and for lung epithelial cells (SP-A/B/C/D).

[0146] Other non-UTR sequences may be incorporated into the 5′ (or 3′ UTR) UTRs. For example, introns or portions of introns sequences may be incorporated into the flanking regions of the polynucleotides, primary constructs or mmRNA of the invention. Incorporation of intronic sequences may increase protein production as well as mRNA levels.

### 3′ UTR and the AU Rich Elements

[0147] 3′ UTRs are known to have stretches of Adenosines and Uridines embedded in them. These AU rich signatures are particularly prevalent in genes with high rates of turnover. Based on their sequence features and functional properties, the AU rich elements (AREs) can be separated into three classes (Chen et al, 1995): Class I AREs contain several dispersed copies of an AUUUA motif within U-rich regions. C-Myc and MyoD contain class I AREs. Class II AREs possess two or more overlapping UUAUUUA(U/A)(U/A) nonamers. Molecules containing this type of AREs include GM-CSF and TNF-α. Class III ARES are less well defined. These U rich regions do not contain an AUUUA motif. c-Jun and Myogenin are two well-studied examples of this class. Most proteins binding to the AREs are known to destabilize the messenger, whereas members of the ELAV family, most notably HuR, have been documented to increase the stability of mRNA. HuR binds to AREs of all the three classes. Engineering the HuR specific binding sites into the 3′ UTR of nucleic acid molecules will lead to HuR binding and thus, stabilization of the message in vivo.

[0148] Introduction, removal or modification of 3′ UTR AU rich elements (AREs) can be used to modulate the stability of polynucleotides, primary constructs or mmRNA of the invention. When engineering specific polynucleotides, primary constructs or mmRNA, one or more copies of an ARE can be introduced to make polynucleotides, primary constructs or mmRNA of the invention less stable and thereby curtail translation and decrease production of the resultant protein. Likewise, AREs can be identified and removed or mutated to increase the intracellular stability and thus increase translation and production of the resultant protein. Transfection experiments can be conducted in relevant cell lines, using polynucleotides, primary constructs or mmRNA of the invention and protein production can be assayed at various time points post-transfection. For example, cells can be transfected with different ARE-engineering molecules and by using an ELISA kit to the relevant protein and assaying protein produced at 6 hour, 12 hour, 24 hour, 48 hour, and 7 days post-transfection.

Incorporating microRNA Binding Sites

[0149] microRNAs (or miRNA) are 19-25 nucleotide long noncoding RNAs that bind to the 3′UTR of nucleic acid molecules and down-regulate gene expression either by reducing nucleic acid molecule stability or by inhibiting translation. The polynucleotides, primary constructs or mmRNA of the invention may comprise one or more microRNA target sequences, microRNA sequences, or microRNA seeds. Such sequences may correspond to any known microRNA such as those taught in US Publication US2005/0261218 and US Publication US2005/0059005, the contents of which are incorporated herein by reference in their entirety.

[0150] A microRNA sequence comprises a “seed” region, i.e., a sequence in the region of positions 2-8 of the mature microRNA, which sequence has perfect Watson-Crick complementarity to the miRNA target sequence. A microRNA seed may comprise positions 2-8 or 2-7 of the mature microRNA. In some embodiments, a microRNA seed may comprise 7 nucleotides (e.g., nucleotides 2-8 of the mature microRNA), wherein the seed-complementary site in the corresponding miRNA target is flanked by an adenine (A) opposed to microRNA position 1. In some embodiments, a microRNA seed may comprise 6 nucleotides (e.g., nucleotides 2-7 of the mature microRNA), wherein the seed-complementary site in the corresponding miRNA target is flanked by an adenine (A) opposed to microRNA position 1. See for example, Grimson A, Farh K K, Johnston W K, Garrett-Engele P, Lim L P, Bartel D P; Mol Cell. 2007 Jul. 6; 27 (1): 91-105; each of which is herein incorporated by reference in their entirety. The bases of the microRNA seed have complete complementarity with the target sequence. By engineering microRNA target sequences into the 3′UTR of polynucleotides, primary constructs or mmRNA of the invention one can target the molecule for degradation or reduced translation, provided the microRNA in question is available. This process will reduce the hazard of off target effects upon nucleic acid molecule delivery. Identification of microRNA, microRNA target regions, and their expression patterns and role in biology have been reported (Bonauer et al., Curr Drug Targets 2010 11:943-949; Anand and Cheresh Curr Opin Hematol 2011 18:171-176; Contreras and Rao Leukemia 2012 26:404-413 (2011 Dec. 20. doi: 10.1038/leu.2011.356); Bartel Cell 2009 136:215-233; Landgraf et al, Cell, 2007 129:1401-1414; each of which is herein incorporated by reference in its entirety).

[0151] For example, if the nucleic acid molecule is an mRNA and is not intended to be delivered to the liver but ends up there, then miR-122, a microRNA abundant in liver, can inhibit the expression of the gene of interest if one or multiple target sites of miR-122 are engineered into the 3′ UTR of the polynucleotides, primary constructs or mmRNA. Introduction of one or multiple binding sites for different microRNA can be engineered to further decrease the longevity, stability, and protein translation of a polynucleotides, primary constructs or mmRNA.

[0152] As used herein, the term “microRNA site” refers to a microRNA target site or a microRNA recognition site, or any nucleotide sequence to which a microRNA binds or associates. It should be understood that “binding” may follow traditional Watson-Crick hybridization rules or may reflect any stable association of the microRNA with the target sequence at or adjacent to the microRNA site.

[0153] Conversely, for the purposes of the polynucleotides, primary constructs or mmRNA of the present invention, microRNA binding sites can be engineered out of (i.e. removed from) sequences in which they naturally occur in order to increase protein expression in specific tissues. For example, miR-122 binding sites may be removed to improve protein expression in the liver. Regulation of expression in multiple tissues can be accomplished through introduction or removal or one or several microRNA binding sites.

[0154] Examples of tissues where microRNA are known to regulate mRNA, and thereby protein expression, include, but are not limited to, liver (miR-122), muscle (miR-133, miR-206, miR-208), endothelial cells (miR-17-92, miR-126), myeloid cells (miR-142-3p, miR-142-5p, miR-16, miR-21, miR-223, miR-24, miR-27), adipose tissue (let-7, miR-30c), heart (miR-1d, miR-149), kidney (miR-192, miR-194, miR-204), and lung epithelial cells (let-7, miR-133, miR-126). MicroRNA can also regulate complex biological processes such as angiogenesis (miR-132) (Anand and Cheresh Curr Opin Hematol 2011 18:171-176; herein incorporated by reference in its entirety). In the polynucleotides, primary constructs or mmRNA of the present invention, binding sites for microRNAs that are involved in such processes may be removed or introduced, in order to tailor the expression of the polynucleotides, primary constructs or mmRNA expression to biologically relevant cell types or to the context of relevant biological processes. A listing of MicroRNA, miR sequences and miR binding sites is listed in Table 9 of U.S. Provisional Application No. 61/753,661 filed Jan. 17, 2013, in Table 9 of U.S. Provisional Application No. 61/754,159 filed Jan. 18, 2013, and in Table 7 of U.S. Provisional Application No. 61/758,921 filed Jan. 31, 2013, each of which are herein incorporated by reference in their entireties.

[0155] Examples of use of microRNA to drive tissue or disease-specific gene expression are listed (Getner and Naldini, Tissue Antigens. 2012, 80:393-403; herein incorporated by reference in its entirety). In addition, microRNA seed sites can be incorporated into mRNA to decrease expression in certain cells which results in a biological improvement. An example of this is incorporation of miR-142 sites into a UGT1A1-expressing lentiviral vector. The presence of miR-142 seed sites reduced expression in hematopoietic cells, and as a consequence reduced expression in antigen-presentating cells, leading to the absence of an immune response against the virally expressed UGT1A1 (Schmitt et al., Gastroenterology 2010; 139:999-1007; Gonzalez-Asequinolaza et al. Gastroenterology 2010, 139:726-729; both herein incorporated by reference in its entirety). Incorporation of miR-142 sites into modified mRNA could not only reduce expression of the encoded protein in hematopoietic cells, but could also reduce or abolish immune responses to the mRNA-encoded protein. Incorporation of miR-142 seed sites (one or multiple) into mRNA would be important in the case of treatment of patients with complete protein deficiencies (UGT1A1 type I, LDLR-deficient patients, CRIM-negative Pompe patients, etc.).

[0156] Lastly, through an understanding of the expression patterns of microRNA in different cell types, polynucleotides, primary constructs or mmRNA can be engineered for more targeted expression in specific cell types or only under specific biological conditions. Through introduction of tissue-specific microRNA binding sites, polynucleotides, primary constructs or mmRNA could be designed that would be optimal for protein expression in a tissue or in the context of a biological condition.

[0157] Transfection experiments can be conducted in relevant cell lines, using engineered polynucleotides, primary constructs or mmRNA and protein production can be assayed at various time points post-transfection. For example, cells can be transfected with different microRNA binding site-engineering polynucleotides, primary constructs or mmRNA and by using an ELISA kit to the relevant protein and assaying protein produced at 6 hour, 12 hour, 24 hour, 48 hour, 72 hour and 7 days post-transfection. In vivo experiments can also be conducted using microRNA-binding site-engineered molecules to examine changes in tissue-specific expression of formulated polynucleotides, primary constructs or mmRNA.

### 5′ Capping

[0158] The 5′ cap structure of an mRNA is involved in nuclear export, increasing mRNA stability and binds the mRNA Cap Binding Protein (CBP), which is responsible for mRNA stability in the cell and translation competency through the association of CBP with poly(A) binding protein to form the mature cyclic mRNA species. The cap further assists the removal of 5′ proximal introns removal during mRNA splicing.

[0159] Endogenous mRNA molecules may be 5′-end capped generating a 5′-ppp-5′-triphosphate linkage between a terminal guanosine cap residue and the 5′-terminal transcribed sense nucleotide of the mRNA molecule. This 5′-guanylate cap may then be methylated to generate an N7-methyl-guanylate residue. The ribose sugars of the terminal and/or anteterminal transcribed nucleotides of the 5′ end of the mRNA may optionally also be 2′-O-methylated. 5′-decapping through hydrolysis and cleavage of the guanylate cap structure may target a nucleic acid molecule, such as an mRNA molecule, for degradation.

[0160] Modifications to the polynucleotides, primary constructs, and mmRNA of the present invention may generate a non-hydrolyzable cap structure preventing decapping and thus increasing mRNA half-life. Because cap structure hydrolysis requires cleavage of 5′-ppp-5′ phosphorodiester linkages, modified nucleotides may be used during the capping reaction. For example, a Vaccinia Capping Enzyme from New England Biolabs (Ipswich, MA) may be used with α-thio-guanosine nucleotides according to the manufacturer's instructions to create a phosphorothioate linkage in the 5′-ppp-5′ cap. Additional modified guanosine nucleotides may be used such as α-methyl-phosphonate and seleno-phosphate nucleotides.

[0161] Additional modifications include, but are not limited to, 2′-O-methylation of the ribose sugars of 5′-terminal and/or 5′-anteterminal nucleotides of the mRNA (as mentioned above) on the 2′-hydroxyl group of the sugar ring. Multiple distinct 5′-cap structures can be used to generate the 5′-cap of a nucleic acid molecule, such as an mRNA molecule.

[0162] Cap analogs, which herein are also referred to as synthetic cap analogs, chemical caps, chemical cap analogs, or structural or functional cap analogs, differ from natural (i.e. endogenous, wild-type or physiological) 5′-caps in their chemical structure, while retaining cap function. Cap analogs may be chemically (i.e. non-enzymatically) or enzymatically synthesized and/or linked to a nucleic acid molecule.

[0163] For example, the Anti-Reverse Cap Analog (ARCA) cap contains two guanines linked by a 5′-5′-triphosphate group, wherein one guanine contains an N7 methyl group as well as a 3′-O-methyl group (i.e., N7,3′-O-dimethyl-guanosine-5′-triphosphate-5′-guanosine (m7G-3′mppp-G; which may equivalently be designated 3′ O-Me-m7G(5′)ppp(5′) G). The 3′-O atom of the other, unmodified, guanine becomes linked to the 5′-terminal nucleotide of the capped nucleic acid molecule (e.g. an mRNA or mmRNA). The N7- and 3′-O-methlyated guanine provides the terminal moiety of the capped nucleic acid molecule (e.g. mRNA or mmRNA).

[0164] Another exemplary cap is mCAP, which is similar to ARCA but has a 2′-O-methyl group on guanosine (i.e., N7,2′-O-dimethyl-guanosine-5′-triphosphate-5′-guanosine, m7Gm-ppp-G).

[0165] While cap analogs allow for the concomitant capping of a nucleic acid molecule in an in vitro transcription reaction, up to 20% of transcripts can remain uncapped. This, as well as the structural differences of a cap analog from an endogenous 5′-cap structures of nucleic acids produced by the endogenous, cellular transcription machinery, may lead to reduced translational competency and reduced cellular stability.

[0166] Polynucleotides, primary constructs and mmRNA of the invention may also be capped post-transcriptionally, using enzymes, in order to generate more authentic 5′-cap structures. As used herein, the phrase “more authentic” refers to a feature that closely mirrors or mimics, either structurally or functionally, an endogenous or wild type feature. That is, a “more authentic” feature is better representative of an endogenous, wild-type, natural or physiological cellular function and/or structure as compared to synthetic features or analogs, etc., of the prior art, or which outperforms the corresponding endogenous, wild-type, natural or physiological feature in one or more respects. Non-limiting examples of more authentic 5′cap structures of the present invention are those which, among other things, have enhanced binding of cap binding proteins, increased half life, reduced susceptibility to 5′ endonucleases and/or reduced 5′decapping, as compared to synthetic 5′cap structures known in the art (or to a wild-type, natural or physiological 5′cap structure). For example, recombinant Vaccinia Virus Capping Enzyme and recombinant 2′-O-methyltransferase enzyme can create a canonical 5′-5′-triphosphate linkage between the 5′-terminal nucleotide of an mRNA and a guanine cap nucleotide wherein the cap guanine contains an N7 methylation and the 5′-terminal nucleotide of the mRNA contains a 2′-O-methyl. Such a structure is termed the Cap1 structure. This cap results in a higher translational-competency and cellular stability and a reduced activation of cellular pro-inflammatory cytokines, as compared, e.g., to other 5′cap analog structures known in the art. Cap structures include, but are not limited to, 7mG(5′)ppp(5′) N,pN2p (cap 0), 7mG(5′)ppp(5′) N1mpNp (cap 1), and 7mG(5′)-ppp(5′)N1mpN2mp (cap 2).

[0167] Because the polynucleotides, primary constructs or mmRNA may be capped post-transcriptionally, and because this process is more efficient, nearly 100% of the polynucleotides, primary constructs or mmRNA may be capped. This is in contrast to ˜80% when a cap analog is linked to an mRNA in the course of an in vitro transcription reaction.

[0168] According to the present invention, 5′ terminal caps may include endogenous caps or cap analogs. According to the present invention, a 5′ terminal cap may comprise a guanine analog. Useful guanine analogs include, but are not limited to, inosine, N1-methyl-guanosine, 2′fluoro-guanosine, 7-deaza-guanosine, 8-oxo-guanosine, 2-amino-guanosine, LNA-guanosine, and 2-azido-guanosine.

### Viral Sequences

[0169] Additional viral sequences such as, but not limited to, the translation enhancer sequence of the barley yellow dwarf virus (BYDV-PAV), the Jaagsiekte sheep retrovirus (JSRV) and/or the Enzootic nasal tumor virus (See e.g., International Pub. No. WO2012129648; herein incorporated by reference in its entirety) can be engineered and inserted in the 3′ UTR of the polynucleotides, primary constructs or mmRNA of the invention and can stimulate the translation of the construct in vitro and in vivo. Transfection experiments can be conducted in relevant cell lines at and protein production can be assayed by ELISA at 12 hr, 24 hr, 48 hr, 72 hr and day 7 post-transfection.

### IRES Sequences

[0170] Further, provided are polynucleotides, primary constructs or mmRNA which may contain an internal ribosome entry site (IRES). First identified as a feature Picorna virus RNA, IRES plays an important role in initiating protein synthesis in absence of the 5′ cap structure. An IRES may act as the sole ribosome binding site, or may serve as one of multiple ribosome binding sites of an mRNA. Polynucleotides, primary constructs or mmRNA containing more than one functional ribosome binding site may encode several peptides or polypeptides that are translated independently by the ribosomes (“multicistronic nucleic acid molecules”). When polynucleotides, primary constructs or mmRNA are provided with an IRES, further optionally provided is a second translatable region. Examples of IRES sequences that can be used according to the invention include without limitation, those from picornaviruses (e.g. FMDV), pest viruses (CFFV), polio viruses (PV), encephalomyocarditis viruses (ECMV), foot-and-mouth disease viruses (FMDV), hepatitis C viruses (HCV), classical swine fever viruses (CSFV), murine leukemia virus (MLV), simian immune deficiency viruses (SIV) or cricket paralysis viruses (CrPV).

### Poly-A Tails

[0171] During RNA processing, a long chain of adenine nucleotides (poly-A tail) may be added to a polynucleotide such as an mRNA molecules in order to increase stability. Immediately after transcription, the 3′ end of the transcript may be cleaved to free a 3′ hydroxyl. Then poly-A polymerase adds a chain of adenine nucleotides to the RNA. The process, called polyadenylation, adds a poly-A tail that can be between, for example, approximately 100 and 250 residues long.

[0172] It has been discovered that unique poly-A tail lengths provide certain advantages to the polynucleotides, primary constructs or mmRNA of the present invention.

[0173] Generally, the length of a poly-A tail of the present invention is greater than 30 nucleotides in length. In another embodiment, the poly-A tail is greater than 35 nucleotides in length (e.g., at least or greater than about 35, 40, 45, 50, 55, 60, 70, 80, 90, 100, 120, 140, 160, 180, 200, 250, 300, 350, 400, 450, 500, 600, 700, 800, 900, 1,000, 1,100, 1,200, 1,300, 1,400, 1,500, 1,600, 1,700, 1,800, 1,900, 2,000, 2,500, and 3,000 nucleotides). In some embodiments, the polynucleotide, primary construct, or mmRNA includes from about 30 to about 3,000 nucleotides (e.g., from 30 to 50, from 30 to 100, from 30 to 250, from 30 to 500, from 30 to 750, from 30 to 1,000, from 30 to 1,500, from 30 to 2,000, from 30 to 2,500, from 50 to 100, from 50 to 250, from 50 to 500, from 50 to 750, from 50 to 1,000, from 50 to 1,500, from 50 to 2,000, from 50 to 2,500, from 50 to 3,000, from 100 to 500, from 100 to 750, from 100 to 1,000, from 100 to 1,500, from 100 to 2,000, from 100 to 2,500, from 100 to 3,000, from 500 to 750, from 500 to 1,000, from 500 to 1,500, from 500 to 2,000, from 500 to 2,500, from 500 to 3,000, from 1,000 to 1,500, from 1,000 to 2,000, from 1,000 to 2,500, from 1,000 to 3,000, from 1,500 to 2,000, from 1,500 to 2,500, from 1,500 to 3,000, from 2,000 to 3,000, from 2,000 to 2,500, and from 2,500 to 3,000).

[0174] In one embodiment, the poly-A tail is designed relative to the length of the overall polynucleotides, primary constructs or mmRNA. This design may be based on the length of the coding region, the length of a particular feature or region (such as the first or flanking regions), or based on the length of the ultimate product expressed from the polynucleotides, primary constructs or mmRNA.

[0175] In this context the poly-A tail may be 10, 20, 30, 40, 50, 60, 70, 80, 90, or 100% greater in length than the polynucleotides, primary constructs or mmRNA or feature thereof. The poly-A tail may also be designed as a fraction of polynucleotides, primary constructs or mmRNA to which it belongs. In this context, the poly-A tail may be 10, 20, 30, 40, 50, 60, 70, 80, or 90% or more of the total length of the construct or the total length of the construct minus the poly-A tail. Further, engineered binding sites and conjugation of polynucleotides, primary constructs or mmRNA for Poly-A binding protein may enhance expression.

[0176] Additionally, multiple distinct polynucleotides, primary constructs or mmRNA may be linked together to the PABP (Poly-A binding protein) through the 3′-end using modified nucleotides at the 3′-terminus of the poly-A tail. Transfection experiments can be conducted in relevant cell lines at and protein production can be assayed by ELISA at 12 hr, 24 hr, 48 hr, 72 hr and day 7 post-transfection.

[0177] In one embodiment, the polynucleotide primary constructs of the present invention are designed to include a polyA-G Quartet. The G-quartet is a cyclic hydrogen bonded array of four guanine nucleotides that can be formed by G-rich sequences in both DNA and RNA. In this embodiment, the G-quartet is incorporated at the end of the poly-A tail. The resultant mmRNA construct is assayed for stability, protein production and other parameters including half-life at various time points. It has been discovered that the polyA-G quartet results in protein production equivalent to at least 75% of that seen using a poly-A tail of 120 nucleotides alone.

### Quantification

[0178] In one embodiment, the polynucleotides, primary constructs or mmRNA of the present invention may be quantified in exosomes derived from one or more bodily fluid. As used herein “bodily fluids” include peripheral blood, serum, plasma, ascites, urine, cerebrospinal fluid (CSF), sputum, saliva, bone marrow, synovial fluid, aqueous humor, amniotic fluid, cerumen, breast milk, broncheoalveolar lavage fluid, semen, prostatic fluid, cowper's fluid or pre-ejaculatory fluid, sweat, fecal matter, hair, tears, cyst fluid, pleural and peritoneal fluid, pericardial fluid, lymph, chyme, chyle, bile, interstitial fluid, menses, pus, sebum, vomit, vaginal secretions, mucosal secretion, stool water, pancreatic juice, lavage fluids from sinus cavities, bronchopulmonary aspirates, blastocyl cavity fluid, and umbilical cord blood. Alternatively, exosomes may be retrieved from an organ selected from the group consisting of lung, heart, pancreas, stomach, intestine, bladder, kidney, ovary, testis, skin, colon, breast, prostate, brain, esophagus, liver, and placenta.

[0179] In the quantification method, a sample of not more than 2 mL is obtained from the subject and the exosomes isolated by size exclusion chromatography, density gradient centrifugation, differential centrifugation, nanomembrane ultrafiltration, immunoabsorbent capture, affinity purification, microfluidic separation, or combinations thereof. In the analysis, the level or concentration of a polynucleotide, primary construct or mmRNA may be an expression level, presence, absence, truncation or alteration of the administered construct. It is advantageous to correlate the level with one or more clinical phenotypes or with an assay for a human disease biomarker. The assay may be performed using construct specific probes, cytometry, qRT-PCR, real-time PCR, PCR, flow cytometry, electrophoresis, mass spectrometry, or combinations thereof while the exosomes may be isolated using immunohistochemical methods such as enzyme linked immunosorbent assay (ELISA) methods. Exosomes may also be isolated by size exclusion chromatography, density gradient centrifugation, differential centrifugation, nanomembrane ultrafiltration, immunoabsorbent capture, affinity purification, microfluidic separation, or combinations thereof.

[0180] These methods afford the investigator the ability to monitor, in real time, the level of polynucleotides, primary constructs or mmRNA remaining or delivered. This is possible because the polynucleotides, primary constructs or mmRNA of the present invention differ from the endogenous forms due to the structural or chemical modifications.

### II. Design and Synthesis of mmRNA

[0181] Polynucleotides, primary constructs or mmRNA for use in accordance with the invention may be prepared according to any available technique including, but not limited to chemical synthesis, enzymatic synthesis, which is generally termed in vitro transcription (IVT) or enzymatic or chemical cleavage of a longer precursor, etc. Methods of synthesizing RNAs are known in the art (see, e.g., Gait, M. J. (ed.) Oligonucleotide synthesis: a practical approach, Oxford [Oxfordshire], Washington, DC: IRL Press, 1984; and Herdewijn, P. (ed.) Oligonucleotide synthesis: methods and applications, Methods in Molecular Biology, v. 288 (Clifton, N.J.) Totowa, N.J.: Humana Press, 2005; both of which are incorporated herein by reference).

[0182] The process of design and synthesis of the primary constructs of the invention generally includes the steps of gene construction, mRNA production (either with or without modifications) and purification. In the enzymatic synthesis method, a target polynucleotide sequence encoding the polypeptide of interest is first selected for incorporation into a vector which will be amplified to produce a cDNA template. Optionally, the target polynucleotide sequence and/or any flanking sequences may be codon optimized. The cDNA template is then used to produce mRNA through in vitro transcription (IVT). After production, the mRNA may undergo purification and clean-up processes. The steps of which are provided in more detail below.

### Gene Construction

[0183] The step of gene construction may include, but is not limited to gene synthesis, vector amplification, plasmid purification, plasmid linearization and clean-up, and cDNA template synthesis and clean-up.

### Gene Synthesis

[0184] Once a polypeptide of interest, or target, is selected for production, a primary construct is designed. Within the primary construct, a first region of linked nucleosides encoding the polypeptide of interest may be constructed using an open reading frame (ORF) of a selected nucleic acid (DNA or RNA) transcript. The ORF may comprise the wild type ORF, an isoform, variant or a fragment thereof. As used herein, an “open reading frame” or “ORF” is meant to refer to a nucleic acid sequence (DNA or RNA) which is capable of encoding a polypeptide of interest. ORFs often begin with the start codon, ATG and end with a nonsense or termination codon or signal.

[0185] Further, the nucleotide sequence of the first region may be codon optimized. Codon optimization methods are known in the art and may be useful in efforts to achieve one or more of several goals. These goals include to match codon frequencies in target and host organisms to ensure proper folding, bias GC content to increase mRNA stability or reduce secondary structures, minimize tandem repeat codons or base runs that may impair gene construction or expression, customize transcriptional and translational control regions, insert or remove protein trafficking sequences, remove/add post translation modification sites in encoded protein (e.g. glycosylation sites), add, remove or shuffle protein domains, insert or delete restriction sites, modify ribosome binding sites and mRNA degradation sites, to adjust translational rates to allow the various domains of the protein to fold properly, or to reduce or eliminate problem secondary structures within the mRNA. Codon optimization tools, algorithms and services are known in the art, non-limiting examples include services from GeneArt (Life Technologies), DNA2.0 (Menlo Park CA) and/or proprietary methods. In one embodiment, the ORF sequence is optimized using optimization algorithms. Codon options for each amino acid are given in Table 1.

TABLE 1
Codon Options

| | Single | |
|---|---|---|
| | Letter | |
| Amino Acid | Code | Codon Options |
| Isoleucine | I | ATT, ATC, ATA |
| Leucine | L | CTT, CTC, CTA, CTG, TTA, TTG |
| Valine | V | GTT, GTC, GTA, GTG |
| Phenyl- | F | TTT, TTC |
| alanine | | |
| Methionine | M | ATG |
| Cysteine | C | TGT, TGC |
| Alanine | A | GCT, GCC, GCA, GCG |
| Glycine | G | GGT, GGC, GGA, GGG |
| Proline | P | CCT, CCC, CCA, CCG |
| Threonine | T | ACT, ACC, ACA, ACG |
| Serine | S | TCT, TCC, TCA, TCG, AGT, AGC |
| Tyrosine | Y | TAT, TAC |
| Tryptophan | W | TGG |
| Glutamine | Q | CAA, CAG |
| Asparagine | N | AAT, AAC |
| Histidine | H | CAT, CAC |
| Glutamic | E | GAA, GAG |
| acid | | |
| Aspartic | D | GAT, GAC |
| acid | | |
| Lysine | K | AAA, AAG |
| Arginine | R | CGT, CGC, CGA, CGG, AGA, AGG |
| Seleno- | Sec | UGA in mRNA in presence of |
| cysteine | | Selenocystein insertion |
| | | element (SECIS) |
| Stop codons | Stop | TAA, TAG, TGA |

[0186] Features, which may be considered beneficial in some embodiments of the present invention, may be encoded by the primary construct and may flank the ORF as a first or second flanking region. The flanking regions may be incorporated into the primary construct before and/or after optimization of the ORF. It is not required that a primary construct contain both a 5′ and 3′ flanking region. Examples of such features include, but are not limited to, untranslated regions (UTRs), Kozak sequences, an oligo (dT) sequence, and detectable tags and may include multiple cloning sites which may have XbaI recognition.

[0187] In some embodiments, a 5′ UTR and/or a 3′ UTR may be provided as flanking regions. Multiple 5′ or 3′ UTRs may be included in the flanking regions and may be the same or of different sequences. Any portion of the flanking regions, including none, may be codon optimized and any may independently contain one or more different structural or chemical modifications, before and/or after codon optimization. Combinations of features may be included in the first and second flanking regions and may be contained within other features. For example, the ORF may be flanked by a 5′ UTR which may contain a strong Kozak translational initiation signal and/or a 3′ UTR which may include an oligo (dT) sequence for templated addition of a poly-A tail. 5′UTR may comprise a first polynucleotide fragment and a second polynucleotide fragment from the same and/or different genes such as the 5′UTRs described in US Patent Application Publication No. 20100293625, herein incorporated by reference in its entirety.

[0188] Tables 2 and 3 provide a listing of exemplary UTRs which may be utilized in the primary construct of the present invention as flanking regions. Shown in Table 2 is a listing of a 5′-untranslated region of the invention. Variants of 5′ UTRs may be utilized wherein one or more nucleotides are added or removed to the termini, including A, T, C or G.

TABLE 2
5′-Untranslated Regions

| | | | SEQ |
|---|---|---|---|
| 5′ UTR | Name/ | | ID |
| Identifier | Description | Sequence | NO. |
| 5UTR-001 | Upstream | GGGAAATAAGAGAGAAAAG | 1 |
| | UTR | AAGAGTAAGAAGAAATATA | |
| | | AGAGCCACC | |
| 5UTR-002 | Upstream | GGGAGATCAGAGAGAAAAG | 2 |
| | UTR | AAGAGTAAGAAGAAATATA | |
| | | AGAGCCACC | |
| 5UTR-003 | Upstream | GGAATAAAAGTCTCAACAC | 3 |
| | UTR | AACATATACAAAACAAACG | |
| | | AATCTCAAGCAATCAAGCA | |
| | | TTCTACTTCTATTGCAGCA | |
| | | ATTTAAATCATTTCTTTTA | |
| | | AAGCAAAAGCAATTTTCTG | |
| | | AAAATTTTCACCATTTACG | |
| | | AACGATAGCAAC | |
| 5UTR-004 | Upstream | GGGAGACAAGCUUGGCAUU | 4 |
| | UTR | CCGGUACUGUUGGUAAAGC | |
| | | CACC | |

[0189] Shown in Table 3 is a representative listing of 3′-untranslated regions of the invention. Variants of 3′ UTRs may be utilized wherein one or more nucleotides are added or removed to the termini, including A, T, C or G.

TABLE 3
3′-Untranslated Regions

| 3′ UTR | Name/ | | SEQ |
|---|---|---|---|
| Ident- | Descrip- | | ID |
| ifier | tion | Sequence | NO. |
| 3UTR-001 | Creatine | GCGCCTGCCCACCTGCCACCGACTGCTGG | 5 |
| | Kinase | AACCCAGCCAGTGGGAGGGCCTGGCCCAC | |
| | | CAGAGTCCTGCTCCCTCACTCCTCGCCCC | |
| | | GCCCCCTGTCCCAGAGTCCCACCTGGGGG | |
| | | CTCTCTCCACCCTTCTCAGAGTTCCAGTT | |
| | | TCAACCAGAGTTCCAACCAATGGGCTCCA | |
| | | TCCTCTGGATTCTGGCCAATGAAATATCT | |
| | | CCCTGGCAGGGTCCTCTTCTTTTCCCAGA | |
| | | GCTCCACCCCAACCAGGAGCTCTAGTTAA | |
| | | TGGAGAGCTCCCAGCACACTCGGAGCTTG | |
| | | TGCTTTGTCTCCACGCAAAGCGATAAATA | |
| | | AAAGCATTGGTGGCCTTTGGTCTTTGAAT | |
| | | AAAGCCTGAGTAGGAAGTCTAGA | |
| 3UTR-002 | Myoglobin | GCCCCTGCCGCTCCCACCCCCACCCATCT | 6 |
| | | GGGCCCCGGGTTCAAGAGAGAGCGGGGTC | |
| | | TGATCTCGTGTAGCCATATAGAGTTTGCT | |
| | | TCTGAGTGTCTGCTTTGTTTAGTAGAGGT | |
| | | GGGCAGGAGGAGCTGAGGGGCTGGGGCTG | |
| | | GGGTGTTGAAGTTGGCTTTGCATGCCCAG | |
| | | CGATGCGCCTCCCTGTGGGATGTCATCAC | |
| | | CCTGGGAACCGGGAGTGGCCCTTGGCTCA | |
| | | CTGTGTTCTGCATGGTTTGGATCTGAATT | |
| | | AATTGTCCTTTCTTCTAAATCCCAACCGA | |
| | | ACTTCTTCCAACCTCCAAACTGGCTGTAA | |
| | | CCCCAAATCCAAGCCATTAACTACACCTG | |
| | | ACAGTAGCAATTGTCTGATTAATCACTGG | |
| | | CCCCTTGAAGACAGCAGAATGTCCCTTTG | |
| | | CAATGAGGAGGAGATCTGGGCTGGGCGGG | |
| | | CCAGCTGGGGAAGCATTTGACTATCTGGA | |
| | | ACTTGTGTGTGCCTCCTCAGGTATGGCAG | |
| | | TGACTCACCTGGTTTTAATAAAACAACCT | |
| | | GCAACATCTCATGGTCTTTGAATAAAGCC | |
| | | TGAGTAGGAAGTCTAGA | |
| 3UTR-003 | α-actin | ACACACTCCACCTCCAGCACGCGACTTCT | 7 |
| | | CAGGACGACGAATCTTCTCAATGGGGGGG | |
| | | CGGCTGAGCTCCAGCCACCCCGCAGTCAC | |
| | | TTTCTTTGTAACAACTTCCGTTGCTGCCA | |
| | | TCGTAAACTGACACAGTGTTTATAACGTG | |
| | | TACATACATTAACTTATTACCTCATTTTG | |
| | | TTATTTTTCGAAACAAAGCCCTGTGGAAG | |
| | | AAAATGGAAAACTTGAAGAAGCATTAAAG | |
| | | TCATTCTGTTAAGCTGCGTAAATGGTCTT | |
| | | TGAATAAAGCCTGAGTAGGAAGTCTAGA | |
| 3UTR-004 | Albumin | CATCACATTTAAAAGCATCTCAGCCTACC | 8 |
| | | ATGAGAATAAGAGAAAGAAAATGAAGATC | |
| | | AAAAGCTTATTCATCTGTTTTTCTTTTTC | |
| | | GTTGGTGTAAAGCCAACACCCTGTCTAAA | |
| | | AAACATAAATTTCTTTAATCATTTTGCCT | |
| | | CTTTTCTCTGTGCTTCAATTAATAAAAAA | |
| | | TGGAAAGAATCTAATAGAGTGGTACAGCA | |
| | | CTGTTATTTTTCAAAGATGTGTTGCTATC | |
| | | CTGAAAATTCTGTAGGTTCTGTGGAAGTT | |
| | | CCAGTGTTCTCTCTTATTCCACTTCGGTA | |
| | | GAGGATTTCTAGTTTCTTGTGGGCTAATT | |
| | | AAATAAATCATTAATACTCTTCTAATGGT | |
| | | CTTTGAATAAAGCCTGAGTAGGAAGTCTA | |
| | | GA | |
| 3UTR-005 | α-globin | GCTGCCTTCTGCGGGGCTTGCCTTCTGGC | 9 |
| | | CATGCCCTTCTTCTCTCCCTTGCACCTGT | |
| | | ACCTCTTGGTCTTTGAATAAAGCCTGAGT | |
| | | AGGAAGGCGGCCGCTCGAGCATGCATCTA | |
| | | GA | |
| 3UTR-006 | G-CSF | GCCAAGCCCTCCCCATCCCATGTATTTAT | 10 |
| | | CTCTATTTAATATTTATGTCTATTTAAGC | |
| | | CTCATATTTAAAGACAGGGAAGAGCAGAA | |
| | | CGGAGCCCCAGGCCTCTGTGTCCTTCCCT | |
| | | GCATTTCTGAGTTTCATTCTCCTGCCTGT | |
| | | AGCAGTGAGAAAAAGCTCCTGTCCTCCCA | |
| | | TCCCCTGGACTGGGAGGTAGATAGGTAAA | |
| | | TACCAAGTATTTATTACTATGACTGCTCC | |
| | | CCAGCCCTGGCTCTGCAATGGGCACTGGG | |
| | | ATGAGCCGCTGTGAGCCCCTGGTCCTGAG | |
| | | GGTCCCCACCTGGGACCCTTGAGAGTATC | |
| | | AGGTCTCCCACGTGGGAGACAAGAAATCC | |
| | | CTGTTTAATATTTAAACAGCAGTGTTCCC | |
| | | CATCTGGGTCCTTGCACCCCTCACTCTGG | |
| | | CCTCAGCCGACTGCACAGCGGCCCCTGCA | |
| | | TCCCCTTGGCTGTGAGGCCCCTGGACAAG | |
| | | CAGAGGTGGCCAGAGCTGGGAGGCATGGC | |
| | | CCTGGGGTCCCACGAATTTGCTGGGGAAT | |
| | | CTCGTTTTTCTTCTTAAGACTTTTGGGAC | |
| | | ATGGTTTGACTCCCGAACATCACCGACGC | |
| | | GTCTCCTGTTTTTCTGGGTGGCCTCGGGA | |
| | | CACCTGCCCTGCCCCCACGAGGGTCAGGA | |
| | | CTGTGACTCTTTTTAGGGCCAGGCAGGTG | |
| | | CCTGGACATTTGCCTTGCTGGACGGGGAC | |
| | | TGGGGATGTGGGAGGGAGCAGACAGGAGG | |
| | | AATCATGTCAGGCCTGTGTGTGAAAGGAA | |
| | | GCTCCACTGTCACCCTCCACCTCTTCACC | |
| | | CCCCACTCACCAGTGTCCCCTCCACTGTC | |
| | | ACATTGTAACTGAACTTCAGGATAATAAA | |
| | | GTGTTTGCCTCCATGGTCTTTGAATAAAG | |
| | | CCTGAGTAGGAAGGCGGCCGCTCGAGCAT | |
| | | GCATCTAGA | |
| 3UTR-007 | Colla2; | ACTCAATCTAAATTAAAAAAGAAAGAAAT | 11 |
| | collagen, | TTGAAAAAACTTTCTCTTTGCCATTTCTT | |
| | type I, | CTTCTTCTTTTTTAACTGAAAGCTGAATC | |
| | alpha 2 | CTTCCATTTCTTCTGCACATCTACTTGCT | |
| | | TAAATTGTGGGCAAAAGAGAAAAAGAAGG | |
| | | ATTGATCAGAGCATTGTGCAATACAGTTT | |
| | | CATTAACTCCTTCCCCCGCTCCCCCAAAA | |
| | | ATTTGAATTTTTTTTTCAACACTCTTACA | |
| | | CCTGTTATGGAAAATGTCAACCTTTGTAA | |
| | | GAAAACCAAAATAAAAATTGAAAAATAAA | |
| | | AACCATAAACATTTGCACCACTTGTGGCT | |
| | | TTTGAATATCTTCCACAGAGGGAAGTTTA | |
| | | AAACCCAAACTTCCAAAGGTTTAAACTAC | |
| | | CTCAAAACACTTTCCCATGAGTGTGATCC | |
| | | ACATTGTTAGGTGCTGACCTAGACAGAGA | |
| | | TGAACTGAGGTCCTTGTTTTGTTTTGTTC | |
| | | ATAATACAAAGGTGCTAATTAATAGTATT | |
| | | TCAGATACTTGAAGAATGTTGATGGTGCT | |
| | | AGAAGAATTTGAGAAGAAATACTCCTGTA | |
| | | TTGAGTTGTATCGTGTGGTGTATTTTTTA | |
| | | AAAAATTTGATTTAGCATTCATATTTTCC | |
| | | ATCTTATTCCCAATTAAAAGTATGCAGAT | |
| | | TATTTGCCCAAATCTTCTTCAGATTCAGC | |
| | | ATTTGTTCTTTGCCAGTCTCATTTTCATC | |
| | | TTCTTCCATGGTTCCACAGAAGCTTTGTT | |
| | | TCTTGGGCAAGCAGAAAAATTAAATTGTA | |
| | | CCTATTTTGTATATGTGAGATGTTTAAAT | |
| | | AAATTGTGAAAAAAATGAAATAAAGCATG | |
| | | TTTGGTTTTCCAAAAGAACATAT | |
| 3UTR-008 | Col6a2; | CGCCGCCGCCCGGGCCCCGCAGTCGAGGG | 12 |
| | collagen, | TCGTGAGCCCACCCCGTCCATGGTGCTAA | |
| | type VI, | GCGGGCCCGGGTCCCACACGGCCAGCACC | |
| | alpha 2 | GCTGCTCACTCGGACGACGCCCTGGGCCT | |
| | | GCACCTCTCCAGCTCCTCCCACGGGGTCC | |
| | | CCGTAGCCCCGGCCCCCGCCCAGCCCCAG | |
| | | GTCTCCCCAGGCCCTCCGCAGGCTGCCCG | |
| | | GCCTCCCTCCCCCTGCAGCCATCCCAAGG | |
| | | CTCCTGACCTACCTGGCCCCTGAGCTCTG | |
| | | GAGCAAGCCCTGACCCAATAAAGGCTTTG | |
| | | AACCCAT | |
| 3UTR-009 | RPN1; | GGGGCTAGAGCCCTCTCCGCACAGCGTGG | 13 |
| | ribo- | AGACGGGGCAAGGAGGGGGGTTATTAGGA | |
| | phorin I | TTGGTGGTTTTGTTTTGCTTTGTTTAAAG | |
| | | CCGTGGGAAAATGGCACAACTTTACCTCT | |
| | | GTGGGAGATGCAACACTGAGAGCCAAGGG | |
| | | GTGGGAGTTGGGATAATTTTTATATAAAA | |
| | | GAAGTTTTTCCACTTTGAATTGCTAAAAG | |
| | | TGGCATTTTTCCTATGTGCAGTCACTCCT | |
| | | CTCATTTCTAAAATAGGGACGTGGCCAGG | |
| | | CACGGTGGCTCATGCCTGTAATCCCAGCA | |
| | | CTTTGGGAGGCCGAGGCAGGCGGCTCACG | |
| | | AGGTCAGGAGATCGAGACTATCCTGGCTA | |
| | | ACACGGTAAAACCCTGTCTCTACTAAAAG | |
| | | TACAAAAAATTAGCTGGGCGTGGTGGTGG | |
| | | GCACCTGTAGTCCCAGCTACTCGGGAGGC | |
| | | TGAGGCAGGAGAAAGGCATGAATCCAAGA | |
| | | GGCAGAGCTTGCAGTGAGCTGAGATCACG | |
| | | CCATTGCACTCCAGCCTGGGCAACAGTGT | |
| | | TAAGACTCTGTCTCAAATATAAATAAATA | |
| | | AATAAATAAATAAATAAATAAATAAAAAT | |
| | | AAAGCGAGATGTTGCCCTCAAA | |
| 3UTR-010 | LRP1; low | GGCCCTGCCCCGTCGGACTGCCCCCAGAA | 14 |
| | density | AGCCTCCTGCCCCCTGCCAGTGAAGTCCT | |
| | lipo- | TCAGTGAGCCCCTCCCCAGCCAGCCCTTC | |
| | protein | CCTGGCCCCGCCGGATGTATAAATGTAAA | |
| | receptor- | AATGAAGGAATTACATTTTATATGTGAGC | |
| | related | GAGCAAGCCGGCAAGCGAGCACAGTATTA | |
| | protein 1 | TTTCTCCATCCCCTCCCTGCCTGCTCCTT | |
| | | GGCACCCCCATGCTGCCTTCAGGGAGACA | |
| | | GGCAGGGAGGGCTTGGGGCTGCACCTCCT | |
| | | ACCCTCCCACCAGAACGCACCCCACTGGG | |
| | | AGAGCTGGTGGTGCAGCCTTCCCCTCCCT | |
| | | GTATAAGACACTTTGCCAAGGCTCTCCCC | |
| | | TCTCGCCCCATCCCTGCTTGCCCGCTCCC | |
| | | ACAGCTTCCTGAGGGCTAATTCTGGGAAG | |
| | | GGAGAGTTCTTTGCTGCCCCTGTCTGGAA | |
| | | GACGTGGCTCTGGGTGAGGTAGGCGGGAA | |
| | | AGGATGGAGTGTTTTAGTTCTTGGGGGAG | |
| | | GCCACCCCAAACCCCAGCCCCAACTCCAG | |
| | | GGGCACCTATGAGATGGCCATGCTCAACC | |
| | | CCCCTCCCAGACAGGCCCTCCCTGTCTCC | |
| | | AGGGCCCCCACCGAGGTTCCCAGGGCTGG | |
| | | AGACTTCCTCTGGTAAACATTCCTCCAGC | |
| | | CTCCCCTCCCCTGGGGACGCCAAGGAGGT | |
| | | GGGCCACACCCAGGAAGGGAAAGCGGGCA | |
| | | GCCCCGTTTTGGGGACGTGAACGTTTTAA | |
| | | TAATTTTTGCTGAATTCCTTTACAACTAA | |
| | | ATAACACAGATATTGTTATAAATAAAATT | |
| | | GT | |
| 3UTR-011 | Nnt1; | ATATTAAGGATCAAGCTGTTAGCTAATAA | 15 |
| | cardio- | TGCCACCTCTGCAGTTTTGGGAACAGGCA | |
| | trophin- | AATAAAGTATCAGTATACATGGTGATGTA | |
| | like | CATCTGTAGCAAAGCTCTTGGAGAAAATG | |
| | cytokine | AAGACTGAAGAAAGCAAAGCAAAAACTGT | |
| | factor 1 | ATAGAGAGATTTTTCAAAAGCAGTAATCC | |
| | | CTCAATTTTAAAAAAGGATTGAAAATTCT | |
| | | AAATGTCTTTCTGTGCATATTTTTTGTGT | |
| | | TAGGAATCAAAAGTATTTTATAAAAGGAG | |
| | | AAAGAACAGCCTCATTTTAGATGTAGTCC | |
| | | TGTTGGATTTTTTATGCCTCCTCAGTAAC | |
| | | CAGAAATGTTTTAAAAAACTAAGTGTTTA | |
| | | GGATTTCAAGACAACATTATACATGGCTC | |
| | | TGAAATATCTGACACAATGTAAACATTGC | |
| | | AGGCACCTGCATTTTATGTTTTTTTTTTC | |
| | | AACAAATGTGACTAATTTGAAACTTTTAT | |
| | | GAACTTCTGAGCTGTCCCCTTGCAATTCA | |
| | | ACCGCAGTTTGAATTAATCATATCAAATC | |
| | | AGTTTTAATTTTTTAAATTGTACTTCAGA | |
| | | GTCTATATTTCAAGGGCACATTTTCTCAC | |
| | | TACTATTTTAATACATTAAAGGACTAAAT | |
| | | AATCTTTCAGAGATGCTGGAAACAAATCA | |
| | | TTTGCTTTATATGTTTCATTAGAATACCA | |
| | | ATGAAACATACAACTTGAAAATTAGTAAT | |
| | | AGTATTTTTGAAGATCCCATTTCTAATTG | |
| | | GAGATCTCTTTAATTTCGATCAACTTATA | |
| | | ATGTGTAGTACTATATTAAGTGCACTTGA | |
| | | GTGGAATTCAACATTTGACTAATAAAATG | |
| | | AGTTCATCATGTTGGCAAGTGATGTGGCA | |
| | | ATTATCTCTGGTGACAAAAGAGTAAAATC | |
| | | AAATATTTCTGCCTGTTACAAATATCAAG | |
| | | GAAGACCTGCTACTATGAAATAGATGACA | |
| | | TTAATCTGTCTTCACTGTTTATAATACGG | |
| | | ATGGATTTTTTTTCAAATCAGTGTGTGTT | |
| | | TTGAGGTCTTATGTAATTGATGACATTTG | |
| | | AGAGAAATGGTGGCTTTTTTTAGCTACCT | |
| | | CTTTGTTCATTTAAGCACCAGTAAAGATC | |
| | | ATGTCTTTTTATAGAAGTGTAGATTTTCT | |
| | | TTGTGACTTTGCTATCGTGCCTAAAGCTC | |
| | | TAAATATAGGTGAATGTGTGATGAATACT | |
| | | CAGATTATTTGTCTCTCTATATAATTAGT | |
| | | TTGGTACTAAGTTTCTCAAAAAATTATTA | |
| | | ACACATGAAAGACAATCTCTAAACCAGAA | |
| | | AAAGAAGTAGTACAAATTTTGTTACTGTA | |
| | | ATGCTCGCGTTTAGTGAGTTTAAAACACA | |
| | | CAGTATCTTTTGGTTTTATAATCAGTTTC | |
| | | TATTTTGCTGTGCCTGAGATTAAGATCTG | |
| | | TGTATGTGTGTGTGTGTGTGTGTGCGTTT | |
| | | GTGTGTTAAAGCAGAAAAGACTTTTTTAA | |
| | | AAGTTTTAAGTGATAAATGCAATTTGTTA | |
| | | ATTGATCTTAGATCACTAGTAAACTCAGG | |
| | | GCTGAATTATACCATGTATATTCTATTAG | |
| | | AAGAAAGTAAACACCATCTTTATTCCTGC | |
| | | CCTTTTTCTTCTCTCAAAGTAGTTGTAGT | |
| | | TATATCTAGAAAGAAGCAATTTTGATTTC | |
| | | TTGAAAAGGTAGTTCCTGCACTCAGTTTA | |
| | | AACTAAAAATAATCATACTTGGATTTTAT | |
| | | TTATTTTTGTCATAGTAAAAATTTTAATT | |
| | | TATATATATTTTTATTTAGTATTATCTTA | |
| | | TTCTTTGCTATTTGCCAATCCTTTGTCAT | |
| | | CAATTGTGTTAAATGAATTGAAAATTCAT | |
| | | GCCCTGTTCATTTTATTTTACTTTATTGG | |
| | | TTAGGATATTTAAAGGATTTTTGTATATA | |
| | | TAATTTCTTAAATTAATATTCCAAAAGGT | |
| | | TAGTGGACTTAGATTATAAATTATGGCAA | |
| | | AAATCTAAAAACAACAAAAATGATTTTTA | |
| | | TACATTCTATTTCATTATTCCTCTTTTTC | |
| | | CAATAAGTCATACAATTGGTAGATATGAC | |
| | | TTATTTTATTTTTGTATTATTCACTATAT | |
| | | CTTTATGATATTTAAGTATAAATAATTAA | |
| | | AAAAATTTATTGTACCTTATAGTCTGTCA | |
| | | CCAAAAAAAAAAAATTATCTGTAGGTAGT | |
| | | GAAATGCTAATGTTGATTTGTCTTTAAGG | |
| | | GCTTGTTAACTATCCTTTATTTTCTCATT | |
| | | TGTCTTAAATTAGGAGTTTGTGTTTAAAT | |
| | | TACTCATCTAAGCAAAAAATGTATATAAA | |
| | | TCCCATTACTGGGTATATACCCAAAGGAT | |
| | | TATAAATCATGCTGCTATAAAGACACATG | |
| | | CACACGTATGTTTATTGCAGCACTATTCA | |
| | | CAATAGCAAAGACTTGGAACCAACCCAAA | |
| | | TGTCCATCAATGATAGACTTGATTAAGAA | |
| | | AATGTGCACATATACACCATGGAATACTA | |
| | | TGCAGCCATAAAAAAGGATGAGTTCATGT | |
| | | CCTTTGTAGGGACATGGATAAAGCTGGAA | |
| | | ACCATCATTCTGAGCAAACTATTGCAAGG | |
| | | ACAGAAAACCAAACACTGCATGTTCTCAC | |
| | | TCATAGGTGGGAATTGAACAATGAGAACA | |
| | | CTTGGACACAAGGTGGGGAACACCACACA | |
| | | CCAGGGCCTGTCATGGGGTGGGGGGAGTG | |
| | | GGGAGGGATAGCATTAGGAGATATACCTA | |
| | | ATGTAAATGATGAGTTAATGGGTGCAGCA | |
| | | CACCAACATGGCACATGTATACATATGTA | |
| | | GCAAACCTGCACGTTGTGCACATGTACCC | |
| | | TAGAACTTAAAGTATAATTAAAAAAAAAA | |
| | | AGAAAACAGAAGCTATTTATAAAGAAGTT | |
| | | ATTTGCTGAAATAAATGTGATCTTTCCCA | |
| | | TTAAAAAAATAAAGAAATTTTGGGGTAAA | |
| | | AAAACACAATATATTGTATTCTTGAAAAA | |
| | | TTCTAAGAGAGTGGATGTGAAGTGTTCTC | |
| | | ACCACAAAAGTGATAACTAATTGAGGTAA | |
| | | TGCACATATTAATTAGAAAGATTTTGTCA | |
| | | TTCCACAATGTATATATACTTAAAAATAT | |
| | | GTTATACACAATAAATACATACATTAAAA | |
| | | AATAAGTAAATGTA | |
| 3UTR-012 | Col6al; | CCCACCCTGCACGCCGGCACCAAACCCTG | 16 |
| | collagen, | TCCTCCCACCCCTCCCCACTCATCACTAA | |
| | type VI, | ACAGAGTAAAATGTGATGCGAATTTTCCC | |
| | alpha 1 | GACCAACCTGATTCGCTAGATTTTTTTTA | |
| | | AGGAAAAGCTTGGAAAGCCAGGACACAAC | |
| | | GCTGCTGCCTGCTTTGTGCAGGGTCCTCC | |
| | | GGGGCTCAGCCCTGAGTTGGCATCACCTG | |
| | | CGCAGGGCCCTCTGGGGCTCAGCCCTGAG | |
| | | CTAGTGTCACCTGCACAGGGCCCTCTGAG | |
| | | GCTCAGCCCTGAGCTGGCGTCACCTGTGC | |
| | | AGGGCCCTCTGGGGCTCAGCCCTGAGCTG | |
| | | GCCTCACCTGGGTTCCCCACCCCGGGCTC | |
| | | TCCTGCCCTGCCCTCCTGCCCGCCCTCCC | |
| | | TCCTGCCTGCGCAGCTCCTTCCCTAGGCA | |
| | | CCTCTGTGCTGCATCCCACCAGCCTGAGC | |
| | | AAGACGCCCTCTCGGGGCCTGTGCCGCAC | |
| | | TAGCCTCCCTCTCCTCTGTCCCCATAGCT | |
| | | GGTTTTTCCCACCAATCCTCACCTAACAG | |
| | | TTACTTTACAATTAAACTCAAAGCAAGCT | |
| | | CTTCTCCTCAGCTTGGGGCAGCCATTGGC | |
| | | CTCTGTCTCGTTTTGGGAAACCAAGGTCA | |
| | | GGAGGCCGTTGCAGACATAAATCTCGGCG | |
| | | ACTCGGCCCCGTCTCCTGAGGGTCCTGCT | |
| | | GGTGACCGGCCTGGACCTTGGCCCTACAG | |
| | | CCCTGGAGGCCGCTGCTGACCAGCACTGA | |
| | | CCCCGACCTCAGAGAGTACTCGCAGGGGC | |
| | | GCTGGCTGCACTCAAGACCCTCGAGATTA | |
| | | ACGGTGCTAACCCCGTCTGCTCCTCCCTC | |
| | | CCGCAGAGACTGGGGCCTGGACTGGACAT | |
| | | GAGAGCCCCTTGGTGCCACAGAGGGCTGT | |
| | | GTCTTACTAGAAACAACGCAAACCTCTCC | |
| | | TTCCTCAGAATAGTGATGTGTTCGACGTT | |
| | | TTATCAAAGGCCCCCTTTCTATGTTCATG | |
| | | TTAGTTTTGCTCCTTCTGTGTTTTTTTCT | |
| | | GAACCATATCCATGTTGCTGACTTTTCCA | |
| | | AATAAAGGTTTTCACTCCTCTC | |
| 3UTR-013 | Calr; | AGAGGCCTGCCTCCAGGGCTGGACTGAGG | 17 |
| | calreti- | CCTGAGCGCTCCTGCCGCAGAGCTGGCCG | |
| | culin | CGCCAAATAATGTCTCTGTGAGACTCGAG | |
| | | AACTTTCATTTTTTTCCAGGCTGGTTCGG | |
| | | ATTTGGGGTGGATTTTGGTTTTGTTCCCC | |
| | | TCCTCCACTCTCCCCCACCCCCTCCCCGC | |
| | | CCTTTTTTTTTTTTTTTTTTAAACTGGTA | |
| | | TTTTATCTTTGATTCTCCTTCAGCCCTCA | |
| | | CCCCTGGTTCTCATCTTTCTTGATCAACA | |
| | | TCTTTTCTTGCCTCTGTCCCCTTCTCTCA | |
| | | TCTCTTAGCTCCCCTCCAACCTGGGGGGC | |
| | | AGTGGTGTGGAGAAGCCACAGGCCTGAGA | |
| | | TTTCATCTGCTCTCCTTCCTGGAGCCCAG | |
| | | AGGAGGGCAGCAGAAGGGGGTGGTGTCTC | |
| | | CAACCCCCCAGCACTGAGGAAGAACGGGG | |
| | | CTCTTCTCATTTCACCCCTCCCTTTCTCC | |
| | | CCTGCCCCCAGGACTGGGCCACTTCTGGG | |
| | | TGGGGCAGTGGGTCCCAGATTGGCTCACA | |
| | | CTGAGAATGTAAGAACTACAAACAAAATT | |
| | | TCTATTAAATTAAATTTTGTGTCTCC | |
| 3UTR-014 | Collal; | CTCCCTCCATCCCAACCTGGCTCCCTCCC | 18 |
| | collagen, | ACCCAACCAACTTTCCCCCCAACCCGGAA | |
| | type I, | ACAGACAAGCAACCCAAACTGAACCCCCT | |
| | alpha 1 | CAAAAGCCAAAAAATGGGAGACAATTTCA | |
| | | CATGGACTTTGGAAAATATTTTTTTCCTT | |
| | | TGCATTCATCTCTCAAACTTAGTTTTTAT | |
| | | CTTTGACCAACCGAACATGACCAAAAACC | |
| | | AAAAGTGCATTCAACCTTACCAAAAAAAA | |
| | | AAAAAAAAAAAGAATAAATAAATAACTTT | |
| | | TTAAAAAAGGAAGCTTGGTCCACTTGCTT | |
| | | GAAGACCCATGCGGGGGTAAGTCCCTTTC | |
| | | TGCCCGTTGGGCTTATGAAACCCCAATGC | |
| | | TGCCCTTTCTGCTCCTTTCTCCACACCCC | |
| | | CCTTGGGGCCTCCCCTCCACTCCTTCCCA | |
| | | AATCTGTCTCCCCAGAAGACACAGGAAAC | |
| | | AATGTATTGTCTGCCCAGCAATCAAAGGC | |
| | | AATGCTCAAACACCCAAGTGGCCCCCACC | |
| | | CTCAGCCCGCTCCTGCCCGCCCAGCACCC | |
| | | CCAGGCCCTGGGGGACCTGGGGTTCTCAG | |
| | | ACTGCCAAAGAAGCCTTGCCATCTGGCGC | |
| | | TCCCATGGCTCTTGCAACATCTCCCCTTC | |
| | | GTTTTTGAGGGGGTCATGCCGGGGGAGCC | |
| | | ACCAGCCCCTCACTGGGTTCGGAGGAGAG | |
| | | TCAGGAAGGGCCACGACAAAGCAGAAACA | |
| | | TCGGATTTGGGGAACGCGTGTCAATCCCT | |
| | | TGTGCCGCAGGGCTGGGCGGGAGAGACTG | |
| | | TTCTGTTCCTTGTGTAACTGTGTTGCTGA | |
| | | AAGACTACCTCGTTCTTGTCTTGATGTGT | |
| | | CACCGGGGCAACTGCCTGGGGGCGGGGAT | |
| | | GGGGGCAGGGTGGAAGCGGCTCCCCATTT | |
| | | TATACCAAAGGTGCTACATCTATGTGATG | |
| | | GGTGGGGGGGGAGGGAATCACTGGTGCTA | |
| | | TAGAAATTGAGATGCCCCCCCAGGCCAGC | |
| | | AAATGTTCCTTTTTGTTCAAAGTCTATTT | |
| | | TTATTCCTTGATATTTTTCTTTTTTTTTT | |
| | | TTTTTTTTTGTGGATGGGGACTTGTGAAT | |
| | | TTTTCTAAAGGTGCTATTTAACATGGGAG | |
| | | GAGAGCGTGTGCGGCTCCAGCCCAGCCCG | |
| | | CTGCTCACTTTCCACCCTCTCTCCACCTG | |
| | | CCTCTGGCTTCTCAGGCCTCTGCTCTCCG | |
| | | ACCTCTCTCCTCTGAAACCCTCCTCCACA | |
| | | GCTGCAGCCCATCCTCCCGGCTCCCTCCT | |
| | | AGTCTGTCCTGCGTCCTCTGTCCCCGGGT | |
| | | TTCAGAGACAACTTCCCAAAGCACAAAGC | |
| | | AGTTTTTCCCCCTAGGGGTGGGAGGAAGC | |
| | | AAAAGACTCTGTACCTATTTTGTATGTGT | |
| | | ATAATAATTTGAGATGTTTTTAATTATTT | |
| | | TGATTGCTGGAATAAAGCATGTGGAAATG | |
| | | ACCCAAACATAATCCGCAGTGGCCTCCTA | |
| | | ATTTCCTTCTTTGGAGTTGGGGGAGGGGT | |
| | | AGACATGGGGAAGGGGCTTTGGGGTGATG | |
| | | GGCTTGCCTTCCATTCCTGCCCTTTCCCT | |
| | | CCCCACTATTCTCTTCTAGATCCCTCCAT | |
| | | AACCCCACTCCCCTTTCTCTCACCCTTCT | |
| | | TATACCGCAAACCTTTCTACTTCCTCTTT | |
| | | CATTTTCTATTCTTGCAATTTCCTTGCAC | |
| | | CTTTTCCAAATCCTCTTCTCCCCTGCAAT | |
| | | ACCATACAGGCAATCCACGTGCACAACAC | |
| | | ACACACACACTCTTCACATCTGGGGTTGT | |
| | | CCAAACCTCATACCCACTCCCCTTCAAGC | |
| | | CCATCCACTCTCCACCCCCTGGATGCCCT | |
| | | GCACTTGGTGGCGGTGGGATGCTCATGGA | |
| | | TACTGGGAGGGTGAGGGGAGTGGAACCCG | |
| | | TGAGGAGGACCTGGGGGCCTCTCCTTGAA | |
| | | CTGACATGAAGGGTCATCTGGCCTCTGCT | |
| | | CCCTTCTCACCCACGCTGACCTCCTGCCG | |
| | | AAGGAGCAACGCAACAGGAGAGGGGTCTG | |
| | | CTGAGCCTGGCGAGGGTCTGGGAGGGACC | |
| | | AGGAGGAAGGCGTGCTCCCTGCTCGCTGT | |
| | | CCTGGCCCTGGGGGAGTGAGGGAGACAGA | |
| | | CACCTGGGAGAGCTGTGGGGAAGGCACTC | |
| | | GCACCGTGCTCTTGGGAAGGAAGGAGACC | |
| | | TGGCCCTGCTCACCACGGACTGGGTGCCT | |
| | | CGACCTCCTGAATCCCCAGAACACAACCC | |
| | | CCCTGGGCTGGGGTGGTCTGGGGAACCAT | |
| | | CGTGCCCCCGCCTCCCGCCTACTCCTTTT | |
| | | TAAGCTT | |
| 3UTR-015 | Plod1; | TTGGCCAGGCCTGACCCTCTTGGACCTTT | 19 |
| | pro- | CTTCTTTGCCGACAACCACTGCCCAGCAG | |
| | collagen- | CCTCTGGGACCTCGGGGTCCCAGGGAACC | |
| | lysine, | CAGTCCAGCCTCCTGGCTGTTGACTTCCC | |
| | 2-oxoglut- | ATTGCTCTTGGAGCCACCAATCAAAGAGA | |
| | arate | TTCAAAGAGATTCCTGCAGGCCAGAGGCG | |
| | 5-dioxy- | GAACACACCTTTATGGCTGGGGCTCTCCG | |
| | genase 1 | TGGTGTTCTGGACCCAGCCCCTGGAGACA | |
| | | CCATTCACTTTTACTGCTTTGTAGTGACT | |
| | | CGTGCTCTCCAACCTGTCTTCCTGAAAAA | |
| | | CCAAGGCCCCCTTCCCCCACCTCTTCCAT | |
| | | GGGGTGAGACTTGAGCAGAACAGGGGCTT | |
| | | CCCCAAGTTGCCCAGAAAGACTGTCTGGG | |
| | | TGAGAAGCCATGGCCAGAGCTTCTCCCAG | |
| | | GCACAGGTGTTGCACCAGGGACTTCTGCT | |
| | | TCAAGTTTTGGGGTAAAGACACCTGGATC | |
| | | AGACTCCAAGGGCTGCCCTGAGTCTGGGA | |
| | | CTTCTGCCTCCATGGCTGGTCATGAGAGC | |
| | | AAACCGTAGTCCCCTGGAGACAGCGACTC | |
| | | CAGAGAACCTCTTGGGAGACAGAAGAGGC | |
| | | ATCTGTGCACAGCTCGATCTTCTACTTGC | |
| | | CTGTGGGGAGGGGAGTGACAGGTCCACAC | |
| | | ACCACACTGGGTCACCCTGTCCTGGATGC | |
| | | CTCTGAAGAGAGGGACAGACCGTCAGAAA | |
| | | CTGGAGAGTTTCTATTAAAGGTCATTTAA | |
| | | ACCA | |
| 3UTR-016 | Nucb1; | TCCTCCGGGACCCCAGCCCTCAGGATTCC | 20 |
| | nucleo- | TGATGCTCCAAGGCGACTGATGGGCGCTG | |
| | bindin 1 | GATGAAGTGGCACAGTCAGCTTCCCTGGG | |
| | | GGCTGGTGTCATGTTGGGCTCCTGGGGCG | |
| | | GGGGCACGGCCTGGCATTTCACGCATTGC | |
| | | TGCCACCCCAGGTCCACCTGTCTCCACTT | |
| | | TCACAGCCTCCAAGTCTGTGGCTCTTCCC | |
| | | TTCTGTCCTCCGAGGGGCTTGCCTTCTCT | |
| | | CGTGTCCAGTGAGGTGCTCAGTGATCGGC | |
| | | TTAACTTAGAGAAGCCCGCCCCCTCCCCT | |
| | | TCTCCGTCTGTCCCAAGAGGGTCTGCTCT | |
| | | GAGCCTGCGTTCCTAGGTGGCTCGGCCTC | |
| | | AGCTGCCTGGGTTGTGGCCGCCCTAGCAT | |
| | | CCTGTATGCCCACAGCTACTGGAATCCCC | |
| | | GCTGCTGCTCCGGGCCAAGCTTCTGGTTG | |
| | | ATTAATGAGGGCATGGGGTGGTCCCTCAA | |
| | | GACCTTCCCCTACCTTTTGTGGAACCAGT | |
| | | GATGCCTCAAAGACAGTGTCCCCTCCACA | |
| | | GCTGGGTGCCAGGGGCAGGGGATCCTCAG | |
| | | TATAGCCGGTGAACCCTGATACCAGGAGC | |
| | | CTGGGCCTCCCTGAACCCCTGGCTTCCAG | |
| | | CCATCTCATCGCCAGCCTCCTCCTGGACC | |
| | | TCTTGGCCCCCAGCCCCTTCCCCACACAG | |
| | | CCCCAGAAGGGTCCCAGAGCTGACCCCAC | |
| | | TCCAGGACCTAGGCCCAGCCCCTCAGCCT | |
| | | CATCTGGAGCCCCTGAAGACCAGTCCCAC | |
| | | CCACCTTTCTGGCCTCATCTGACACTGCT | |
| | | CCGCATCCTGCTGTGTGTCCTGTTCCATG | |
| | | TTCCGGTTCCATCCAAATACACTTTCTGG | |
| | | AACAAA | |
| 3UTR-017 | α-globin | GCTGGAGCCTCGGTGGCCATGCTTCTTGC | 21 |
| | | CCCTTGGGCCTCCCCCCAGCCCCTCCTCC | |
| | | CCTTCCTGCACCCGTACCCCCGTGGTCTT | |
| | | TGAATAAAGTCTGAGTGGGCGGC | |

[0190] It should be understood that those listed in the previous tables are examples and that any UTR from any gene may be incorporated into the respective first or second flanking region of the primary construct. Furthermore, multiple wild-type UTRs of any known gene may be utilized. It is also within the scope of the present invention to provide artificial UTRs which are not variants of wild type genes. These UTRs or portions thereof may be placed in the same orientation as in the transcript from which they were selected or may be altered in orientation or location. Hence a 5′ or 3′ UTR may be inverted, shortened, lengthened, made chimeric with one or more other 5′ UTRs or 3′ UTRs. As used herein, the term “altered” as it relates to a UTR sequence, means that the UTR has been changed in some way in relation to a reference sequence. For example, a 3′ or 5′ UTR may be altered relative to a wild type or native UTR by the change in orientation or location as taught above or may be altered by the inclusion of additional nucleotides, deletion of nucleotides, swapping or transposition of nucleotides. Any of these changes producing an “altered” UTR (whether 3′ or 5′) comprise a variant UTR.

[0191] In one embodiment, a double, triple or quadruple UTR such as a 5′ or 3′ UTR may be used. As used herein, a “double” UTR is one in which two copies of the same UTR are encoded either in series or substantially in series. For example, a double beta-globin 3′ UTR may be used as described in US Patent publication 20100129877, the contents of which are incorporated herein by reference in its entirety.

[0192] It is also within the scope of the present invention to have patterned UTRs. As used herein “patterned UTRs” are those UTRs which reflect a repeating or alternating pattern, such as ABABAB or AABBAABBAABB or ABCABCABC or variants thereof repeated once, twice, or more than 3 times. In these patterns, each letter, A, B, or C represent a different UTR at the nucleotide level.

[0193] In one embodiment, flanking regions are selected from a family of transcripts whose proteins share a common function, structure, feature of property. For example, polypeptides of interest may belong to a family of proteins which are expressed in a particular cell, tissue or at some time during development. The UTRs from any of these genes may be swapped for any other UTR of the same or different family of proteins to create a new chimeric primary transcript. As used herein, a “family of proteins” is used in the broadest sense to refer to a group of two or more polypeptides of interest which share at least one function, structure, feature, localization, origin, or expression pattern.

[0194] After optimization (if desired), the primary construct components are reconstituted and transformed into a vector such as, but not limited to, plasmids, viruses, cosmids, and artificial chromosomes. For example, the optimized construct may be reconstituted and transformed into chemically competent E. coli, yeast, neurospora, maize, drosophila, etc. where high copy plasmid-like or chromosome structures occur by methods described herein.

[0195] The untranslated region may also include translation enhancer elements (TEE). As a non-limiting example, the TEE may include those described in U.S. application Ser. No. 20/090,226470, herein incorporated by reference in its entirety, and those known in the art.

### Stop Codons

[0196] In one embodiment, the primary constructs of the present invention may include at least two stop codons before the 3′ untranslated region (UTR). The stop codon may be selected from TGA, TAA and TAG. In one embodiment, the primary constructs of the present invention include the stop codon TGA and one additional stop codon. In a further embodiment the addition stop codon may be TAA. In another embodiment, the primary constructs of the present invention include three stop codons.

### Vector Amplification

[0197] The vector containing the primary construct is then amplified and the plasmid isolated and purified using methods known in the art such as, but not limited to, a maxi prep using the Invitrogen PURELINK™ HiPure Maxiprep Kit (Carlsbad, CA).

### Plasmid Linearization

[0198] The plasmid may then be linearized using methods known in the art such as, but not limited to, the use of restriction enzymes and buffers. The linearization reaction may be purified using methods including, for example Invitrogen's PURELINK™ PCR Micro Kit (Carlsbad, CA), and HPLC based purification methods such as, but not limited to, strong anion exchange HPLC, weak anion exchange HPLC, reverse phase HPLC (RP-HPLC), and hydrophobic interaction HPLC (HIC-HPLC) and Invitrogen's standard PURELINK™ PCR Kit (Carlsbad, CA). The purification method may be modified depending on the size of the linearization reaction which was conducted. The linearized plasmid is then used to generate cDNA for in vitro transcription (IVT) reactions.

cDNA Template Synthesis

[0199] A cDNA template may be synthesized by having a linearized plasmid undergo polymerase chain reaction (PCR). Table 4 is a listing of primers and probes that may be usefully in the PCR reactions of the present invention. It should be understood that the listing is not exhaustive and that primer-probe design for any amplification is within the skill of those in the art. Probes may also contain chemically modified bases to increase base-pairing fidelity to the target molecule and base-pairing strength. Such modifications may include 5-methyl-Cytidine, 2, 6-di-amino-purine, 2′-fluoro, phosphoro-thioate, or locked nucleic acids.

TABLE 4
Primers and Probes

| Primer/ | | | SEQ |
|---|---|---|---|
| Probe | | Hybridization | ID |
| Identifier | Sequence (5′-3′) | target | NO. |
| UFP | TTGGACCCTCGTACAGAAGC | cDNA Template | 22 |
| | TAATACG | | |
| URP | Tₓ₁₆₀CTTCCTACTCAGGCT | CDNA Template | 23 |
| | TTATTCAAAGACCA | | |
| GBA1 | CCTTGACCTTCTGGAACTTC | Acid gluco- | 24 |
| | | cerebrosidase | |
| GBA2 | CCAAGCACTGAAACGGATAT | Acid gluco- | 25 |
| | | cerebrosidase | |
| LUC1 | GATGAAAAGTGCTCCAAGGA | Luciferase | 26 |
| LUC2 | AACCGTGATGAAAAGGTACC | Luciferase | 27 |
| LUC3 | TCATGCAGATTGGAAAGGTC | Luciferase | 28 |
| GCSF1 | CTTCTTGGACTGTCCAGAGG | G-CSF | 29 |
| GCSF2 | GCAGTCCCTGATACAAGAAC | G-CSF | 30 |
| GCSF3 | GATTGAAGGTGGCTCGCTAC | G-CSF | 31 |

*UFP is universal forward primer; URP is universal reverse primer.

[0200] In one embodiment, the cDNA may be submitted for sequencing analysis before undergoing transcription.

mRNA Production

[0201] The process of mRNA or mmRNA production may include, but is not limited to, in vitro transcription, cDNA template removal and RNA clean-up, and mRNA capping and/or tailing reactions.

### In Vitro Transcription

[0202] The cDNA produced in the previous step may be transcribed using an in vitro transcription (IVT) system. The system typically comprises a transcription buffer, nucleotide triphosphates (NTPs), an RNase inhibitor and a polymerase. The NTPs may be manufactured in house, may be selected from a supplier, or may be synthesized as described herein. The NTPs may be selected from, but are not limited to, those described herein including natural and unnatural (modified) NTPs. The polymerase may be selected from, but is not limited to, T7 RNA polymerase, T3 RNA polymerase and mutant polymerases such as, but not limited to, polymerases able to incorporate modified nucleic acids.

### RNA Polymerases

[0203] Any number of RNA polymerases or variants may be used in the design of the primary constructs of the present invention.

[0204] RNA polymerases may be modified by inserting or deleting amino acids of the RNA polymerase sequence. As a non-limiting example, the RNA polymerase may be modified to exhibit an increased ability to incorporate a 2′-modified nucleotide triphosphate compared to an unmodified RNA polymerase (see International Publication WO2008078180 and U.S. Pat. No. 8,101,385; herein incorporated by reference in their entireties).

[0205] Variants may be obtained by evolving an RNA polymerase, optimizing the RNA polymerase amino acid and/or nucleic acid sequence and/or by using other methods known in the art. As a non-limiting example, T7 RNA polymerase variants may be evolved using the continuous directed evolution system set out by Esvelt et al. (Nature (2011) 472 (7344): 499-503; herein incorporated by reference in its entirety) where clones of T7 RNA polymerase may encode at least one mutation such as, but not limited to, lysine at position 93 substituted for threonine (K93T), 14M, A7T, E63V, V64D, A65E, D66Y, T76N, C125R, S128R, A136T, N165S, G175R, H176L, Y178H, F182L, L196F, G198V, D208Y, E222K, S228A, Q239R, T243N, G259D, M267I, G280C, H300R, D351A, A354S, E356D, L360P, A383V, Y385C, D388Y, S397R, M401T, N410S, K450R, P451T, G452V, E484A, H523L, H524N, G542V, E565K, K577E, K577M, N601S, S684Y, L699I, K713E, N748D, Q754R, E775K, A827V, D851N or L864F. As another non-limiting example, T7 RNA polymerase variants may encode at least mutation as described in U.S. Pub. Nos. 20100120024 and 20070117112; herein incorporated by reference in their entireties. Variants of RNA polymerase may also include, but are not limited to, substitutional variants, conservative amino acid substitution, insertional variants, deletional variants and/or covalent derivatives.

[0206] In one embodiment, the primary construct may be designed to be recognized by the wild type or variant RNA polymerases. In doing so, the primary construct may be modified to contain sites or regions of sequence changes from the wild type or parent primary construct.

[0207] In one embodiment, the primary construct may be designed to include at least one substitution and/or insertion upstream of an RNA polymerase binding or recognition site, downstream of the RNA polymerase binding or recognition site, upstream of the TATA box sequence, downstream of the TATA box sequence of the primary construct but upstream of the coding region of the primary construct, within the 5′UTR, before the 5′UTR and/or after the 5′UTR.

[0208] In one embodiment, the 5′UTR of the primary construct may be replaced by the insertion of at least one region and/or string of nucleotides of the same base. The region and/or string of nucleotides may include, but is not limited to, at least 3, at least 4, at least 5, at least 6, at least 7 or at least 8 nucleotides and the nucleotides may be natural and/or unnatural. As a non-limiting example, the group of nucleotides may include 5-8 adenine, cytosine, thymine, a string of any of the other nucleotides disclosed herein and/or combinations thereof.

[0209] In one embodiment, the 5′UTR of the primary construct may be replaced by the insertion of at least two regions and/or strings of nucleotides of two different bases such as, but not limited to, adenine, cytosine, thymine, any of the other nucleotides disclosed herein and/or combinations thereof. For example, the 5′UTR may be replaced by inserting 5-8 adenine bases followed by the insertion of 5-8 cytosine bases. In another example, the 5′UTR may be replaced by inserting 5-8 cytosine bases followed by the insertion of 5-8 adenine bases.

[0210] In one embodiment, the primary construct may include at least one substitution and/or insertion downstream of the transcription start site which may be recognized by an RNA polymerase. As a non-limiting example, at least one substitution and/or insertion may occur downstream the transcription start site by substituting at least one nucleic acid in the region just downstream of the transcription start site (such as, but not limited to, +1 to +6). Changes to region of nucleotides just downstream of the transcription start site may affect initiation rates, increase apparent nucleotide triphosphate (NTP) reaction constant values, and increase the dissociation of short transcripts from the transcription complex curing initial transcription (Brieba et al, Biochemistry (2002) 41:5144-5149; herein incorporated by reference in its entirety). The modification, substitution and/or insertion of at least one nucleic acid may cause a silent mutation of the nucleic acid sequence or may cause a mutation in the amino acid sequence.

[0211] In one embodiment, the primary construct may include the substitution of at least 1, at least 2, at least 3, at least 4, at least 5, at least 6, at least 7, at least 8, at least 9, at least 10, at least 11, at least 12 or at least 13 guanine bases downstream of the transcription start site.

[0212] In one embodiment, the primary construct may include the substitution of at least 1, at least 2, at least 3, at least 4, at least 5 or at least 6 guanine bases in the region just downstream of the transcription start site. As a non-limiting example, if the nucleotides in the region are GGGAGA the guanine bases may be substituted by at least 1, at least 2, at least 3 or at least 4 adenine nucleotides. In another non-limiting example, if the nucleotides in the region are GGGAGA the guanine bases may be substituted by at least 1, at least 2, at least 3 or at least 4 cytosine bases. In another non-limiting example, if the nucleotides in the region are GGGAGA the guanine bases may be substituted by at least 1, at least 2, at least 3 or at least 4 thymine, and/or any of the nucleotides described herein.

[0213] In one embodiment, the primary construct may include at least one substitution and/or insertion upstream of the start codon. For the purpose of clarity, one of skill in the art would appreciate that the start codon is the first codon of the protein coding region whereas the transcription start site is the site where transcription begins. The primary construct may include, but is not limited to, at least 1, at least 2, at least 3, at least 4, at least 5, at least 6, at least 7 or at least 8 substitutions and/or insertions of nucleotide bases. The nucleotide bases may be inserted or substituted at 1, at least 1, at least 2, at least 3, at least 4 or at least 5 locations upstream of the start codon. The nucleotides inserted and/or substituted may be the same base (e.g., all A or all C or all T or all G), two different bases (e.g., A and C, A and T, or C and T), three different bases (e.g., A, C and T or A, C and T) or at least four different bases. As a non-limiting example, the guanine base upstream of the coding region in the primary construct may be substituted with adenine, cytosine, thymine, or any of the nucleotides described herein. In another non-limiting example the substitution of guanine bases in the primary construct may be designed so as to leave one guanine base in the region downstream of the transcription start site and before the start codon (see Esvelt et al. Nature (2011) 472 (7344): 499-503; herein incorporated by reference in its entirety). As a non-limiting example, at least 5 nucleotides may be inserted at 1 location downstream of the transcription start site but upstream of the start codon and the at least 5 nucleotides may be the same base type.

cDNA Template Removal and Clean-Up

[0214] The cDNA template may be removed using methods known in the art such as, but not limited to, treatment with Deoxyribonuclease I (DNase I). RNA clean-up may also include a purification method such as, but not limited to, AGENCOURT® CLEANSEQ® system from Beckman Coulter (Danvers, MA), HPLC based purification methods such as, but not limited to, strong anion exchange HPLC, weak anion exchange HPLC, reverse phase HPLC (RP-HPLC), and hydrophobic interaction HPLC (HIC-HPLC).

### Capping and or Tailing Reactions

[0215] The primary construct or mmRNA may also undergo capping and/or tailing reactions. A capping reaction may be performed by methods known in the art to add a 5′ cap to the 5′ end of the primary construct. Methods for capping include, but are not limited to, using a Vaccinia Capping enzyme (New England Biolabs, Ipswich, MA).

[0216] A poly-A tailing reaction may be performed by methods known in the art, such as, but not limited to, 2′ O-methyltransferase and by methods as described herein. If the primary construct generated from cDNA does not include a poly-T, it may be beneficial to perform the poly-A-tailing reaction before the primary construct is cleaned.

mRNA Purification

[0217] Primary construct or mmRNA purification may include, but is not limited to, mRNA or mmRNA clean-up, quality assurance and quality control. mRNA or mmRNA clean-up may be performed by methods known in the arts such as, but not limited to, AGENCOURT® beads (Beckman Coulter Genomics, Danvers, MA), poly-T beads, LNA™ oligo-T capture probes (EXIQON® Inc, Vedbaek, Denmark) or HPLC based purification methods such as, but not limited to, strong anion exchange HPLC, weak anion exchange HPLC, reverse phase HPLC (RP-HPLC), and hydrophobic interaction HPLC (HIC-HPLC). The term “purified” when used in relation to a polynucleotide such as a “purified mRNA or mmRNA” refers to one that is separated from at least one contaminant. As used herein, a “contaminant” is any substance which makes another unfit, impure or inferior. Thus, a purified polynucleotide (e.g., DNA and RNA) is present in a form or setting different from that in which it is found in nature, or a form or setting different from that which existed prior to subjecting it to a treatment or purification method.

[0218] A quality assurance and/or quality control check may be conducted using methods such as, but not limited to, gel electrophoresis, UV absorbance, or analytical HPLC.

[0219] In another embodiment, the mRNA or mmRNA may be sequenced by methods including, but not limited to reverse-transcriptase-PCR.

[0220] In one embodiment, the mRNA or mmRNA may be quantified using methods such as, but not limited to, ultraviolet visible spectroscopy (UV/Vis). A non-limiting example of a UV/Vis spectrometer is a NANODROP® spectrometer (ThermoFisher, Waltham, MA). The quantified mRNA or mmRNA may be analyzed in order to determine if the mRNA or mmRNA may be of proper size, check that no degradation of the mRNA or mmRNA has occurred. Degradation of the mRNA and/or mmRNA may be checked by methods such as, but not limited to, agarose gel electrophoresis, HPLC based purification methods such as, but not limited to, strong anion exchange HPLC, weak anion exchange HPLC, reverse phase HPLC (RP-HPLC), and hydrophobic interaction HPLC (HIC-HPLC), liquid chromatography-mass spectrometry (LCMS), capillary electrophoresis (CE) and capillary gel electrophoresis (CGE).

### Signal Sequences

[0221] The primary constructs or mmRNA may also encode additional features which facilitate trafficking of the polypeptides to therapeutically relevant sites. One such feature which aids in protein trafficking is the signal sequence. As used herein, a “signal sequence” or “signal peptide” is a polynucleotide or polypeptide, respectively, which is from about 9 to 200 nucleotides (3-60 amino acids) in length which is incorporated at the 5′ (or N-terminus) of the coding region or polypeptide encoded, respectively. Addition of these sequences result in trafficking of the encoded polypeptide to the endoplasmic reticulum through one or more secretory pathways. Some signal peptides are cleaved from the protein by signal peptidase after the proteins are transported.

[0222] Table 5 is a representative listing of protein signal sequences which may be incorporated for encoding by the polynucleotides, primary constructs or mmRNA of the invention.

TABLE 5
Signal Sequences

| | | NUCLEOTIDE | SEQ | | SEQ |
|---|---|---|---|---|---|
| | Descrip- | SEQUENCE | ID | ENCODED | ID |
| ID | tion | (5′-3′) | NO. | PEPTIDE | NO. |
| SS-001 | α-1- | ATGATGCCATCCTC | 32 | MMPSSVSWGILL | 94 |
| | anti- | AGTCTCATGGGGTA | | AGLCCLVPVSLA | |
| | trypsin | TTTTGCTCTTGGCG | | | |
| | | GGTCTGTGCTGTCT | | | |
| | | CGTGCCGGTGTCGC | | | |
| | | TCGCA | | | |
| SS-002 | G-CSF | ATGGCCGGACCGGC | 33 | MAGPATQSPMKL | 95 |
| | | GACTCAGTCGCCCA | | MALQLLLWHSAL | |
| | | TGAAACTCATGGCC | | WTVQEA | |
| | | CTGCAGTTGTTGCT | | | |
| | | TTGGCACTCAGCCC | | | |
| | | TCTGGACCGTCCAA | | | |
| | | GAGGCG | | | |
| SS-003 | Factor IX | ATGCAGAGAGTGAA | 34 | MQRVNMIMAESP | 96 |
| | | CATGATTATGGCCG | | SLITICLLGYLL | |
| | | AGTCCCCATCGCTC | | SAECTVFLDHEN | |
| | | ATCACAATCTGCCT | | ANKILNRPKR | |
| | | GCTTGGTACCTGCT | | | |
| | | TTCCGCCGAATGCA | | | |
| | | CTGTCTTTCTGGAT | | | |
| | | CACGAGAATGCGAA | | | |
| | | TAAGATCTTGAACC | | | |
| | | GACCCAAACGG | | | |
| SS-004 | Prolactin | ATGAAAGGATCATT | 35 | MKGSLLLLLVSN | 97 |
| | | GCTGTTGCTCCTCG | | LLLCQSVAP | |
| | | TGTCGAACCTTCTG | | | |
| | | CTTTGCCAGTCCGT | | | |
| | | AGCCCCC | | | |
| SS-005 | Albumin | ATGAAATGGGTGAC | 36 | MKWVTFISLLFL | 98 |
| | | GTTCATCTCACTGT | | FSSAYSRGVFRR | |
| | | TGTTTTTGTTCTCG | | | |
| | | TCCGCCTACTCCAG | | | |
| | | GGGAGTATTCCGCC | | | |
| | | GA | | | |
| SS-006 | HMMSP38 | ATGTGGTGGCGGCT | 37 | MWWRLWWLLLLL | 99 |
| | | CTGGTGGCTGCTCC | | LLLPMWA | |
| | | TGTTGCTCCTCTTG | | | |
| | | CTGTGGCCCATGGT | | | |
| | | GTGGGCA | | | |
| MLS- | ornithine | TGCTCTTTAACCTC | 38 | MLFNLRILLNNA | 100 |
| 001 | carba- | CGCATCCTGTTGAA | | AFRNGHNFMVRN | |
| | moyl- | TAACGCTGCGTTCC | | FRCGQPLQ | |
| | trans- | GAAATGGGCATAAC | | | |
| | ferase | TTCATGGTACGCAA | | | |
| | | CTTCAGATGCGGCC | | | |
| | | AGCCACTCCAG | | | |
| MLS- | Cyto- | ATGTCCGTCTTGAC | 39 | MSVLTPLLLRGL | 101 |
| 002 | chrome | ACCCCTGCTCTTGA | | TGSARRLPVPRA | |
| | C | GAGGGCTGACGGGG | | KIHSL | |
| | Oxidase | TCCGCTAGACGCCT | | | |
| | subunit | GCCGGTACCGCGAG | | | |
| | 8A | CGAAGATCCACTCC | | | |
| | | CTG | | | |
| MLS- | Cyto- | ATGAGCGTGCTCAC | 40 | MSVLTPLLLRGL | 102 |
| 003 | chrome | TCCGTTGCTTCTTC | | TGSARRLPVPRA | |
| | C | GAGGGCTTACGGGA | | KIHSL | |
| | Oxidase | TCGGCTCGGAGGTT | | | |
| | subunit | GCCCGTCCCGAGAG | | | |
| | 8A | CGAAGATCCATTCG | | | |
| | | TTG | | | |
| SS-007 | Type III, | TGACAAAAATAACT | 41 | MVTKITLSPQNF | 103 |
| | bacterial | TTATCTCCCCAGAA | | RIQKQETTLLKE | |
| | | TTTTAGAATCCAAA | | KSTEKNSLAKSI | |
| | | AACAGGAAACCACA | | LAVKNHFIELRS | |
| | | CTACTAAAAGAAAA | | KLSERFISHKNT | |
| | | ATCAACCGAGAAAA | | | |
| | | ATTCTTTAGCAAAA | | | |
| | | AGTATTCTCGCAGT | | | |
| | | AAAAATCACTTCAT | | | |
| | | CGAATTAAGGTCAA | | | |
| | | AATTATCGGAACGT | | | |
| | | TTTATTTCGCATAA | | | |
| | | GAACACT | | | |
| SS-008 | Viral | ATGCTGAGCTTTGT | 42 | MLSFVDTRTLLL | 104 |
| | | GGATACCCGCACCC | | LAVTSCLATCQ | |
| | | TGCTGCTGCTGGCG | | | |
| | | GTGACCAGCTGCCT | | | |
| | | GGCGACCTGCCAG | | | |
| SS-009 | viral | ATGGGCAGCAGCCA | 43 | MGSSQAPRMGSV | 105 |
| | | GGCGCCGCGCATGG | | GGHGLMALLMAG | |
| | | GCAGCGTGGGCGGC | | LILPGILA | |
| | | CATGGCCTGATGGC | | | |
| | | GCTGCTGATGGCGG | | | |
| | | GCCTGATTCTGCCG | | | |
| | | GGCATTCTGGCG | | | |
| SS-010 | Viral | ATGGCGGGCATTTT | 44 | MAGIFYFLFSFL | 106 |
| | | TTATTTTCTGTTTA | | FGICD | |
| | | GCTTTCTGTTTGGC | | | |
| | | ATTTGCGAT | | | |
| SS-011 | Viral | ATGGAAAACCGCCT | 45 | MENRLLRVFLVW | 107 |
| | | GCTGCGCGTGTTTC | | AALTMDGASA | |
| | | TGGTGTGGGCGGCG | | | |
| | | CTGACCATGGATGG | | | |
| | | CGCGAGCGCG | | | |
| SS-012 | Viral | ATGGCGCGCCAGGG | 46 | MARQGCFGSYQV | 108 |
| | | CTGCTTTGGCAGCT | | ISLFTFAIGVNL | |
| | | ATCAGGTGATTAGC | | CLG | |
| | | CTGTTTACCTTTGC | | | |
| | | GATTGGCGTGAACC | | | |
| | | TGTGCCTGGGC | | | |
| SS-013 | Bacillus | ATGAGCCGCCTGCC | 47 | MSRLPVLLLLQL | 109 |
| | | GGTGCTGCTGCTGC | | LVRPGLQ | |
| | | TGCAGCTGCTGGTG | | | |
| | | CGCCCGGGCCTGCA | | | |
| | | G | | | |
| SS-014 | Bacillus | ATGAAACAGCAGAA | 48 | MKQQKRLYARLL | 110 |
| | | ACGCCTGTATGCGC | | TLLFALIFLLPH | |
| | | GCCTGCTGACCCTG | | SSASA | |
| | | CTGTTTGCGCTGAT | | | |
| | | TTTTCTGCTGCCGC | | | |
| | | ATAGCAGCGCGAGC | | | |
| | | GCG | | | |
| SS-015 | Secretion | ATGGCGACGCCGCT | 49 | MATPLPPPSPRH | 111 |
| | signal | GCCTCCGCCCTCCC | | LRLLRLLLSG | |
| | | CGCGGCACCTGCGG | | | |
| | | CTGCTGCGGCTGCT | | | |
| | | GCTCTCCGCCCTCG | | | |
| | | TCCTCGGC | | | |
| SS-016 | Secretion | ATGAAGGCTCCGGG | 50 | MKAPGRLVLIIL | 112 |
| | signal | TCGGCTCGTGCTCA | | CSVVFS | |
| | | TCATCCTGTGCTCC | | | |
| | | GTGGTCTTCTCT | | | |
| SS-017 | Secretion | ATGCTTCAGCTTTG | 51 | MLQLWKLLCGVL | 113 |
| | signal | GAAACTTGTTCTCC | | T | |
| | | TGTGCGGCGTGCTC | | | |
| | | ACT | | | |
| SS-018 | Secretion | ATGCTTTATCTCCA | 52 | MLYLQGWSMPAV | 114 |
| | signal | GGGTTGGAGCATGC | | A | |
| | | CTGCTGTGGCA | | | |
| SS-019 | Secretion | ATGGATAACGTGCA | 53 | MDNVQPKIKHRP | 115 |
| | signal | GCCGAAAATAAAAC | | FCFSVKGHVKML | |
| | | ATCGCCCCTTCTGC | | RLDIINSLVTTV | |
| | | TTCAGTGTGAAAGG | | FMLIVSVLALIP | |
| | | CCACGTGAAGATGC | | | |
| | | TGCGGCTGGATATT | | | |
| | | ATCAACTCACTGGT | | | |
| | | AACAACAGTATTCA | | | |
| | | TGCTCATCGTATCT | | | |
| | | GTGTTGGCACTGAT | | | |
| | | ACCA | | | |
| SS-020 | Secretion | ATGCCCTGCCTAGA | 54 | MPCLDQQLTVHA | 116 |
| | signal | CCAACAGCTCACTG | | LPCPAQPSSLAF | |
| | | TTCATGCCCTACCC | | CQVGFLTA | |
| | | TGCCCTGCCCAGCC | | | |
| | | CTCCTCTCTGGCCT | | | |
| | | TCTGCCAAGTGGGG | | | |
| | | TTCTTAACAGCA | | | |
| SS-021 | Secretion | ATGAAAACCTTGTT | 55 | MKTLFNPAPAIA | 117 |
| | signal | CAATCCAGCCCCTG | | DLDPQFYTLSDV | |
| | | CCATTGCTGACCTG | | FCCNESEAEILT | |
| | | GATCCCCAGTTCTA | | GLTVGSAADA | |
| | | CACCCTCTCAGATG | | | |
| | | TGTTCTGCTGCAAT | | | |
| | | GAAAGTGAGGCTGA | | | |
| | | GATTTTAACTGGCC | | | |
| | | TCACGGTGGGCAGC | | | |
| | | GCTGCAGATGCT | | | |
| SS-022 | Secretion | ATGAAGCCTCTCCT | 56 | MKPLLVVFVFLF | 118 |
| | signal | TGTTGTGTTTGTCT | | LWDPVLA | |
| | | TTCTTTTCCTTTGG | | | |
| | | GATCCAGTGCTGGC | | | |
| | | A | | | |
| SS-023 | Secretion | ATGTCCTGTTCCCT | 57 | MSCSLKFTLIVI | 119 |
| | signal | AAAGTTTACTTTGA | | FFTCTLSSS | |
| | | TTGTAATTTTTTTT | | | |
| | | TACTGTTGGCTTTC | | | |
| | | ATCCAGC | | | |
| SS-024 | Secretion | ATGGTTCTTACTAA | 58 | MVLTKPLQRNGS | 120 |
| | signal | ACCTCTTCAAAGAA | | MMSFENVKEKSR | |
| | | ATGGCAGCATGATG | | EGGPHAHTPEEE | |
| | | AGCTTTGAAAATGT | | LCFVVTHTPQVQ | |
| | | GAAAGAAAAGAGCA | | TTLNLFFHIFKV | |
| | | GAGAAGGAGGGCCC | | LTQPLSLLWG | |
| | | CATGCACACACACC | | | |
| | | CGAAGAAGAATTGT | | | |
| | | GTTTCGTGGTAACA | | | |
| | | CACTACCCTCAGGT | | | |
| | | TCAGACCACACTCA | | | |
| | | ACCTGTTTTTCCAT | | | |
| | | ATATTCAAGGTTCT | | | |
| | | TACTCAACCACTTT | | | |
| | | CCCTTCTGTGGGGT | | | |
| SS-025 | Secretion | ATGGCCACCCCGCC | 59 | MATPPFRLIRKM | 121 |
| | signal | ATTCCGGCTGATAA | | FSFKVSRWMGLA | |
| | | GGAAGATGTTTTCC | | CFRSLAAS | |
| | | TTCAAGGTGAGCAG | | | |
| | | ATGGATGGGGCTTG | | | |
| | | CCTGCTTCCGGTCC | | | |
| | | CTGGCGGCATCC | | | |
| SS-026 | Secretion | ATGAGCTTTTTCCA | 60 | MSFFQLLMKRKE | 122 |
| | signal | ACTCCTGATGAAAA | | LIPLVVFMTVAA | |
| | | GGAAGGAACTCATT | | GGASS | |
| | | CCCTTGGTGGTGTT | | | |
| | | CATGACTGTGGCGG | | | |
| | | CGGGTGGAGCCTCA | | | |
| | | TCT | | | |
| SS-027 | Secretion | ATGGTCTCAGCTCT | 61 | MVSALRGAPLIR | 123 |
| | signal | GCGGGGAGCACCCC | | VHSSPVSSPSVS | |
| | | TGATCAGGGTGCAC | | GPAALVSCLSSQ | |
| | | TCAAGCCCTGTTTC | | SSALS | |
| | | TTCTCCTTCTGTGA | | | |
| | | GTGGACCACGGAGG | | | |
| | | CTGGTGAGCTGCCT | | | |
| | | GTCATCCCAAAGCT | | | |
| | | CAGCTCTGAGC | | | |
| SS-028 | Secretion | ATGATGGGGTCCCC | 62 | MMGSPVSHLLAG | 124 |
| | signal | AGTGAGTCATCTGC | | FCVWVVLG | |
| | | TGGCCGGCTTCTGT | | | |
| | | GTGTGGGTCGTCTT | | | |
| | | GGGC | | | |
| SS-029 | Secretion | ATGGCAAGCATGGC | 63 | MASMAAVLTWAL | 125 |
| | signal | TGCCGTGCTCACCT | | ALLSAFSATQA | |
| | | GGGCTCTGGCTCTT | | | |
| | | CTTTCAGCGTTTTC | | | |
| | | GGCCACCCAGGCA | | | |
| SS-030 | Secretion | ATGGTGCTCATGTG | 64 | MVLMWTSGDAFK | 126 |
| | signal | GACCAGTGGTGACG | | TAYFLLKGAPLQ | |
| | | CCTTCAAGACGGCC | | FSVCGLLQVLVD | |
| | | TACTTCCTGCTGAA | | LAILGQATA | |
| | | GGGTGCCCCTCTGC | | | |
| | | AGTTCTCCGTGTGC | | | |
| | | GGCCTGCTGCAGGT | | | |
| | | GCTGGTGGACCTGG | | | |
| | | CCATCCTGGGGCAG | | | |
| | | GCCTACGCC | | | |
| SS-031 | Secretion | ATGGATTTTGTCGC | 65 | MDFVAGAIGGVC | 127 |
| | signal | TGGAGCCATCGGAG | | GVAVGYPLDTVK | |
| | | GCGTCTGCGGTGTT | | VRIQTEPLYTGI | |
| | | GCTGTGGGCTACCC | | WHCVRDTYHRER | |
| | | CCTGGACACGGTGA | | VWGFYRGLSLPV | |
| | | AGGTCAGGATCCAG | | CTVSLVSS | |
| | | ACGGAGCCAAAGTA | | | |
| | | CACAGGCATCTGGC | | | |
| | | ACTGCGTCCGGGAT | | | |
| | | ACGTATCACCGAGA | | | |
| | | GCGCGTGTGGGGCT | | | |
| | | TCTACCGGGGCCTC | | | |
| | | TCGCTGCCCGTGTG | | | |
| | | CACGGTGTCCCTGG | | | |
| | | TATCTTCC | | | |
| SS-032 | Secretion | ATGGAGAAGCCCCT | 66 | MEKPLFPLVPLH | 128 |
| | signal | CTTCCCATTAGTGC | | WFGFGYTALVVS | |
| | | CTTTGCATTGGTTT | | GGIVGYVKTGSV | |
| | | GGCTTTGGCTACAC | | PSLAAGLLFGSL | |
| | | AGCACTGGTTGTTT | | A | |
| | | CTGGTGGGATCGTT | | | |
| | | GGCTATGTAAAAAC | | | |
| | | AGGCAGCGTGCCGT | | | |
| | | CCCTGGCTGCAGGG | | | |
| | | CTGCTCTTCGGCAG | | | |
| | | TCTAGCC | | | |
| SS-033 | Secretion | ATGGGTCTGCTCCT | 67 | MGLLLPLALCIL | 129 |
| | signal | TCCCCTGGCACTCT | | VLC | |
| | | GCATCCTAGTCCTG | | | |
| | | TGC | | | |
| SS-034 | Secretion | ATGGGGATCCAGAC | 68 | MGIQTSPVLLAS | 130 |
| | signal | GAGCCCCGTCCTGC | | LGVGLVTLLGLA | |
| | | TGGCCTCCCTGGGG | | VG | |
| | | GTGGGGCTGGTCAC | | | |
| | | TCTGCTCGGCCTGG | | | |
| | | CTGTGGGC | | | |
| SS-035 | Secretion | ATGTCGGACCTGCT | 69 | MSDLLLLGLIGG | 131 |
| | signal | ACTACTGGGCCTGA | | LTLLLLLTLLAF | |
| | | TTGGGGGCCTGACT | | A | |
| | | CTCTTACTGCTGCT | | | |
| | | GACGCTGCTAGCCT | | | |
| | | TTGCC | | | |
| SS-036 | Secretion | ATGGAGACTGTGGT | 70 | METVVIVAIGVL | 132 |
| | signal | GATTGTTGCCATAG | | ATIFLASFAALV | |
| | | GTGTGCTGGCCACC | | LVCRQ | |
| | | ATGTTTCTGGCTTC | | | |
| | | GTTTGCAGCCTTGG | | | |
| | | TGCTGGTTTGCAGG | | | |
| | | CAG | | | |
| SS-037 | Secretion | ATGCGCGGCTCTGT | 71 | MAGSVECTWGWG | 133 |
| | signal | GGAGTGCACCTGGG | | HCAPSPLLLWTL | |
| | | GTTGGGGGCACTGT | | LLFAAPFGLLG | |
| | | GCCCCCAGCCCCCT | | | |
| | | GCTCCTTTGGACTC | | | |
| | | TACTTCTGTTTGCA | | | |
| | | GCCCCATTTGGCCT | | | |
| | | GCTGGGG | | | |
| SS-038 | Secretion | ATGATGCCGTCCCG | 72 | MMPSRTNLATGI | 134 |
| | signal | TACCAACCTGGCTA | | PSSKVKYSRLSS | |
| | | CTGGAATCCCCAGT | | TDDGYIDLQFKK | |
| | | AGTAAAGTGAAATA | | TPPKIPYKAIAL | |
| | | TTCAAGGCTCTCCA | | ATVLFLIGA | |
| | | GCACAGACGATGGC | | | |
| | | TACATTGACCTTCA | | | |
| | | GTTTAAGAAAACCC | | | |
| | | CTCCTAAGATCCCT | | | |
| | | TATAAGGCCATCGC | | | |
| | | ACTTGCCACTGTGC | | | |
| | | TGTTTTTGATTGGC | | | |
| | | GCC | | | |
| SS-039 | Secretion | ATGGCCCTGCCCCA | 73 | MALPQMCDGSHL | 135 |
| | signal | GATGTGTGACGGGA | | ASTLRYCMTVSG | |
| | | GCCACTTGGCCTCC | | TVVLVAGTLCFA | |
| | | ACCCTCCGCTATTG | | | |
| | | CATGACAGTCAGCG | | | |
| | | GCACAGTGGTTCTG | | | |
| | | GTGGCCGGGACGCT | | | |
| | | CTGCTTCGCT | | | |
| SS-041 | Vrg-6 | TGAAAAAGTGGTTC | 74 | MKKWFVAAGIGA | 136 |
| | | GTTGCTGCCGGCAT | | GLLMLSSAA | |
| | | CGGCGCTGCCGGAC | | | |
| | | TCATGCTCTCCAGC | | | |
| | | GCCGCCA | | | |
| SS-042 | PhoA | ATGAAACAGAGCAC | 75 | MKQSTIALALLP | 137 |
| | | CATTGCGCTGGCGC | | LLFTPVTKA | |
| | | TGCTGCCGCTGCTG | | | |
| | | TTTACCCCGGTGAC | | | |
| | | CAAAGCG | | | |
| SS-043 | OmpA | ATGAAAAAAACCGC | 76 | MKKTAIAIAVAL | 138 |
| | | GATTGCGATTGCGG | | AGFATVAQA | |
| | | TGGCGCTGGCGGGC | | | |
| | | TTTGCGACCGTGGC | | | |
| | | GCAGGCG | | | |
| SS-044 | STI | ATGAAAAAACTGAT | 77 | MKKLMLAIFFSV | 139 |
| | | GCTGGCGATTTTTT | | LSFPSFSQS | |
| | | TTAGCGTGCTGAGC | | | |
| | | TTTCCGAGCTTTAG | | | |
| | | CCAGAGC | | | |
| SS-045 | STII | ATGAAAAAAAACAT | 78 | MKKNIAFLLASM | 140 |
| | | TGCGTTTCTGCTGG | | FVFSIATNAYA | |
| | | CGAGCATGTTTGTG | | | |
| | | TTTAGCATTGCGAC | | | |
| | | CAACGCGTATGCG | | | |
| SS-046 | Amylase | ATGTTTGCGAAACG | 79 | MFAKRFKTSLLP | 141 |
| | | CTTTAAAACCAGCC | | LFAGFLLLFHLV | |
| | | TGCTGCCGCTGTTT | | LAGPAAAS | |
| | | GCGGGCTTTCTGCT | | | |
| | | GCTGTTTCATCTGG | | | |
| | | TGCTGGCGGGCCCG | | | |
| | | GCGGCGGCGAGC | | | |
| SS-047 | Alpha | ATGCGCTTTCCGAG | 80 | MRFPSIFTAVLF | 142 |
| | Factor | CATTTTTACCGCGG | | AASSALA | |
| | | TGCTGTTTGCGGCG | | | |
| | | AGCAGCGCGCTGGC | | | |
| | | G | | | |
| SS-048 | Alpha | ATGCGCTTTCCGAG | 81 | MRFPSIFTTVLF | 143 |
| | Factor | CATTTTTACCACCG | | AASSALA | |
| | | TGCTGTTTGCGGCG | | | |
| | | AGCAGCGCGCTGGC | | | |
| | | G | | | |
| SS-049 | Alpha | ATGCGCTTTCCGAG | 82 | MRFPSIFTSVLF | 144 |
| | Factor | CATTTTTACCAGCG | | AASSALA | |
| | | TGCTGTTTGCGGCG | | | |
| | | AGCAGCGCGCTGGC | | | |
| | | G | | | |
| SS-050 | Alpha | ATGCGCTTTCCGAG | 83 | MRFPSIFTHVLF | 145 |
| | Factor | CATTTTTACCCATG | | AASSALA | |
| | | TGCTGTTTGCGGCG | | | |
| | | AGCAGCGCGCTGGC | | | |
| | | G | | | |
| SS-051 | Alpha | ATGCGCTTTCCGAG | 84 | MRFPSIFTIVLF | 146 |
| | Factor | CATTTTTACCATTG | | AASSALA | |
| | | TGCTGTTTGCGGCG | | | |
| | | AGCAGCGCGCTGGC | | | |
| | | G | | | |
| SS-052 | Alpha | ATGCGCTTTCCGAG | 85 | MRFPSIFTFVLF | 147 |
| | Factor | CATTTTTACCTTTG | | AASSALA | |
| | | TGCTGTTTGCGGCG | | | |
| | | AGCAGCGCGCTGGC | | | |
| | | G | | | |
| SS-053 | Alpha | ATGCGCTTTCCGAG | 86 | MRFPSIFTEVLF | 148 |
| | Factor | CATTTTTACCGAAG | | AASSALA | |
| | | TGCTGTTTGCGGCG | | | |
| | | AGCAGCGCGCTGGC | | | |
| | | G | | | |
| SS-054 | Alpha | ATGCGCTTTCCGAG | 87 | MRFPSIFTGVLF | 149 |
| | Factor | CATTTTTACCGGCG | | AASSALA | |
| | | TGCTGTTTGCGGCG | | | |
| | | AGCAGCGCGCTGGC | | | |
| | | G | | | |
| SS-055 | Endo- | ATGCGTTCCTCCCC | 88 | MRSSPLLRSAVV | 150 |
| | glucanase | CCTCCTCCGCTCCG | | AALPVLALA | |
| | V | CCGTTGTGGCCGCC | | | |
| | | CTGCCGGTGTTGGC | | | |
| | | CCTTGCC | | | |
| SS-056 | Secretion | ATGGGCGCGGCGGC | 89 | MGAAAVRWHLCV | 151 |
| | signal | CGTGCGCTGGCACT | | LLALGTRGRL | |
| | | TGTGCGTGCTGCTG | | | |
| | | GCCCTGGGCACACG | | | |
| | | CGGGCGGCTG | | | |
| SS-057 | Fungal | ATGAGGAGCTCCCT | 90 | MRSSLVLFFVSA | 152 |
| | | TGTGCTGTTCTTTG | | WTALA | |
| | | TCTCTGCGTGGACG | | | |
| | | GCCTTGGCCAG | | | |
| SS-058 | Fibro- | ATGCTCAGGGGTCC | 91 | MLRGPGPGRLLL | 153 |
| | nectin | GGGACCCGGGCGGC | | LAVLCLGTSVRC | |
| | | TGCTGCTGCTAGCA | | TETGKSKR | |
| | | GTCCTGTGCCTGGG | | | |
| | | GACATCGGTGCGCT | | | |
| | | GCACCGAAACCGGG | | | |
| | | AAGAGCAAGAGG | | | |
| SS-059 | Fibro- | ATGCTTAGGGGTCC | 92 | MLRGPGPGLLLL | 154 |
| | nectin | GGGGCCCGGGCTGC | | AVQCLGTAVPST | |
| | | TGCTGCTGGCCGTC | | GA | |
| | | CAGCTGGGGACAGC | | | |
| | | GGTGCCCTCCACG | | | |
| SS-060 | Fibro- | ATGCGCCGGGGGGC | 93 | MRRGALTGLLLV | 155 |
| | nectin | CCTGACCGGGCTGC | | LCLSVVLRAAPS | |
| | | TCCTGGTCCTGTGC | | ATSKKRR | |
| | | CTGAGTGTTGTGCT | | | |
| | | ACGTGCAGCCCCCT | | | |
| | | CTGCAACAAGCAAG | | | |
| | | AAGCGCAGG | | | |

[0223] In the table, SS is secretion signal and MLS is mitochondrial leader signal. The primary constructs or mmRNA of the present invention may be designed to encode any of the signal sequences of SEQ ID NOs 94-155, or fragments or variants thereof. These sequences may be included at the beginning of the polypeptide coding region, in the middle or at the terminus or alternatively into a flanking region. Further, any of the polynucleotide primary constructs of the present invention may also comprise one or more of the sequences defined by SEQ ID NOs 32-93. These may be in the first region or either flanking region.

[0224] Additional signal sequences which may be utilized in the present invention include those taught in, for example, databases such as those found at www.signalpeptide.de/or proline.bic.nus.edu.sg/spdb/. Those described in U.S. Pat. Nos. 8,124,379; 7,413,875 and 7,385,034 are also within the scope of the invention and the contents of each are incorporated herein by reference in their entirety.

### Protein Cleavage Signals and Sites

[0225] In one embodiment, the polypeptides of the present invention may include at least one protein cleavage signal containing at least one protein cleavage site. The protein cleavage site may be located at the N-terminus, the C-terminus, at any space between the N- and the C-termini such as, but not limited to, half-way between the N- and C-termini, between the N-terminus and the half way point, between the half way point and the C-terminus, and combinations thereof.

[0226] The polypeptides of the present invention may include, but is not limited to, a proprotein convertase (or prohormone convertase), thrombin or Factor Xa protein cleavage signal. Proprotein convertases are a family of nine proteinases, comprising seven basic amino acid-specific subtilisin-like serine proteinases related to yeast kexin, known as prohormone convertase 1/3 (PC1/3), PC2, furin, PC4, PC5/6, paired basic amino-acid cleaving enzyme 4 (PACE4) and PC7, and two other subtilases that cleave at non-basic residues, called subtilisin kexin isozyme 1 (SKI-1) and proprotein convertase subtilisin kexin 9 (PCSK9). Non-limiting examples of protein cleavage signal amino acid sequences are listing in Table 7. In Table 7, “X” refers to any amino acid, “n” may be 0, 2, 4 or 6 amino acids and “*” refers to the protein cleavage site. In Table 7, SEQ ID NO: 251421 refers to when n=4 and SEQ ID NO: 251422 refers to when n=6.

TABLE 7
Protein Cleavage Site Sequences

| Protein | | |
|---|---|---|
| Cleavage | Amino Acid | SEQ ID |
| Signal | Cleavage Sequence | NO |
| Proprotein | R-X-X-R* | 251419 |
| convertase | R-X-K/R-R* | 251420 |
| | K/R-Xn-K/R* | 251421 |
| | | or |
| | | 251422 |
| Thrombin | L-V-P-R*-G-S | 251423 |
| | L-V-P-R* | 251424 |
| | A/F/G/I/L/T/V/M-A/ | 251425 |
| | F/G/I/L/T/V/W-P-R* | |
| Factor Xa | I-E-G-R* | 251426 |
| | I-D-G-R* | 251427 |
| | A-E-G-R* | 251428 |
| | A/F/G/I/L/T/V/M-D/ | 251429 |
| | E-G-R* | |

[0227] In one embodiment, the primary constructs and the mmRNA of the present invention may be engineered such that the primary construct or mmRNA contains at least one encoded protein cleavage signal. The encoded protein cleavage signal may be located before the start codon, after the start codon, before the coding region, within the coding region such as, but not limited to, half way in the coding region, between the start codon and the half way point, between the half way point and the stop codon, after the coding region, before the stop codon, between two stop codons, after the stop codon and combinations thereof.

[0228] In one embodiment, the primary constructs or mmRNA of the present invention may include at least one encoded protein cleavage signal containing at least one protein cleavage site. The encoded protein cleavage signal may include, but is not limited to, a proprotein convertase (or prohormone convertase), thrombin and/or Factor Xa protein cleavage signal. One of skill in the art may use Table 1 above or other known methods to determine the appropriate encoded protein cleavage signal to include in the primary constructs or mmRNA of the present invention. For example, starting with the signal of Table 7 and considering the codons of Table 1 one can design a signal for the primary construct which can produce a protein signal in the resulting polypeptide.

[0229] In one embodiment, the polypeptides of the present invention include at least one protein cleavage signal and/or site.

[0230] As a non-limiting example, U.S. Pat. No. 7,374,930 and U.S. Pub. No. 20090227660, herein incorporated by reference in their entireties, use a furin cleavage site to cleave the N-terminal methionine of GLP-1 in the expression product from the Golgi apparatus of the cells. In one embodiment, the polypeptides of the present invention include at least one protein cleavage signal and/or site with the proviso that the polypeptide is not GLP-1.

[0231] In one embodiment, the primary constructs or mmRNA of the present invention includes at least one encoded protein cleavage signal and/or site.

[0232] In one embodiment, the primary constructs or mmRNA of the present invention includes at least one encoded protein cleavage signal and/or site with the proviso that the primary construct or mmRNA does not encode GLP-1.

[0233] In one embodiment, the primary constructs or mmRNA of the present invention may include more than one coding region. Where multiple coding regions are present in the primary construct or mmRNA of the present invention, the multiple coding regions may be separated by encoded protein cleavage sites. As a non-limiting example, the primary construct or mmRNA may be signed in an ordered pattern. On such pattern follows AXBY form where A and B are coding regions which may be the same or different coding regions and/or may encode the same or different polypeptides, and X and Y are encoded protein cleavage signals which may encode the same or different protein cleavage signals. A second such pattern follows the form AXYBZ where A and B are coding regions which may be the same or different coding regions and/or may encode the same or different polypeptides, and X, Y and Z are encoded protein cleavage signals which may encode the same or different protein cleavage signals. A third pattern follows the form ABXCY where A, B and C are coding regions which may be the same or different coding regions and/or may encode the same or different polypeptides, and X and Y are encoded protein cleavage signals which may encode the same or different protein cleavage signals.

[0234] In one embodiment, the polypeptides, primary constructs and mmRNA can also contain sequences that encode protein cleavage sites so that the polypeptides, primary constructs and mmRNA can be released from a carrier region or a fusion partner by treatment with a specific protease for said protein cleavage site.

[0235] In one embodiment, the polypeptides, primary constructs and mmRNA of the present invention may include a sequence encoding the 2A peptide. In one embodiment, this sequence may be used to separate the coding region of two or more polypeptides of interest. As a non-limiting example, the sequence encoding the 2A peptide may be between coding region A and coding region B (A-2Apep-B). The presence of the 2A peptide would result in the cleavage of one long protein into protein A, protein B and the 2A peptide. Protein A and protein B may be the same or different polypeptides of interest. In another embodiment, the 2A peptide may be used in the polynucleotides, primary constructs and/or mmRNA of the present invention to produce two, three, four, five, six, seven, eight, nine, ten or more proteins.

### Incorporating Post Transcriptional Control Modulators

[0236] In one embodiment, the polynucleotides, primary constructs and/or mmRNA of the present invention may include at least one post transcriptional control modulator. These post transcriptional control modulators may be, but are not limited to, small molecules, compounds and regulatory sequences. As a non-limiting example, post transcriptional control may be achieved using small molecules identified by PTC Therapeutics Inc. (South Plainfield, NJ) using their GEMS™ (Gene Expression Modulation by Small-Molecules) screening technology.

[0237] The post transcriptional control modulator may be a gene expression modulator which is screened by the method detailed in or a gene expression modulator described in International Publication No. WO2006022712, herein incorporated by reference in its entirety. Methods identifying RNA regulatory sequences involved in translational control are described in International Publication No. WO2004067728, herein incorporated by reference in its entirety; methods identifying compounds that modulate untranslated region dependent expression of a gene are described in International Publication No. WO2004065561, herein incorporated by reference in its entirety.

[0238] In one embodiment, the polynucleotides, primary constructs and/or mmRNA of the present invention may include at least one post transcriptional control modulator is located in the 5′ and/or the 3′ untranslated region of the polynucleotides, primary constructs and/or mmRNA of the present invention

[0239] In another embodiment, the polynucleotides, primary constructs and/or mmRNA of the present invention may include at least one post transcription control modulator to modulate premature translation termination. The post transcription control modulators may be compounds described in or a compound found by methods outlined in International Publication Nos. WO2004010106, WO2006044456, WO2006044682, WO2006044503 and WO2006044505, each of which is herein incorporated by reference in its entirety. As a non-limiting example, the compound may bind to a region of the 28S ribosomal RNA in order to modulate premature translation termination (See e.g., WO2004010106, herein incorporated by reference in its entirety).

[0240] In one embodiment, polynucleotides, primary constructs and/or mmRNA of the present invention may include at least one post transcription control modulator to alter protein expression. As a non-limiting example, the expression of VEGF may be regulated using the compounds described in or a compound found by the methods described in International Publication Nos. WO2005118857, WO2006065480, WO2006065479 and WO2006058088, each of which is herein incorporated by reference in its entirety.

[0241] The polynucleotides, primary constructs and/or mmRNA of the present invention may include at least one post transcription control modulator to control translation. In one embodiment, the post transcription control modulator may be a RNA regulatory sequence. As a non-limiting example, the RNA regulatory sequence may be identified by the methods described in International Publication No. WO2006071903, herein incorporated by reference in its entirety.

### III. Modifications

[0242] Herein, in a polynucleotide (such as a primary construct or an mRNA molecule), the terms “modification” or, as appropriate, “modified” refer to modification with respect to A, G, U or C ribonucleotides. Generally, herein, these terms are not intended to refer to the ribonucleotide modifications in naturally occurring 5′-terminal mRNA cap moieties. In a polypeptide, the term “modification” refers to a modification as compared to the canonical set of 20 amino acids, moiety)

[0243] The modifications may be various distinct modifications. In some embodiments, the coding region, the flanking regions and/or the terminal regions may contain one, two, or more (optionally different) nucleoside or nucleotide modifications. In some embodiments, a modified polynucleotide, primary construct, or mmRNA introduced to a cell may exhibit reduced degradation in the cell, as compared to an unmodified polynucleotide, primary construct, or mmRNA.

[0244] The polynucleotides, primary constructs, and mmRNA can include any useful modification, such as to the sugar, the nucleobase, or the internucleoside linkage (e.g. to a linking phosphate/to a phosphodiester linkage/to the phosphodiester backbone). One or more atoms of a pyrimidine nucleobase may be replaced or substituted with optionally substituted amino, optionally substituted thiol, optionally substituted alkyl (e.g., methyl or ethyl), or halo (e.g., chloro or fluoro). In certain embodiments, modifications (e.g., one or more modifications) are present in each of the sugar and the internucleoside linkage. Modifications according to the present invention may be modifications of ribonucleic acids (RNAs) to deoxyribonucleic acids (DNAs), threose nucleic acids (TNAs), glycol nucleic acids (GNAs), peptide nucleic acids (PNAs), locked nucleic acids (LNAs) or hybrids thereof). Additional modifications are described herein.

[0245] As described herein, the polynucleotides, primary constructs, and mmRNA of the invention do not substantially induce an innate immune response of a cell into which the mRNA is introduced. Features of an induced innate immune response include 1) increased expression of pro-inflammatory cytokines, 2) activation of intracellular PRRs (RIG-I, MDA5, etc, and/or 3) termination or reduction in protein translation.

[0246] In certain embodiments, it may desirable to intracellularly degrade a modified nucleic acid molecule introduced into the cell. For example, degradation of a modified nucleic acid molecule may be preferable if precise timing of protein production is desired. Thus, in some embodiments, the invention provides a modified nucleic acid molecule containing a degradation domain, which is capable of being acted on in a directed manner within a cell. In another aspect, the present disclosure provides polynucleotides comprising a nucleoside or nucleotide that can disrupt the binding of a major groove interacting, e.g. binding, partner with the polynucleotide (e.g., where the modified nucleotide has decreased binding affinity to major groove interacting partner, as compared to an unmodified nucleotide).

[0247] The polynucleotides, primary constructs, and mmRNA can optionally include other agents (e.g., RNAi-inducing agents, RNAi agents, siRNAs, shRNAs, miRNAs, antisense RNAs, ribozymes, catalytic DNA, RNA, RNAs that induce triple helix formation, aptamers, vectors, etc.). In some embodiments, the polynucleotides, primary constructs, or mmRNA may include one or more messenger RNAs (mRNAs) and one or more modified nucleoside or nucleotides (e.g., mmRNA molecules). Details for these polynucleotides, primary constructs, and mmRNA follow.

### Polynucleotides and Primary Constructs

[0248] The polynucleotides, primary constructs, and mmRNA of the invention includes a first region of linked nucleosides encoding a polypeptide of interest, a first flanking region located at the 5′ terminus of the first region, and a second flanking region located at the 3′ terminus of the first region.

[0249] In some embodiments, the polynucleotide, primary construct, or mmRNA (e.g., the first region, first flanking region, or second flanking region) includes n number of linked nucleosides having Formula (Ia) or Formula (Ia-1):

[chemical structure]

or a pharmaceutically acceptable salt or stereoisomer thereof,
[0250] wherein
[0251] U is O, S, N(R^{U})ₙᵤ, or C(R^{U})ₙᵤ, wherein nu is an integer from 0 to 2 and each R^{U} is, independently, H, halo, or optionally substituted alkyl;
[0252] - - - is a single bond or absent;
[0253] each of R^{1′}, R^{2′}, R^{1″}, R^{2″}, R¹, R², R³, R⁴, and R⁵ is, independently, if present, H, halo, hydroxy, thiol, optionally substituted alkyl, optionally substituted alkoxy, optionally substituted alkenyloxy, optionally substituted alkynyloxy, optionally substituted aminoalkoxy, optionally substituted alkoxyalkoxy, optionally substituted hydroxyalkoxy, optionally substituted amino, azido, optionally substituted aryl, optionally substituted aminoalkyl, optionally substituted aminoalkenyl, optionally substituted aminoalkynyl, or absent; wherein the combination of R3 with one or more of R1′, R1″, R2′, R2″, or R5 (e.g., the combination of R1′ and R3, the combination of R1″ and R3, the combination of R2′ and R3, the combination of R2″ and R3, or the combination of R5 and R3) can join together to form optionally substituted alkylene or optionally substituted heteroalkylene and, taken together with the carbons to which they are attached, provide an optionally substituted heterocyclyl (e.g., a bicyclic, tricyclic, or tetracyclic heterocyclyl); wherein the combination of R5 with one or more of R1′, R1″, R2′, or R2″ (e.g., the combination of R1′ and R5, the combination of R1″ and R5, the combination of R2′ and R5, or the combination of R2″ and R5) can join together to form optionally substituted alkylene or optionally substituted heteroalkylene and, taken together with the carbons to which they are attached, provide an optionally substituted heterocyclyl (e.g., a bicyclic, tricyclic, or tetracyclic heterocyclyl); and wherein the combination of R⁴ and one or more of R^{1′}, R^{1″}, R^{2′}, R^{2″}, R³, or R⁵ can join together to form optionally substituted alkylene or optionally substituted heteroalkylene and, taken together with the carbons to which they are attached, provide an optionally substituted heterocyclyl (e.g., a bicyclic, tricyclic, or tetracyclic heterocyclyl); each of m′ and m″ is, independently, an integer from 0 to 3 (e.g., from 0 to 2, from 0 to 1, from 1 to 3, or from 1 to 2);
[0254] each of Y¹, Y², and Y³, is, independently, O, S, Se, —NR^{N1}—, optionally substituted alkylene, or optionally substituted heteroalkylene, wherein R^{N1} is H, optionally substituted alkyl, optionally substituted alkenyl, optionally substituted alkynyl, optionally substituted aryl, or absent;
[0255] each Y⁴ is, independently, H, hydroxy, thiol, boranyl, optionally substituted alkyl, optionally substituted alkenyl, optionally substituted alkynyl, optionally substituted alkoxy, optionally substituted alkenyloxy, optionally substituted alkynyloxy, optionally substituted thioalkoxy, optionally substituted alkoxyalkoxy, or optionally substituted amino;
[0256] each Y⁵ is, independently, O, S, Se, optionally substituted alkylene (e.g., methylene), or optionally substituted heteroalkylene;
[0257] n is an integer from 1 to 100,000; and
[0258] B is a nucleobase (e.g., a purine, a pyrimidine, or derivatives thereof), wherein the combination of B and R^{1′}, the combination of B and R^{2′}, the combination of B and R^{1″}, or the combination of B and R^{2″} can, taken together with the carbons to which they are attached, optionally form a bicyclic group (e.g., a bicyclic heterocyclyl) or wherein the combination of B, R^{1″}, and R³ or the combination of B, R^{2″}, and R³ can optionally form a tricyclic or tetracyclic group (e.g., a tricyclic or tetracyclic heterocyclyl, such as in Formula (IIo)-(IIp) herein). In some embodiments, the polynucleotide, primary construct, or mmRNA includes a modified ribose. In some embodiments, the polynucleotide, primary construct, or mmRNA (e.g., the first region, the first flanking region, or the second flanking region) includes n number of linked nucleosides having Formula (Ia-2)-(Ia-5) or a pharmaceutically acceptable salt or stereoisomer thereof.

[chemical structure]

[0259] In some embodiments, the polynucleotide, primary construct, or mmRNA (e.g., the first region, the first flanking region, or the second flanking region) includes n number of linked nucleosides having Formula (Ib) or Formula (Ib-1):

[chemical structure]

or a pharmaceutically acceptable salt or stereoisomer thereof,
[0260] wherein
[0261] U is O, S, N(R^{U})ₙᵤ, or C(R^{U})ₙᵤ, wherein nu is an integer from 0 to 2 and each R^{U} is, independently, H, halo, or optionally substituted alkyl;
[0262] - - - is a single bond or absent;
[0263] each of R¹, R^{3′}, R^{3″}, and R⁴ is, independently, H, halo, hydroxy, optionally substituted alkyl, optionally substituted alkoxy, optionally substituted alkenyloxy, optionally substituted alkynyloxy, optionally substituted aminoalkoxy, optionally substituted alkoxyalkoxy, optionally substituted hydroxyalkoxy, optionally substituted amino, azido, optionally substituted aryl, optionally substituted aminoalkyl, optionally substituted aminoalkenyl, optionally substituted aminoalkynyl, or absent; and wherein the combination of R¹ and R^{3′} or the combination of R¹ and R^{3″} can be taken together to form optionally substituted alkylene or optionally substituted heteroalkylene (e.g., to produce a locked nucleic acid);
[0264] each R⁵ is, independently, H, halo, hydroxy, optionally substituted alkyl, optionally substituted alkoxy, optionally substituted alkenyloxy, optionally substituted alkynyloxy, optionally substituted aminoalkoxy, optionally substituted alkoxyalkoxy, or absent;
[0265] each of Y¹, Y², and Y³ is, independently, O, S, Se, —NR^{N1}—, optionally substituted alkylene, or optionally substituted heteroalkylene, wherein R^{N1} is H, optionally substituted alkyl, optionally substituted alkenyl, optionally substituted alkynyl, or optionally substituted aryl;
[0266] each Y⁴ is, independently, H, hydroxy, thiol, boranyl, optionally substituted alkyl, optionally substituted alkenyl, optionally substituted alkynyl, optionally substituted alkoxy, optionally substituted alkenyloxy, optionally substituted alkynyloxy, optionally substituted alkoxyalkoxy, or optionally substituted amino;
[0267] n is an integer from 1 to 100,000; and
[0268] B is a nucleobase.

[0269] In some embodiments, the polynucleotide, primary construct, or mmRNA (e.g., the first region, first flanking region, or second flanking region) includes n number of linked nucleosides having Formula (Ic):

[chemical structure]

or a pharmaceutically acceptable salt or stereoisomer thereof,
[0270] wherein
[0271] U is O, S, N(R^{U})ₙᵤ, or C(R^{U})ₙᵤ, wherein nu is an integer from 0 to 2 and each R^{U} is, independently, H, halo, or optionally substituted alkyl;
[0272] - - - is a single bond or absent;
[0273] each of B¹, B², and B³ is, independently, a nucleobase (e.g., a purine, a pyrimidine, or derivatives thereof, as described herein), H, halo, hydroxy, thiol, optionally substituted alkyl, optionally substituted alkoxy, optionally substituted alkenyloxy, optionally substituted alkynyloxy, optionally substituted aminoalkoxy, optionally substituted alkoxyalkoxy, optionally substituted hydroxyalkoxy, optionally substituted amino, azido, optionally substituted aryl, optionally substituted aminoalkyl, optionally substituted aminoalkenyl, or optionally substituted aminoalkynyl, wherein one and only one of B¹, B², and B³ is a nucleobase;
[0274] each of R^{b1}, R^{b2}, R^{b3}, R³, and R⁵ is, independently, H, halo, hydroxy, thiol, optionally substituted alkyl, optionally substituted alkoxy, optionally substituted alkenyloxy, optionally substituted alkynyloxy, optionally substituted aminoalkoxy, optionally substituted alkoxyalkoxy, optionally substituted hydroxyalkoxy, optionally substituted amino, azido, optionally substituted aryl, optionally substituted aminoalkyl, optionally substituted aminoalkenyl or optionally substituted aminoalkynyl;
[0275] each of Y¹, Y², and Y³, is, independently, O, S, Se, —NR^{N1}—, optionally substituted alkylene, or optionally substituted heteroalkylene, wherein R^{N1} is H, optionally substituted alkyl, optionally substituted alkenyl, optionally substituted alkynyl, or optionally substituted aryl;
[0276] each Y⁴ is, independently, H, hydroxy, thiol, boranyl, optionally substituted alkyl, optionally substituted alkenyl, optionally substituted alkynyl, optionally substituted alkoxy, optionally substituted alkenyloxy, optionally substituted alkynyloxy, optionally substituted thioalkoxy, optionally substituted alkoxyalkoxy, or optionally substituted amino;
[0277] each Y⁵ is, independently, O, S, Se, optionally substituted alkylene (e.g., methylene), or optionally substituted heteroalkylene;
[0278] n is an integer from 1 to 100,000; and
[0279] wherein the ring including U can include one or more double bonds.

[0280] In particular embodiments, the ring including U does not have a double bond between U—CB³R^{b3} or between CB³R^{b3}—CB²R^{b2}.

[0281] In some embodiments, the polynucleotide, primary construct, or mmRNA (e.g., the first region, first flanking region, or second flanking region) includes n number of linked nucleosides having Formula (Id):

[chemical structure]

or a pharmaceutically acceptable salt or stereoisomer thereof,
[0282] wherein
[0283] U is O, S, N(R^{U})ₙᵤ, or C(R^{U})ₙᵤ, wherein nu is an integer from 0 to 2 and each R^{U} is, independently, H, halo, or optionally substituted alkyl;
[0284] each R³ is, independently, H, halo, hydroxy, thiol, optionally substituted alkyl, optionally substituted alkoxy, optionally substituted alkenyloxy, optionally substituted alkynyloxy, optionally substituted aminoalkoxy, optionally substituted alkoxyalkoxy, optionally substituted hydroxyalkoxy, optionally substituted amino, azido, optionally substituted aryl, optionally substituted aminoalkyl, optionally substituted aminoalkenyl, or optionally substituted aminoalkynyl;
[0285] each of Y¹, Y², and Y³, is, independently, O, S, Se, —NR^{N1}—, optionally substituted alkylene, or optionally substituted heteroalkylene, wherein R^{N1} is H, optionally substituted alkyl, optionally substituted alkenyl, optionally substituted alkynyl, or optionally substituted aryl;
[0286] each Y⁴ is, independently, H, hydroxy, thiol, boranyl, optionally substituted alkyl, optionally substituted alkenyl, optionally substituted alkynyl, optionally substituted alkoxy, optionally substituted alkenyloxy, optionally substituted alkynyloxy, optionally substituted thioalkoxy, optionally substituted alkoxyalkoxy, or optionally substituted amino;
[0287] each Y⁵ is, independently, O, S, optionally substituted alkylene (e.g., methylene), or optionally substituted heteroalkylene;
[0288] n is an integer from 1 to 100,000; and
[0289] B is a nucleobase (e.g., a purine, a pyrimidine, or derivatives thereof).

[0290] In some embodiments, the polynucleotide, primary construct, or mmRNA (e.g., the first region, first flanking region, or second flanking region) includes n number of linked nucleosides having Formula (Ie):

[chemical structure]

or a pharmaceutically acceptable salt or stereoisomer thereof,
[0291] wherein
[0292] each of U′ and U″ is, independently, O, S, N(R^{U})ₙᵤ, or C(R^{U})ₙᵤ, wherein nu is an integer from 0 to 2 and each R^{U} is, independently, H, halo, or optionally substituted alkyl;
[0293] each R⁶ is, independently, H, halo, hydroxy, thiol, optionally substituted alkyl, optionally substituted alkoxy, optionally substituted alkenyloxy, optionally substituted alkynyloxy, optionally substituted aminoalkoxy, optionally substituted alkoxyalkoxy, optionally substituted hydroxyalkoxy, optionally substituted amino, azido, optionally substituted aryl, optionally substituted aminoalkyl, optionally substituted aminoalkenyl, or optionally substituted aminoalkynyl;
[0294] each Y^{5′} is, independently, O, S, optionally substituted alkylene (e.g., methylene or ethylene), or optionally substituted heteroalkylene;
[0295] n is an integer from 1 to 100,000; and
[0296] B is a nucleobase (e.g., a purine, a pyrimidine, or derivatives thereof).

[0297] In some embodiments, the polynucleotide, primary construct, or mmRNA (e.g., the first region, first flanking region, or second flanking region) includes n number of linked nucleosides having Formula (If) or (If-1):

[chemical structure]

or a pharmaceutically acceptable salt or stereoisomer thereof,
[0298] wherein
[0299] each of U′ and U″ is, independently, O, S, N, N(R^{U})ₙᵤ, or C(R^{U})ₙᵤ, wherein nu is an integer from 0 to 2 and each R^{U} is, independently, H, halo, or optionally substituted alkyl (e.g., U′ is O and U″ is N);
[0300] - - - is a single bond or absent;
[0301] each of R^{1′}, R^{2′}, R^{1″}, R^{2″}, R³, and R⁴ is, independently, H, halo, hydroxy, thiol, optionally substituted alkyl, optionally substituted alkoxy, optionally substituted alkenyloxy, optionally substituted alkynyloxy, optionally substituted aminoalkoxy, optionally substituted alkoxyalkoxy, optionally substituted hydroxyalkoxy, optionally substituted amino, azido, optionally substituted aryl, optionally substituted aminoalkyl, optionally substituted aminoalkenyl, optionally substituted aminoalkynyl, or absent; and wherein the combination of R^{1′} and R³, the combination of R^{1″} and R³, the combination of R^{2′} and R³, or the combination of R^{2″} and R³ can be taken together to form optionally substituted alkylene or optionally substituted heteroalkylene (e.g., to produce a locked nucleic acid); each of m′ and m″ is, independently, an integer from 0 to 3 (e.g., from 0 to 2, from 0 to 1, from 1 to 3, or from 1 to 2);
[0302] each of Y¹, Y², and Y³, is, independently, O, S, Se, —NR^{N1}—, optionally substituted alkylene, or optionally substituted heteroalkylene, wherein R^{N1} is H, optionally substituted alkyl, optionally substituted alkenyl, optionally substituted alkynyl, optionally substituted aryl, or absent;
[0303] each Y⁴ is, independently, H, hydroxy, thiol, boranyl, optionally substituted alkyl, optionally substituted alkenyl, optionally substituted alkynyl, optionally substituted alkoxy, optionally substituted alkenyloxy, optionally substituted alkynyloxy, optionally substituted thioalkoxy, optionally substituted alkoxyalkoxy, or optionally substituted amino;
[0304] each Y⁵ is, independently, O, S, Se, optionally substituted alkylene (e.g., methylene), or optionally substituted heteroalkylene;
[0305] n is an integer from 1 to 100,000; and
[0306] B is a nucleobase (e.g., a purine, a pyrimidine, or derivatives thereof).

[0307] In some embodiments of the polynucleotides, primary constructs, or mmRNA (e.g., Formulas (Ia), (Ia-1)-(Ia-3), (Ib)-(If), and (IIa)-(IIp)), the ring including U has one or two double bonds.

[0308] In some embodiments of the polynucleotides, primary constructs, or mmRNA (e.g., Formulas (Ia)-(Ia-5), (Ib)-(If-1), (IIa)-(IIp), (IIb-1), (IIb-2), (IIc-1)-(IIc-2), (IIn-1), (IIn-2), (IVa)-(IVl), and (IXa)-(IXr)), each of R¹, R^{1′}, and R^{1″}, if present, is H. In further embodiments, each of R², R^{2′}, and R^{2″}, if present, is, independently, H, halo (e.g., fluoro), hydroxy, optionally substituted alkoxy (e.g., methoxy or ethoxy), or optionally substituted alkoxyalkoxy. In particular embodiments, alkoxyalkoxy is —(CH₂)ₛ₂(OCH₂CH₂)ₛ₁(CH₂)ₛ₃OR′, wherein s1 is an integer from 1 to 10 (e.g., from 1 to 6 or from 1 to 4), each of s2 and s3, independently, is an integer from 0 to 10 (e.g., from 0 to 4, from 0 to 6, from 1 to 4, from 1 to 6, or from 1 to 10), and R′ is H or C₁₋₂₀ alkyl). In some embodiments, s2 is 0, s1 is 1 or 2, s3 is 0 or 1, and R′ is C₁₋₆ alkyl.

[0309] In some embodiments of the polynucleotides, primary constructs, or mmRNA (e.g., Formulas (Ia)-(Ia-5), (Ib)-(If-1), (IIa)-(IIp), (IIb-1), (IIb-2), (IIc-1)-(IIc-2), (IIn-1), (IIn-2), (IVa)-(IVl), and (IXa)-(IXr)), each of R², R^{2′}, and R^{2″}, if present, is H. In further embodiments, each of R¹, R^{1′}, and R^{1″}, if present, is, independently, H, halo (e.g., fluoro), hydroxy, optionally substituted alkoxy (e.g., methoxy or ethoxy), or optionally substituted alkoxyalkoxy. In particular embodiments, alkoxyalkoxy is-(CH₂)ₛ₂(OCH₂CH₂)ₛ₁(CH₂)ₛ₃OR′, wherein s1 is an integer from 1 to 10 (e.g., from 1 to 6 or from 1 to 4), each of s2 and s3, independently, is an integer from 0 to 10 (e.g., from 0 to 4, from 0 to 6, from 1 to 4, from 1 to 6, or from 1 to 10), and R′ is H or C₁₋₂₀ alkyl). In some embodiments, s2 is 0, s1 is 1 or 2, s3 is 0 or 1, and R′ is C₁₋₆ alkyl.

[0310] In some embodiments of the polynucleotides, primary constructs, or mmRNA (e.g., Formulas (Ia)-(Ia-5), (Ib)-(If-1), (IIa)-(IIp), (IIb-1), (IIb-2), (IIc-1)-(IIc-2), (IIn-1), (IIn-2), (IVa)-(IVl), and (IXa)-(IXr)), each of R³, R⁴, and R⁵ is, independently, H, halo (e.g., fluoro), hydroxy, optionally substituted alkyl, optionally substituted alkoxy (e.g., methoxy or ethoxy), or optionally substituted alkoxyalkoxy. In particular embodiments, R³ is H, R⁴ is H, R⁵ is H, or R³, R⁴, and R⁵ are all H. In particular embodiments, R³ is C₁₋₆ alkyl, R⁴ is C₁₋₆ alkyl, R⁵ is C₁₋₆ alkyl, or R³, R⁴, and R⁵ are all C₁₋₆ alkyl. In particular embodiments, R³ and R⁴ are both H, and R⁵ is C₁₋₆ alkyl.

[0311] In some embodiments of the polynucleotides, primary constructs, or mmRNA (e.g., Formulas (Ia)-(Ia-5), (Ib)-(If-1), (IIa)-(IIp), (IIb-1), (IIb-2), (IIc-1)-(IIc-2), (IIn-1), (IIn-2), (IVa)-(IVl), and (IXa)-(IXr)), R³ and R⁵ join together to form optionally substituted alkylene or optionally substituted heteroalkylene and, taken together with the carbons to which they are attached, provide an optionally substituted heterocyclyl (e.g., a bicyclic, tricyclic, or tetracyclic heterocyclyl, such as trans-3′,4′ analogs, wherein R³ and R⁵ join together to form heteroalkylene (e.g., —(CH₂)_{b1}O(CH₂)_{b2}O(CH₂)_{b3}—, wherein each of b1, b2, and b3 are, independently, an integer from 0 to 3).

[0312] In some embodiments of the polynucleotides, primary constructs, or mmRNA (e.g., Formulas (Ia)-(Ia-5), (Ib)-(If-1), (IIa)-(IIp), (IIb-1), (IIb-2), (IIc-1)-(IIc-2), (IIn-1), (IIn-2), (IVa)-(IVl), and (IXa)-(IXr)), R³ and one or more of R^{1′}, R^{1″}, R^{2′}, R^{2″}, or R⁵ join together to form optionally substituted alkylene or optionally substituted heteroalkylene and, taken together with the carbons to which they are attached, provide an optionally substituted heterocyclyl (e.g., a bicyclic, tricyclic, or tetracyclic heterocyclyl, R³ and one or more of R^{1′}, R^{1″}, R^{2′}, R^{2″}, or R⁵ join together to form heteroalkylene (e.g., —(CH₂)_{b1}O(CH₂)_{b2}O(CH₂)_{b3}—, wherein each of b1, b2, and b3 are, independently, an integer from 0 to 3).

[0313] In some embodiments of the polynucleotides, primary constructs, or mmRNA (e.g., Formulas (Ia)-(Ia-5), (Ib)-(If-1), (IIa)-(IIp), (IIb-1), (IIb-2), (IIc-1)-(IIc-2), (IIn-1), (IIn-2), (IVa)-(IVl), and (IXa)-(IXr)), R⁵ and one or more of R^{1′}, R^{1″}, R^{2′}, or R^{2″} join together to form optionally substituted alkylene or optionally substituted heteroalkylene and, taken together with the carbons to which they are attached, provide an optionally substituted heterocyclyl (e.g., a bicyclic, tricyclic, or tetracyclic heterocyclyl, R⁵ and one or more of R^{1′}, R^{1″}, R^{2′}, or R^{2″} join together to form heteroalkylene (e.g., —(CH₂)_{b1}O(CH₂)_{b2}O(CH₂)_{b3}—, wherein each of b1, b2, and b3 are, independently, an integer from 0 to 3).

[0314] In some embodiments of the polynucleotides, primary constructs, or mmRNA (e.g., Formulas (Ia)-(Ia-5), (Ib)-(If-1), (IIa)-(IIp), (IIb-1), (IIb-2), (IIc-1)-(IIc-2), (IIn-1), (IIn-2), (IVa)-(IVl), and (IXa)-(IXr)), each Y2 is, independently, O, S, or —NR^{N1}—, wherein R^{N1} is H, optionally substituted alkyl, optionally substituted alkenyl, optionally substituted alkynyl, or optionally substituted aryl. In particular embodiments, Y² is NR^{N1}—, wherein R^{N1} is H or optionally substituted alkyl (e.g., C₁₋₆ alkyl, such as methyl, ethyl, isopropyl, or n-propyl).

[0315] In some embodiments of the polynucleotides, primary constructs, or mmRNA (e.g., Formulas (Ia)-(Ia-5), (Ib)-(If-1), (IIa)-(IIp), (IIb-1), (IIb-2), (IIc-1)-(IIc-2), (IIn-1), (IIn-2), (IVa)-(IVl), and (IXa)-(IXr)), each Y³ is, independently, O or S.

[0316] In some embodiments of the polynucleotides, primary constructs, or mmRNA (e.g., Formulas (Ia)-(Ia-5), (Ib)-(If-1), (IIa)-(IIp), (IIb-1), (IIb-2), (IIc-1)-(IIc-2), (IIn-1), (IIn-2), (IVa)-(IVl), and (IXa)-(IXr)), R¹ is H; each R² is, independently, H, halo (e.g., fluoro), hydroxy, optionally substituted alkoxy (e.g., methoxy or ethoxy), or optionally substituted alkoxyalkoxy (e.g., —(CH₂)ₛ₂(OCH₂CH₂)ₛ₁(CH₂)ₛ₃OR′, wherein s1 is an integer from 1 to 10 (e.g., from 1 to 6 or from 1 to 4), each of s2 and s3, independently, is an integer from 0 to 10 (e.g., from 0 to 4, from 0 to 6, from 1 to 4, from 1 to 6, or from 1 to 10), and R′ is H or C₁₋₂₀ alkyl, such as wherein s2 is 0, s1 is 1 or 2, s3 is 0 or 1, and R′ is C₁₋₆ alkyl); each Y² is, independently, O or —NR^{N1}—, wherein R^{N1} is H, optionally substituted alkyl, optionally substituted alkenyl, optionally substituted alkynyl, or optionally substituted aryl (e.g., wherein R^{N1} is H or optionally substituted alkyl (e.g., C₁₋₆ alkyl, such as methyl, ethyl, isopropyl, or n-propyl)); and each Y³ is, independently, O or S (e.g., S). In further embodiments, R³ is H, halo (e.g., fluoro), hydroxy, optionally substituted alkyl, optionally substituted alkoxy (e.g., methoxy or ethoxy), or optionally substituted alkoxyalkoxy. In yet further embodiments, each Y1 is, independently, O or —NR^{N1}—, wherein R^{N1} is H, optionally substituted alkyl, optionally substituted alkenyl, optionally substituted alkynyl, or optionally substituted aryl (e.g., wherein R^{N1} is H or optionally substituted alkyl (e.g., C₁₋₆ alkyl, such as methyl, ethyl, isopropyl, or n-propyl)); and each Y⁴ is, independently, H, hydroxy, thiol, optionally substituted alkyl, optionally substituted alkoxy, optionally substituted thioalkoxy, optionally substituted alkoxyalkoxy, or optionally substituted amino.

[0317] In some embodiments of the polynucleotides, primary constructs, or mmRNA (e.g., Formulas (Ia)-(Ia-5), (Ib)-(If-1), (IIa)-(IIp), (IIb-1), (IIb-2), (IIc-1)-(IIc-2), (IIn-1), (IIn-2), (IVa)-(IVl), and (IXa)-(IXr)), each R¹ is, independently, H, halo (e.g., fluoro), hydroxy, optionally substituted alkoxy (e.g., methoxy or ethoxy), or optionally substituted alkoxyalkoxy (e.g., —(CH₂)ₛ₂(OCH₂CH₂)ₛ₁(CH₂)ₛ₃OR′, wherein s1 is an integer from 1 to 10 (e.g., from 1 to 6 or from 1 to 4), each of s2 and s3, independently, is an integer from 0 to 10 (e.g., from 0 to 4, from 0 to 6, from 1 to 4, from 1 to 6, or from 1 to 10), and R′ is H or C₁₋₂₀ alkyl, such as wherein s2 is 0, s1 is 1 or 2, s3 is 0 or 1, and R′ is C₁₋₆ alkyl); R² is H; each Y² is, independently, O or —NR^{N1}—, wherein R^{N1} is H, optionally substituted alkyl, optionally substituted alkenyl, optionally substituted alkynyl, or optionally substituted aryl (e.g., wherein R^{N1} is H or optionally substituted alkyl (e.g., C₁₋₆ alkyl, such as methyl, ethyl, isopropyl, or n-propyl)); and each Y³ is, independently, O or S (e.g., S). In further embodiments, R³ is H, halo (e.g., fluoro), hydroxy, optionally substituted alkyl, optionally substituted alkoxy (e.g., methoxy or ethoxy), or optionally substituted alkoxyalkoxy. In yet further embodiments, each Y¹ is, independently, O or —NR^{N1}—, wherein R^{N1} is H, optionally substituted alkyl, optionally substituted alkenyl, optionally substituted alkynyl, or optionally substituted aryl (e.g., wherein R^{N1} is H or optionally substituted alkyl (e.g., C₁₋₆ alkyl, such as methyl, ethyl, isopropyl, or n-propyl)); and each Y⁴ is, independently, H, hydroxy, thiol, optionally substituted alkyl, optionally substituted alkoxy, optionally substituted thioalkoxy, optionally substituted alkoxyalkoxy, or optionally substituted amino.

[0318] In some embodiments of the polynucleotides, primary constructs, or mmRNA (e.g., Formulas (Ia)-(Ia-5), (Ib)-(If-1), (IIa)-(IIp), (IIb-1), (IIb-2), (IIc-1)-(IIc-2), (IIn-1), (IIn-2), (IVa)-(IVl), and (IXa)-(IXr)), the ring including U is in the B-D (e.g., β-D-ribo) configuration.

[0319] In some embodiments of the polynucleotides, primary constructs, or mmRNA (e.g., Formulas (Ia)-(Ia-5), (Ib)-(If-1), (IIa)-(IIp), (IIb-1), (IIb-2), (IIc-1)-(IIc-2), (IIn-1), (IIn-2), (IVa)-(IVl), and (IXa)-(IXr)), the ring including U is in the α-L (e.g., α-L-ribo) configuration.

[0320] In some embodiments of the polynucleotides, primary constructs, or mmRNA (e.g., Formulas (Ia)-(Ia-5), (Ib)-(If-1), (IIa)-(IIp), (IIb-1), (IIb-2), (IIc-1)-(IIc-2), (IIn-1), (IIn-2), (IVa)-(IVl), and (IXa)-(IXr)), one or more B is not pseudouridine (ψ) or 5-methyl-cytidine (m⁵C). In some embodiments, about 10% to about 100% of n number of B nucleobases is not ψ or m⁵C (e.g., from 10% to 20%, from 10% to 35%, from 10% to 50%, from 10% to 60%, from 10% to 75%, from 10% to 90%, from 10% to 95%, from 10% to 98%, from 10% to 99%, from 20% to 35%, from 20% to 50%, from 20% to 60%, from 20% to 75%, from 20% to 90%, from 20% to 95%, from 20% to 98%, from 20% to 99%, from 20% to 100%, from 50% to 60%, from 50% to 75%, from 50% to 90%, from 50% to 95%, from 50% to 98%, from 50% to 99%, from 50% to 100%, from 75% to 90%, from 75% to 95%, from 75% to 98%, from 75% to 99%, and from 75% to 100% of n number of B is not ψ or m⁵C). In some embodiments, B is not ψ or m⁵C.

[0321] In some embodiments of the polynucleotides, primary constructs, or mmRNA (e.g., Formulas (Ia)-(Ia-5), (Ib)-(If-1), (IIa)-(IIp), (IIb-1), (IIb-2), (IIc-1)-(IIc-2), (IIn-1), (IIn-2), (IVa)-(IVl), and (IXa)-(IXr)), when B is an unmodified nucleobase selected from cytosine, guanine, uracil and adenine, then at least one of Y¹, Y², or Y³ is not O.

[0322] In some embodiments, the polynucleotide, primary construct, or mmRNA includes a modified ribose. In some embodiments, the polynucleotide, primary construct, or mmRNA (e.g., the first region, the first flanking region, or the second flanking region) includes n number of linked nucleosides having Formula (IIa)-(IIc):

[chemical structure]

or a pharmaceutically acceptable salt or stereoisomer thereof. In particular embodiments, U is O or C(R^{U})ₙᵤ, wherein nu is an integer from 0 to 2 and each R^{U} is, independently, H, halo, or optionally substituted alkyl (e.g., U is —CH₂— or —CH—). In other embodiments, each of R¹, R², R³, R⁴, and R⁵ is, independently, H, halo, hydroxy, thiol, optionally substituted alkyl, optionally substituted alkoxy, optionally substituted alkenyloxy, optionally substituted alkynyloxy, optionally substituted aminoalkoxy, optionally substituted alkoxyalkoxy, optionally substituted hydroxyalkoxy, optionally substituted amino, azido, optionally substituted aryl, optionally substituted aminoalkyl, optionally substituted aminoalkenyl, optionally substituted aminoalkynyl, or absent (e.g., each R¹ and R² is, independently, H, halo, hydroxy, optionally substituted alkyl, or optionally substituted alkoxy; each R³ and R⁴ is, independently, H or optionally substituted alkyl; and R⁵ is H or hydroxy), and [symbol] is a single bond or double bond.

[0323] In particular embodiments, the polynucleotides or mmRNA includes n number of linked nucleosides having Formula (IIb-1)-(IIb-2):

[chemical structure]

or a pharmaceutically acceptable salt or stereoisomer thereof. In some embodiments, U is O or C(R^{U})ₙᵤ, wherein nu is an integer from 0 to 2 and each R^{U} is, independently, H, halo, or optionally substituted alkyl (e.g., U is —CH₂— or —CH—). In other embodiments, each of R¹ and R² is, independently, H, halo, hydroxy, thiol, optionally substituted alkyl, optionally substituted alkoxy, optionally substituted alkenyloxy, optionally substituted alkynyloxy, optionally substituted aminoalkoxy, optionally substituted alkoxyalkoxy, optionally substituted hydroxyalkoxy, optionally substituted amino, azido, optionally substituted aryl, optionally substituted aminoalkyl, optionally substituted aminoalkenyl, optionally substituted aminoalkynyl, or absent (e.g., each R¹ and R² is, independently, H, halo, hydroxy, optionally substituted alkyl, or optionally substituted alkoxy, e.g., H, halo, hydroxy, alkyl, or alkoxy). In particular embodiments, R² is hydroxy or optionally substituted alkoxy (e.g., methoxy, ethoxy, or any described herein).

[0324] In particular embodiments, the polynucleotide, primary construct, or mmRNA includes n number of linked nucleosides having Formula (IIc-1)-(IIc-4):

[chemical structure]

or a pharmaceutically acceptable salt or stereoisomer thereof. In some embodiments, U is O or C(R^{U})ₙᵤ, wherein nu is an integer from 0 to 2 and each R^{U} is, independently, H, halo, or optionally substituted alkyl (e.g., U is —CH₂— or —CH—). In some embodiments, each of R¹, R², and R³ is, independently, H, halo, hydroxy, thiol, optionally substituted alkyl, optionally substituted alkoxy, optionally substituted alkenyloxy, optionally substituted alkynyloxy, optionally substituted aminoalkoxy, optionally substituted alkoxyalkoxy, optionally substituted hydroxyalkoxy, optionally substituted amino, azido, optionally substituted aryl, optionally substituted aminoalkyl, optionally substituted aminoalkenyl, optionally substituted aminoalkynyl, or absent (e.g., each R¹ and R² is, independently, H, halo, hydroxy, optionally substituted alkyl, or optionally substituted alkoxy, e.g., H, halo, hydroxy, alkyl, or alkoxy; and each R³ is, independently, H or optionally substituted alkyl)). In particular embodiments, R² is optionally substituted alkoxy (e.g., methoxy or ethoxy, or any described herein). In particular embodiments, R¹ is optionally substituted alkyl, and R² is hydroxy. In other embodiments, R¹ is hydroxy, and R² is optionally substituted alkyl. In further embodiments, R³ is optionally substituted alkyl.

[0325] In some embodiments, the polynucleotide, primary construct, or mmRNA includes an acyclic modified ribose. In some embodiments, the polynucleotide, primary construct, or mmRNA (e.g., the first region, the first flanking region, or the second flanking region) includes n number of linked nucleosides having Formula (IId)-(IIf):

[chemical structure]

or a pharmaceutically acceptable salt or stereoisomer thereof.

[0326] In some embodiments, the polynucleotide, primary construct, or mmRNA includes an acyclic modified hexitol. In some embodiments, the polynucleotide, primary construct, or mmRNA (e.g., the first region, the first flanking region, or the second flanking region) includes n number of linked nucleosides Formula (IIg)-(IIj):

[chemical structure]

or a pharmaceutically acceptable salt or stereoisomer thereof.

[0327] In some embodiments, the polynucleotide, primary construct, or mmRNA includes a sugar moiety having a contracted or an expanded ribose ring. In some embodiments, the polynucleotide, primary construct, or mmRNA (e.g., the first region, the first flanking region, or the second flanking region) includes n number of linked nucleosides having Formula (IIk)-(IIm):

[chemical structure]

or a pharmaceutically acceptable salt or stereoisomer thereof, wherein each of R^{1′}, R^{1″}, R^{2′}, and R^{2″} is, independently, H, halo, hydroxy, optionally substituted alkyl, optionally substituted alkoxy, optionally substituted alkenyloxy, optionally substituted alkynyloxy, optionally substituted aminoalkoxy, optionally substituted alkoxyalkoxy, or absent; and wherein the combination of R^{2′} and R³ or the combination of R^{2″} and R³ can be taken together to form optionally substituted alkylene or optionally substituted heteroalkylene.

[0328] In some embodiments, the polynucleotide, primary construct, or mmRNA includes a locked modified ribose. In some embodiments, the polynucleotide, primary construct, or mmRNA (e.g., the first region, the first flanking region, or the second flanking region) includes n number of linked nucleosides having Formula (IIn):

[chemical structure]

or a pharmaceutically acceptable salt or stereoisomer thereof, wherein R^{3′} is O, S, or —NR^{N1}—, wherein R^{N1} is H, optionally substituted alkyl, optionally substituted alkenyl, optionally substituted alkynyl, or optionally substituted aryl and R^{3″} is optionally substituted alkylene (e.g., —CH₂—, —CH₂CH₂—, or —CH₂CH₂CH₂—) or optionally substituted heteroalkylene (e.g., —CH₂NH—, —CH₂CH₂NH—, —CH₂OCH₂—, or —CH₂CH₂OCH₂—) (e.g., R^{3′} is O and R^{3″} is optionally substituted alkylene (e.g., —CH₂—, —CH₂CH₂—, or —CH₂CH₂CH₂—)).

[0329] In some embodiments, the polynucleotide, primary construct, or mmRNA includes n number of linked nucleosides having Formula (IIn-1)-(II-n2):

[chemical structure]

or a pharmaceutically acceptable salt or stereoisomer thereof, wherein R^{3′} is O, S, or —NR^{N1}—, wherein R^{N1} is H, optionally substituted alkyl, optionally substituted alkenyl, optionally substituted alkynyl, or optionally substituted aryl and R^{3″} is optionally substituted alkylene (e.g., —CH₂—, —CH₂CH₂—, or —CH₂CH₂CH₂—) or optionally substituted heteroalkylene (e.g., —CH₂NH—, —CH₂CH₂NH—, —CH₂OCH₂—, or —CH₂CH₂OCH₂—) (e.g., R^{3′} is O and R^{3″} is optionally substituted alkylene (e.g., —CH₂—, —CH₂CH₂—, or —CH₂CH₂CH₂—)).

[0330] In some embodiments, the polynucleotide, primary construct, or mmRNA includes a locked modified ribose that forms a tetracyclic heterocyclyl. In some embodiments, the polynucleotide, primary construct, or mmRNA (e.g., the first region, the first flanking region, or the second flanking region) includes n number of linked nucleosides having Formula (IIo):

[chemical structure]

or a pharmaceutically acceptable salt or stereoisomer thereof, wherein R^{12a}, R^{12c}, T^{1′}, T^{1″}, T^{2′}, T^{2″}, V¹, and V³ are as described herein.

[0331] Any of the formulas for the polynucleotides, primary constructs, or mmRNA can include one or more nucleobases described herein (e.g., Formulas (b1)-(b43)).

[0332] In one embodiment, the present invention provides methods of preparing a polynucleotide, primary construct, or mmRNA, wherein the polynucleotide comprises n number of nucleosides having Formula (Ia), as defined herein:

[chemical structure]

the method comprising reacting a compound of Formula (IIIa), as defined herein:

[chemical structure]

with an RNA polymerase, and a cDNA template.

[0333] In a further embodiment, the present invention provides methods of amplifying a polynucleotide, primary construct, or mmRNA comprising at least one nucleotide (e.g., mmRNA molecule), the method comprising: reacting a compound of Formula (IIIa), as defined herein, with a primer, a cDNA template, and an RNA polymerase.

[0334] In one embodiment, the present invention provides methods of preparing a polynucleotide, primary construct, or mmRNA comprising at least one nucleotide (e.g., mmRNA molecule), wherein the polynucleotide comprises n number of nucleosides having Formula (Ia), as defined herein:

[chemical structure]

the method comprising reacting a compound of Formula (IIIa-1), as defined herein:

[chemical structure]

with an RNA polymerase, and a cDNA template.

[0335] In a further embodiment, the present invention provides methods of amplifying a polynucleotide, primary construct, or mmRNA comprising at least one nucleotide (e.g., mmRNA molecule), the method comprising:
[0336] reacting a compound of Formula (IIIa-1), as defined herein, with a primer, a cDNA template, and an RNA polymerase.

[0337] In one embodiment, the present invention provides methods of preparing a modified mRNA comprising at least one nucleotide (e.g., mmRNA molecule), wherein the polynucleotide comprises n number of nucleosides having Formula (Ia-2), as defined herein:

[chemical structure]

the method comprising reacting a compound of Formula (IIIa-2), as defined herein:

[chemical structure]

with an RNA polymerase, and a cDNA template.

[0338] In a further embodiment, the present invention provides methods of amplifying a modified mRNA comprising at least one nucleotide (e.g., mmRNA molecule), the method comprising:
[0339] reacting a compound of Formula (IIIa-2), as defined herein, with a primer, a cDNA template, and an RNA polymerase.

[0340] In some embodiments, the reaction may be repeated from 1 to about 7,000 times. In any of the embodiments herein, B may be a nucleobase of Formula (b1)-(b43).

[0341] The polynucleotides, primary constructs, and mmRNA can optionally include 5′ and/or 3′ flanking regions, which are described herein.

Modified RNA (mmRNA) Molecules

[0342] The present invention also includes building blocks, e.g., modified ribonucleosides, modified ribonucleotides, of modified RNA (mmRNA) molecules. For example, these building blocks can be useful for preparing the polynucleotides, primary constructs, or mmRNA of the invention.

In some embodiments, the building block molecule has Formula (IIIa) or (IIIa-1):

[chemical structure]

or a pharmaceutically acceptable salt or stereoisomer thereof, wherein the substituents are as described herein (e.g., for Formula (Ia) and (Ia-1)), and wherein when B is an unmodified nucleobase selected from cytosine, guanine, uracil and adenine, then at least one of Y¹, Y², or Y³ is not O.

[0343] In some embodiments, the building block molecule, which may be incorporated into a polynucleotide, primary construct, or mmRNA, has Formula (IVa)-(IVb):

[chemical structure]

or a pharmaceutically acceptable salt or stereoisomer thereof, wherein B is as described herein (e.g., any one of (b1)-(b43)). In particular embodiments, Formula (IVa) or (IVb) is combined with a modified uracil (e.g., any one of formulas (b1)-(b9), (b21)-(b23), and (b28)-(b31), such as formula (b1), (b8), (b28), (b29), or (b30)). In particular embodiments, Formula (IVa) or (IVb) is combined with a modified cytosine (e.g., any one of formulas (b10)-(b14), (b24), (b25), and (b32)-(b36), such as formula (b10) or (b32)). In particular embodiments, Formula (IVa) or (IVb) is combined with a modified guanine (e.g., any one of formulas (b15)-(b17) and (b37)-(b40)). In particular embodiments, Formula (IVa) or (IVb) is combined with a modified adenine (e.g., any one of formulas (b18)-(b20) and (b41)-(b43)).

[0344] In some embodiments, the building block molecule, which may be incorporated into a polynucleotide, primary construct, or mmRNA, has Formula (IVc)-(IVk):

[chemical structure]

[chemical structure]

or a pharmaceutically acceptable salt or stereoisomer thereof, wherein B is as described herein (e.g., any one of (b1)-(b43)). In particular embodiments, one of Formulas (IVc)-(IVk) is combined with a modified uracil (e.g., any one of formulas (b1)-(b9), (b21)-(b23), and (b28)-(b31), such as formula (b1), (b8), (b28), (b29), or (b30)). In particular embodiments, one of Formulas (IVc)-(IVk) is combined with a modified cytosine (e.g., any one of formulas (b10)-(b14), (b24), (b25), and (b32)-(b36), such as formula (b10) or (b32)). In particular embodiments, one of Formulas (IVc)-(IVk) is combined with a modified guanine (e.g., any one of formulas (b15)-(b17) and (b37)-(b40)). In particular embodiments, one of Formulas (IVc)-(IVk) is combined with a modified adenine (e.g., any one of formulas (b18)-(b20) and (b41)-(b43)).

[0345] In other embodiments, the building block molecule, which may be incorporated into a polynucleotide, primary construct, or mmRNA, has Formula (Va) or (Vb):

[chemical structure]

or a pharmaceutically acceptable salt or stereoisomer thereof, wherein B is as described herein (e.g., any one of (b1)-(b43)).

[0346] In other embodiments, the building block molecule, which may be incorporated into a polynucleotide, primary construct, or mmRNA, has Formula (IXa)-(IXd):

[chemical structure]

or a pharmaceutically acceptable salt or stereoisomer thereof, wherein B is as described herein (e.g., any one of (b1)-(b43)). In particular embodiments, one of Formulas (IXa)-(IXd) is combined with a modified uracil (e.g., any one of formulas (b1)-(b9), (b21)-(b23), and (b28)-(b31), such as formula (b1), (b8), (b28), (b29), or (b30)). In particular embodiments, one of Formulas (IXa)-(IXd) is combined with a modified cytosine (e.g., any one of formulas (b10)-(b14), (b24), (b25), and (b32)-(b36), such as formula (b10) or (b32)). In particular embodiments, one of Formulas (IXa)-(IXd) is combined with a modified guanine (e.g., any one of formulas (b15)-(b17) and (b37)-(b40)). In particular embodiments, one of Formulas (IXa)-(IXd) is combined with a modified adenine (e.g., any one of formulas (b18)-(b20) and (b41)-(b43)).

[0347] In other embodiments, the building block molecule, which may be incorporated into a polynucleotide, primary construct, or mmRNA, has Formula (IXe)-(IXg):

[chemical structure]

or a pharmaceutically acceptable salt or stereoisomer thereof, wherein B is as described herein (e.g., any one of (b1)-(b43)). In particular embodiments, one of Formulas (IXe)-(IXg) is combined with a modified uracil (e.g., any one of formulas (b1)-(b9), (b21)-(b23), and (b28)-(b31), such as formula (b1), (b8), (b28), (b29), or (b30)). In particular embodiments, one of Formulas (IXe)-(IXg) is combined with a modified cytosine (e.g., any one of formulas (b10)-(b14), (b24), (b25), and (b32)-(b36), such as formula (b10) or (b32)). In particular embodiments, one of Formulas (IXe)-(IXg) is combined with a modified guanine (e.g., any one of formulas (b15)-(b17) and (b37)-(b40)). In particular embodiments, one of Formulas (IXe)-(IXg) is combined with a modified adenine (e.g., any one of formulas (b18)-(b20) and (b41)-(b43)).

[0348] In other embodiments, the building block molecule, which may be incorporated into a polynucleotide, primary construct, or mmRNA, has Formula (IXh)-(IXk):

[chemical structure]

or a pharmaceutically acceptable salt or stereoisomer thereof, wherein B is as described herein (e.g., any one of (b1)-(b43)). In particular embodiments, one of Formulas (IXh)-(IXk) is combined with a modified uracil (e.g., any one of formulas (b1)-(b9), (b21)-(b23), and (b28)-(b31), such as formula (b1), (b8), (b28), (b29), or (b30)). In particular embodiments, one of Formulas (IXh)-(IXk) is combined with a modified cytosine (e.g., any one of formulas (b10)-(b14), (b24), (b25), and (b32)-(b36), such as formula (b10) or (b32)). In particular embodiments, one of Formulas (IXh)-(IXk) is combined with a modified guanine (e.g., any one of formulas (b15)-(b17) and (b37)-(b40)). In particular embodiments, one of Formulas (IXh)-(IXk) is combined with a modified adenine (e.g., any one of formulas (b18)-(b20) and (b41)-(b43)).

[0349] In other embodiments, the building block molecule, which may be incorporated into a polynucleotide, primary construct, or mmRNA, has Formula (IXI)-(IXr):

[chemical structure]

or a pharmaceutically acceptable salt or stereoisomer thereof, wherein each r1 and r2 is, independently, an integer from 0 to 5 (e.g., from 0 to 3, from 1 to 3, or from 1 to 5) and B is as described herein (e.g., any one of (b1)-(b43)). In particular embodiments, one of Formulas (IXI)-(IXr) is combined with a modified uracil (e.g., any one of formulas (b1)-(b9), (b21)-(b23), and (b28)-(b31), such as formula (b1), (b8), (b28), (b29), or (b30)). In particular embodiments, one of Formulas (IXI)-(IXr) is combined with a modified cytosine (e.g., any one of formulas (b10)-(b14), (b24), (b25), and (b32)-(b36), such as formula (b10) or (b32)). In particular embodiments, one of Formulas (IXI)-(IXr) is combined with a modified guanine (e.g., any one of formulas (b15)-(b17) and (b37)-(b40)). In particular embodiments, one of Formulas (IXI)-(IXr) is combined with a modified adenine (e.g., any one of formulas (b18)-(b20) and (b41)-(b43)).

[0350] In some embodiments, the building block molecule, which may be incorporated into a polynucleotide, primary construct, or mmRNA, can be selected from the group consisting of:

[chemical structure]

[chemical structure]

or a pharmaceutically acceptable salt or stereoisomer thereof, wherein each r is, independently, an integer from 0 to 5 (e.g., from 0 to 3, from 1 to 3, or from 1 to 5).

[0351] In some embodiments, the building block molecule, which may be incorporated into a polynucleotide, primary construct, or mmRNA, can be selected from the group consisting of:

[chemical structure]

[chemical structure]

or a pharmaceutically acceptable salt or stereoisomer thereof, wherein each r is, independently, an integer from 0 to 5 (e.g., from 0 to 3, from 1 to 3, or from 1 to 5) and s1 is as described herein.

[0352] In some embodiments, the building block molecule, which may be incorporated into a nucleic acid (e.g., RNA, mRNA, polynucleotide, primary construct, or mmRNA), is a modified uridine (e.g., selected from the group consisting of:

[chemical structure]

[chemical structure]

[chemical structure]

[chemical structure]

[chemical structure]

[chemical structure]

[chemical structure]

[chemical structure]

[chemical structure]

[chemical structure]

[chemical structure]

[chemical structure]

[chemical structure]

[chemical structure]

[chemical structure]

[chemical structure]

[chemical structure]

[chemical structure]

[chemical structure]

[chemical structure]

[chemical structure]

or a pharmaceutically acceptable salt or stereoisomer thereof, wherein Y¹, Y³, Y⁴, Y⁶, and r are as described herein (e.g., each r is, independently, an integer from 0 to 5, such as from 0 to 3, from 1 to 3, or from 1 to 5)).

[0353] In some embodiments, the building block molecule, which may be incorporated into a polynucleotide, primary construct, or mmRNA, is a modified cytidine (e.g., selected from the group consisting of:

[chemical structure]

[chemical structure]

[chemical structure]

or a pharmaceutically acceptable salt or stereoisomer thereof, wherein Y¹, Y³, Y⁴, Y⁶, and r are as described herein (e.g., each r is, independently, an integer from 0 to 5, such as from 0 to 3, from 1 to 3, or from 1 to 5)). For example, the building block molecule, which may be incorporated into a polynucleotide, primary construct, or mmRNA, can be:

[chemical structure]

or a pharmaceutically acceptable salt or stereoisomer thereof, wherein each r is, independently, an integer from 0 to 5 (e.g., from 0 to 3, from 1 to 3, or from 1 to 5).

[0354] In some embodiments, the building block molecule, which may be incorporated into a polynucleotide, primary construct, or mmRNA, is a modified adenosine (e.g., selected from the group consisting of:

[chemical structure]

[chemical structure]

[chemical structure]

[chemical structure]

[chemical structure]

[chemical structure]

[chemical structure]

or a pharmaceutically acceptable salt or stereoisomer thereof, wherein Y¹, Y³, Y⁴, Y⁶, and r are as described herein (e.g., each r is, independently, an integer from 0 to 5, such as from 0 to 3, from 1 to 3, or from 1 to 5)).

[0355] In some embodiments, the building block molecule, which may be incorporated into a polynucleotide, primary construct, or mmRNA, is a modified guanosine (e.g., selected from the group consisting of:

[chemical structure]

[chemical structure]

[chemical structure]

[chemical structure]

[chemical structure]

[chemical structure]

[chemical structure]

[chemical structure]

or a pharmaceutically acceptable salt or stereoisomer thereof, wherein Y¹, Y³, Y⁴, Y⁶, and r are as described herein (e.g., each r is, independently, an integer from 0 to 5, such as from 0 to 3, from 1 to 3, or from 1 to 5)).

[0356] In some embodiments, the chemical modification can include replacement of C group at C-5 of the ring (e.g., for a pyrimidine nucleoside, such as cytosine or uracil) with N (e.g., replacement of the >CH group at C-5 with >NR^{N1} group, wherein R^{N}1 is H or optionally substituted alkyl). For example, the building block molecule, which may be incorporated into a polynucleotide, primary construct, or mmRNA, can be:

[chemical structure]

or a pharmaceutically acceptable salt or stereoisomer thereof, wherein each r is, independently, an integer from 0 to 5 (e.g., from 0 to 3, from 1 to 3, or from 1 to 5).

[0357] In another embodiment, the chemical modification can include replacement of the hydrogen at C-5 of cytosine with halo (e.g., Br, Cl, F, or I) or optionally substituted alkyl (e.g., methyl). For example, the building block molecule, which may be incorporated into a polynucleotide, primary construct, or mmRNA, can be:

[chemical structure]

or a pharmaceutically acceptable salt or stereoisomer thereof, wherein each r is, independently, an integer from 0 to 5 (e.g., from 0 to 3, from 1 to 3, or from 1 to 5).

[0358] In yet a further embodiment, the chemical modification can include a fused ring that is formed by the NH₂ at the C-4 position and the carbon atom at the C-5 position. For example, the building block molecule, which may be incorporated into a polynucleotide, primary construct, or mmRNA, can be:

[chemical structure]

or a pharmaceutically acceptable salt or stereoisomer thereof, wherein each r is, independently, an integer from 0 to 5 (e.g., from 0 to 3, from 1 to 3, or from 1 to 5).

### Modifications on the Sugar

[0359] The modified nucleosides and nucleotides (e.g., building block molecules), which may be incorporated into a polynucleotide, primary construct, or mmRNA (e.g., RNA or mRNA, as described herein), can be modified on the sugar of the ribonucleic acid. For example, the 2′ hydroxyl group (OH) can be modified or replaced with a number of different substituents. Exemplary substitutions at the 2′-position include, but are not limited to, H, halo, optionally substituted C₁₋₆ alkyl; optionally substituted C₁₋₆ alkoxy; optionally substituted C₆₋₁₀ aryloxy; optionally substituted C₃₋₈ cycloalkyl; optionally substituted C₃₋₈ cycloalkoxy; optionally substituted C₆₋₁₀ aryloxy; optionally substituted C₆₋₁₀ aryl-C₁₋₆ alkoxy, optionally substituted C₁₋₁₂ (heterocyclyl)oxy; a sugar (e.g., ribose, pentose, or any described herein); a polyethyleneglycol (PEG), —O(CH₂CH₂O)ₙCH₂CH₂OR, where R is H or optionally substituted alkyl, and n is an integer from 0 to 20 (e.g., from 0 to 4, from 0 to 8, from 0 to 10, from 0 to 16, from 1 to 4, from 1 to 8, from 1 to 10, from 1 to 16, from 1 to 20, from 2 to 4, from 2 to 8, from 2 to 10, from 2 to 16, from 2 to 20, from 4 to 8, from 4 to 10, from 4 to 16, and from 4 to 20); “locked” nucleic acids (LNA) in which the 2′-hydroxyl is connected by a C₁₋₆ alkylene or C₁₋₆ heteroalkylene bridge to the 4′-carbon of the same ribose sugar, where exemplary bridges included methylene, propylene, ether, or amino bridges; aminoalkyl, as defined herein; aminoalkoxy, as defined herein; amino as defined herein; and amino acid, as defined herein

Generally, RNA includes the sugar group ribose, which is a 5-membered ring having an oxygen. Exemplary, non-limiting modified nucleotides include replacement of the oxygen in ribose (e.g., with S, Se, or alkylene, such as methylene or ethylene); addition of a double bond (e.g., to replace ribose with cyclopentenyl or cyclohexenyl); ring contraction of ribose (e.g., to form a 4-membered ring of cyclobutane or oxetane); ring expansion of ribose (e.g., to form a 6- or 7-membered ring having an additional carbon or heteroatom, such as for anhydrohexitol, altritol, mannitol, cyclohexanyl, cyclohexenyl, and morpholino that also has a phosphoramidate backbone); multicyclic forms (e.g., tricyclo; and “unlocked” forms, such as glycol nucleic acid (GNA) (e.g., R-GNA or S-GNA, where ribose is replaced by glycol units attached to phosphodiester bonds), threose nucleic acid (TNA, where ribose is replace with α-L-threofuranosyl-(3′->2′)), and peptide nucleic acid (PNA, where 2-amino-ethyl-glycine linkages replace the ribose and phosphodiester backbone). The sugar group can also contain one or more carbons that possess the opposite stereochemical configuration than that of the corresponding carbon in ribose. Thus, a polynucleotide, primary construct, or mmRNA molecule can include nucleotides containing, e.g., arabinose, as the sugar.

### Modifications on the Nucleobase

[0360] The present disclosure provides for modified nucleosides and nucleotides. As described herein “nucleoside” is defined as a compound containing a sugar molecule (e.g., a pentose or ribose) or a derivative thereof in combination with an organic base (e.g., a purine or pyrimidine) or a derivative thereof (also referred to herein as “nucleobase”). As described herein, “nucleotide” is defined as a nucleoside including a phosphate group. The modified nucleotides may by synthesized by any useful method, as described herein (e.g., chemically, enzymatically, or recombinantly to include one or more modified or non-natural nucleosides).

[0361] The modified nucleotide base pairing encompasses not only the standard adenosine-thymine, adenosine-uracil, or guanosine-cytosine base pairs, but also base pairs formed between nucleotides and/or modified nucleotides comprising non-standard or modified bases, wherein the arrangement of hydrogen bond donors and hydrogen bond acceptors permits hydrogen bonding between a non-standard base and a standard base or between two complementary non-standard base structures. One example of such non-standard base pairing is the base pairing between the modified nucleotide inosine and adenine, cytosine or uracil.

[0362] The modified nucleosides and nucleotides can include a modified nucleobase. Examples of nucleobases found in RNA include, but are not limited to, adenine, guanine, cytosine, and uracil. Examples of nucleobase found in DNA include, but are not limited to, adenine, guanine, cytosine, and thymine. These nucleobases can be modified or wholly replaced to provide polynucleotides, primary constructs, or mmRNA molecules having enhanced properties, e.g., resistance to nucleases through disruption of the binding of a major groove binding partner. Table 8 below identifies the chemical faces of each canonical nucleotide. Circles identify the atoms comprising the respective chemical regions.

TABLE 8

| | | | | Watson-Crick |
|---|---|---|---|---|
| | | Major Groove | Minor Groove | Base-pairing |
| | | Face | Face | Face |
| Pyrim- idines | Cytidine: | [chemical structure] | [chemical structure] | [chemical structure] |
| | Uridine: | [chemical structure] | [chemical structure] | [chemical structure] |
| Purines | Adenosine: | [chemical structure] | [chemical structure] | [chemical structure] |
| | Guanosine: | [chemical structure] | [chemical structure] | [chemical structure] |

[0363] In some embodiments, B is a modified uracil. Exemplary modified uracils include those having Formula (b1)-(b5):

[chemical structure]

or a pharmaceutically acceptable salt or stereoisomer thereof,
[0364] wherein
[0365] [symbol] is a single or double bond;
[0366] each of T^{1′}, T^{1″}, T^{2′}, and T^{2″} is, independently, H, optionally substituted alkyl, optionally substituted alkoxy, or optionally substituted thioalkoxy, or the combination of T^{1′} and T^{1″} or the combination of T^{2′} and T^{2″} join together (e.g., as in T²) to form O (oxo), S (thio), or Se (seleno);
[0367] each of V¹ and V² is, independently, O, S, N(R^{Vb})ₙᵥ, or C(R^{Vb})ₙᵥ, wherein nv is an integer from 0 to 2 and each R^{Vb} is, independently, H, halo, optionally substituted amino acid, optionally substituted alkyl, optionally substituted haloalkyl, optionally substituted alkenyl, optionally substituted alkynyl, optionally substituted alkoxy, optionally substituted alkenyloxy, optionally substituted alkynyloxy, optionally substituted hydroxyalkyl, optionally substituted hydroxyalkenyl, optionally substituted hydroxyalkynyl, optionally substituted aminoalkyl (e.g., substituted with an N-protecting group, such as any described herein, e.g., trifluoroacetyl), optionally substituted aminoalkenyl, optionally substituted aminoalkynyl, optionally substituted acylaminoalkyl (e.g., substituted with an N-protecting group, such as any described herein, e.g., trifluoroacetyl), optionally substituted alkoxycarbonylalkyl, optionally substituted alkoxycarbonylalkenyl, optionally substituted alkoxycarbonylalkynyl, or optionally substituted alkynyloxy (e.g., optionally substituted with any substituent described herein, such as those selected from (1)-(21) for alkyl);
[0368] R¹⁰ is H, halo, optionally substituted amino acid, hydroxy, optionally substituted alkyl, optionally substituted alkenyl, optionally substituted alkynyl, optionally substituted aminoalkyl, optionally substituted hydroxyalkyl, optionally substituted hydroxyalkenyl, optionally substituted hydroxyalkynyl, optionally substituted aminoalkenyl, optionally substituted aminoalkynyl, optionally substituted alkoxy, optionally substituted alkoxycarbonylalkyl, optionally substituted alkoxycarbonylalkenyl, optionally substituted alkoxycarbonylalkynyl, optionally substituted alkoxycarbonylalkoxy, optionally substituted carboxyalkoxy, optionally substituted carboxyalkyl, or optionally substituted carbamoylalkyl;
[0369] R¹¹ is H or optionally substituted alkyl;
[0370] R^{12a} is H, optionally substituted alkyl, optionally substituted hydroxyalkyl, optionally substituted hydroxyalkenyl, optionally substituted hydroxyalkynyl, optionally substituted aminoalkyl, optionally substituted aminoalkenyl, or optionally substituted aminoalkynyl, optionally substituted carboxyalkyl (e.g., optionally substituted with hydroxy), optionally substituted carboxyalkoxy, optionally substituted carboxyaminoalkyl, or optionally substituted carbamoylalkyl; and
[0371] R^{12c} is H, halo, optionally substituted alkyl, optionally substituted alkoxy, optionally substituted thioalkoxy, optionally substituted amino, optionally substituted hydroxyalkyl, optionally substituted hydroxyalkenyl, optionally substituted hydroxyalkynyl, optionally substituted aminoalkyl, optionally substituted aminoalkenyl, or optionally substituted aminoalkynyl.

[0372] Other exemplary modified uracils include those having Formula (b6)-(b9):

[chemical structure]

or a pharmaceutically acceptable salt or stereoisomer thereof,
[0373] wherein

[0374] [symbol] is a single or double bond;
[0375] each of T^{1′}, T^{1″}, T^{2′}, and T^{2″} is, independently, H, optionally substituted alkyl, optionally substituted alkoxy, or optionally substituted thioalkoxy, or the combination of T^{1′} and T^{1″} join together (e.g., as in T¹) or the combination of T²′ and T2″ join together (e.g., as in T²) to form O (oxo), S (thio), or Se (seleno), or each T¹ and T² is, independently, O (oxo), S (thio), or Se (seleno);
[0376] each of W¹ and W² is, independently, N(R^{Wa})_{nw} or C(R^{Wa})_{nw}, wherein nw is an integer from 0 to 2 and each R^{Wa} is, independently, H, optionally substituted alkyl, or optionally substituted alkoxy;
[0377] each V³ is, independently, O, S, N(R^{Va})ₙᵥ, or C(R^{Va})ₙᵥ, wherein nv is an integer from 0 to 2 and each R^{Va} is, independently, H, halo, optionally substituted amino acid, optionally substituted alkyl, optionally substituted hydroxyalkyl, optionally substituted hydroxyalkenyl, optionally substituted hydroxyalkynyl, optionally substituted alkenyl, optionally substituted alkynyl, optionally substituted heterocyclyl, optionally substituted alkheterocyclyl, optionally substituted alkoxy, optionally substituted alkenyloxy, or optionally substituted alkynyloxy, optionally substituted aminoalkyl (e.g., substituted with an N-protecting group, such as any described herein, e.g., trifluoroacetyl, or sulfoalkyl), optionally substituted aminoalkenyl, optionally substituted aminoalkynyl, optionally substituted acylaminoalkyl (e.g., substituted with an N-protecting group, such as any described herein, e.g., trifluoroacetyl), optionally substituted alkoxycarbonylalkyl, optionally substituted alkoxycarbonylalkenyl, optionally substituted alkoxycarbonylalkynyl, optionally substituted alkoxycarbonylacyl, optionally substituted alkoxycarbonylalkoxy, optionally substituted carboxyalkyl (e.g., optionally substituted with hydroxy and/or an O-protecting group), optionally substituted carboxyalkoxy, optionally substituted carboxyaminoalkyl, or optionally substituted carbamoylalkyl (e.g., optionally substituted with any substituent described herein, such as those selected from (1)-(21) for alkyl), and wherein R^{Va} and R^{12c} taken together with the carbon atoms to which they are attached can form optionally substituted cycloalkyl, optionally substituted aryl, or optionally substituted heterocyclyl (e.g., a 5- or 6-membered ring);
[0378] R^{12a} is H, optionally substituted alkyl, optionally substituted hydroxyalkyl, optionally substituted hydroxyalkenyl, optionally substituted hydroxyalkynyl, optionally substituted aminoalkyl, optionally substituted aminoalkenyl, optionally substituted aminoalkynyl, optionally substituted carboxyalkyl (e.g., optionally substituted with hydroxy and/or an O-protecting group), optionally substituted carboxyalkoxy, optionally substituted carboxyaminoalkyl, optionally substituted carbamoylalkyl, or absent;
[0379] R^{12b} is H, optionally substituted alkyl, optionally substituted alkenyl, optionally substituted alkynyl, optionally substituted hydroxyalkyl, optionally substituted hydroxyalkenyl, optionally substituted hydroxyalkynyl, optionally substituted aminoalkyl, optionally substituted aminoalkenyl, optionally substituted aminoalkynyl, optionally substituted alkaryl, optionally substituted heterocyclyl, optionally substituted alkheterocyclyl, optionally substituted amino acid, optionally substituted alkoxycarbonylacyl, optionally substituted alkoxycarbonylalkoxy, optionally substituted alkoxycarbonylalkyl, optionally substituted alkoxycarbonylalkenyl, optionally substituted alkoxycarbonylalkynyl, optionally substituted alkoxycarbonylalkoxy, optionally substituted carboxyalkyl (e.g., optionally substituted with hydroxy and/or an O-protecting group), optionally substituted carboxyalkoxy, optionally substituted carboxyaminoalkyl, or optionally substituted carbamoylalkyl,
[0380] wherein the combination of R^{12b} and T1′ or the combination of R^{12b} and R^{12c} can join together to form optionally substituted heterocyclyl; and
[0381] R^{12e} is H, halo, optionally substituted alkyl, optionally substituted alkoxy, optionally substituted thioalkoxy, optionally substituted amino, optionally substituted aminoalkyl, optionally substituted aminoalkenyl, or optionally substituted aminoalkynyl.

[0382] Further exemplary modified uracils include those having Formula (b28)-(b31):

[chemical structure]

or a pharmaceutically acceptable salt or stereoisomer thereof,
[0383] wherein
[0384] each of T¹ and T² is, independently, O (oxo), S (thio), or Se (seleno);
[0385] each R^{Vb′} and R^{Vb″} is, independently, H, halo, optionally substituted amino acid, optionally substituted alkyl, optionally substituted haloalkyl, optionally substituted hydroxyalkyl, optionally substituted hydroxyalkenyl, optionally substituted hydroxyalkynyl, optionally substituted alkenyl, optionally substituted alkynyl, optionally substituted alkoxy, optionally substituted alkenyloxy, optionally substituted alkynyloxy, optionally substituted aminoalkyl (e.g., substituted with an N-protecting group, such as any described herein, e.g., trifluoroacetyl, or sulfoalkyl), optionally substituted aminoalkenyl, optionally substituted aminoalkynyl, optionally substituted acylaminoalkyl (e.g., substituted with an N-protecting group, such as any described herein, e.g., trifluoroacetyl), optionally substituted alkoxycarbonylalkyl, optionally substituted alkoxycarbonylalkenyl, optionally substituted alkoxycarbonylalkynyl, optionally substituted alkoxycarbonylacyl, optionally substituted alkoxycarbonylalkoxy, optionally substituted carboxyalkyl (e.g., optionally substituted with hydroxy and/or an O-protecting group), optionally substituted carboxyalkoxy, optionally substituted carboxyaminoalkyl, or optionally substituted carbamoylalkyl (e.g., optionally substituted with any substituent described herein, such as those selected from (1)-(21) for alkyl) (e.g., R^{Vb′} is optionally substituted alkyl, optionally substituted alkenyl, or optionally substituted aminoalkyl, e.g., substituted with an N-protecting group, such as any described herein, e.g., trifluoroacetyl, or sulfoalkyl);
[0386] R^{12a} is H, optionally substituted alkyl, optionally substituted carboxyaminoalkyl, optionally substituted aminoalkyl (e.g., e.g., substituted with an N-protecting group, such as any described herein, e.g., trifluoroacetyl, or sulfoalkyl), optionally substituted aminoalkenyl, or optionally substituted aminoalkynyl; and
[0387] R^{12b} is H, optionally substituted alkyl, optionally substituted alkenyl, optionally substituted alkynyl, optionally substituted hydroxyalkyl, optionally substituted hydroxyalkenyl, optionally substituted hydroxyalkynyl, optionally substituted aminoalkyl, optionally substituted aminoalkenyl, optionally substituted aminoalkynyl (e.g., e.g., substituted with an N-protecting group, such as any described herein, e.g., trifluoroacetyl, or sulfoalkyl),
[0388] optionally substituted alkoxycarbonylacyl, optionally substituted alkoxycarbonylalkoxy, optionally substituted alkoxycarbonylalkyl, optionally substituted alkoxycarbonylalkenyl, optionally substituted alkoxycarbonylalkynyl, optionally substituted alkoxycarbonylalkoxy, optionally substituted carboxyalkoxy, optionally substituted carboxyalkyl, or optionally substituted carbamoylalkyl.

[0389] In particular embodiments, T¹ is O (oxo), and T² is S (thio) or Se (seleno). In other embodiments, T¹ is S (thio), and T² is O (oxo) or Se (seleno). In some embodiments, R^{Vb′} is H, optionally substituted alkyl, or optionally substituted alkoxy.

[0390] In other embodiments, each R^{12a} and R^{12b} is, independently, H, optionally substituted alkyl, optionally substituted alkenyl, optionally substituted alkynyl, or optionally substituted hydroxyalkyl. In particular embodiments, R^{12a} is H. In other embodiments, both R^{12a} and R^{12b} are H.

[0391] In some embodiments, each R^{Vb′} of R^{12b} is, independently, optionally substituted aminoalkyl (e.g., substituted with an N-protecting group, such as any described herein, e.g., trifluoroacetyl, or sulfoalkyl), optionally substituted aminoalkenyl, optionally substituted aminoalkynyl, or optionally substituted acylaminoalkyl (e.g., substituted with an N-protecting group, such as any described herein, e.g., trifluoroacetyl). In some embodiments, the amino and/or alkyl of the optionally substituted aminoalkyl is substituted with one or more of optionally substituted alkyl, optionally substituted alkenyl, optionally substituted sulfoalkyl, optionally substituted carboxy (e.g., substituted with an O-protecting group), optionally substituted hydroxy (e.g., substituted with an O-protecting group), optionally substituted carboxyalkyl (e.g., substituted with an O-protecting group), optionally substituted alkoxycarbonylalkyl (e.g., substituted with an O-protecting group), or N-protecting group. In some embodiments, optionally substituted aminoalkyl is substituted with an optionally substituted sulfoalkyl or optionally substituted alkenyl. In particular embodiments, R^{12a} and R^{Vb″} are both H. In particular embodiments, T¹ is O (oxo), and T² is S (thio) or Se (seleno).

[0392] In some embodiments, R^{Vb′} is optionally substituted alkoxycarbonylalkyl or optionally substituted carbamoylalkyl.

[0393] In particular embodiments, the optional substituent for R^{12a}, R^{12b}, R^{12e}, or R^{Va} is a polyethylene glycol group (e.g., —(CH₂)ₛ₂(OCH₂CH₂)ₛ₁(CH₂)ₛ₃OR′, wherein s1 is an integer from 1 to 10 (e.g., from 1 to 6 or from 1 to 4), each of s2 and s3, independently, is an integer from 0 to 10 (e.g., from 0 to 4, from 0 to 6, from 1 to 4, from 1 to 6, or from 1 to 10), and R′ is H or C₁₋₂₀ alkyl); or an amino-polyethylene glycol group (e.g., —NR^{N1}(CH₂)ₛ₂(CH₂CH₂O)ₛ₁(CH₂)ₛ₃NR^{N1}, wherein s1 is an integer from 1 to 10 (e.g., from 1 to 6 or from 1 to 4), each of s2 and s3, independently, is an integer from 0 to 10 (e.g., from 0 to 4, from 0 to 6, from 1 to 4, from 1 to 6, or from 1 to 10), and each R^{N1} is, independently, hydrogen or optionally substituted C₁₋₆ alkyl).

[0394] In some embodiments, B is a modified cytosine. Exemplary modified cytosines include compounds of Formula (b10)-(b14):

[chemical structure]

or a pharmaceutically acceptable salt or stereoisomer thereof,
[0395] wherein
   [0396] each of T^{3′} and T^{3″} is, independently, H, optionally substituted alkyl, optionally substituted alkoxy, or optionally substituted thioalkoxy, or the combination of T^{3′} and T^{3″} join together (e.g., as in T³) to form O (oxo), S (thio), or Se (seleno);
   [0397] each V⁴ is, independently, O, S, N(R^{Vc})ₙᵥ, or C(R^{Vc})ₙᵥ, wherein nv is an integer from 0 to 2 and each R^{Vc} is, independently, H, halo, optionally substituted amino acid, optionally substituted alkyl, optionally substituted alkenyl, optionally substituted alkynyl, optionally substituted alkoxy, optionally substituted alkenyloxy, optionally substituted heterocyclyl, optionally substituted alkheterocyclyl, or optionally substituted alkynyloxy (e.g., optionally substituted with any substituent described herein, such as those selected from (1)-(21) for alkyl), wherein the combination of R^{13b} and R^{Ve} can be taken together to form optionally substituted heterocyclyl;
[0398] each V⁵ is, independently, N(R^{Vd})ₙᵥ, or C(R^{Vd})ₙᵥ, wherein nv is an integer from 0 to 2 and each R^{Vd} is, independently, H, halo, optionally substituted amino acid, optionally substituted alkyl, optionally substituted alkenyl, optionally substituted alkynyl, optionally substituted alkoxy, optionally substituted alkenyloxy, optionally substituted heterocyclyl, optionally substituted alkheterocyclyl, or optionally substituted alkynyloxy (e.g., optionally substituted with any substituent described herein, such as those selected from (1)-(21) for alkyl) (e.g., V⁵ is —CH or N);
[0399] each of R^{13a} and R^{13b} is, independently, H, optionally substituted acyl, optionally substituted acyloxyalkyl, optionally substituted alkyl, or optionally substituted alkoxy, wherein the combination of R^{13b} and R¹⁴ can be taken together to form optionally substituted heterocyclyl;
[0400] each R¹⁴ is, independently, H, halo, hydroxy, thiol, optionally substituted acyl, optionally substituted amino acid, optionally substituted alkyl, optionally substituted haloalkyl, optionally substituted alkenyl, optionally substituted alkynyl, optionally substituted hydroxyalkyl (e.g., substituted with an O-protecting group), optionally substituted hydroxyalkenyl, optionally substituted hydroxyalkynyl, optionally substituted alkoxy, optionally substituted alkenyloxy, optionally substituted alkynyloxy, optionally substituted aminoalkoxy, optionally substituted alkoxyalkoxy, optionally substituted acyloxyalkyl, optionally substituted amino (e.g., —NHR, wherein R is H, alkyl, aryl, or phosphoryl), azido, optionally substituted aryl, optionally substituted heterocyclyl, optionally substituted alkheterocyclyl, optionally substituted aminoalkyl, optionally substituted aminoalkenyl, or optionally substituted aminoalkyl; and
[0401] each of R¹⁵ and R¹⁶ is, independently, H, optionally substituted alkyl, optionally substituted alkenyl, or optionally substituted alkynyl.

[0402] Further exemplary modified cytosines include those having Formula (b32)-(b35):

[chemical structure]

or a pharmaceutically acceptable salt or stereoisomer thereof,
[0403] wherein
[0404] each of T¹ and T³ is, independently, O (oxo), S (thio), or Se (seleno);
[0405] each of R^{13a} and R^{13b} is, independently, H, optionally substituted acyl, optionally substituted acyloxyalkyl, optionally substituted alkyl, or optionally substituted alkoxy, wherein the combination of R^{13b} and R¹⁴ can be taken together to form optionally substituted heterocyclyl;
[0406] each R¹⁴ is, independently, H, halo, hydroxy, thiol, optionally substituted acyl, optionally substituted amino acid, optionally substituted alkyl, optionally substituted haloalkyl, optionally substituted alkenyl, optionally substituted alkynyl, optionally substituted hydroxyalkyl (e.g., substituted with an O-protecting group), optionally substituted hydroxyalkenyl, optionally substituted hydroxyalkynyl, optionally substituted alkoxy, optionally substituted alkenyloxy, optionally substituted alkynyloxy, optionally substituted aminoalkoxy, optionally substituted alkoxyalkoxy, optionally substituted acyloxyalkyl, optionally substituted amino (e.g., —NHR, wherein R is H, alkyl, aryl, or phosphoryl), azido, optionally substituted aryl, optionally substituted heterocyclyl, optionally substituted alkheterocyclyl, optionally substituted aminoalkyl (e.g., hydroxyalkyl, alkyl, alkenyl, or alkynyl), optionally substituted aminoalkenyl, or optionally substituted aminoalkynyl; and
[0407] each of R¹⁵ and R¹⁶ is, independently, H, optionally substituted alkyl, optionally substituted alkenyl, or optionally substituted alkynyl (e.g., R¹⁵ is H, and R¹⁶ is H or optionally substituted alkyl).

[0408] In some embodiments, R¹⁵ is H, and R¹⁶ is H or optionally substituted alkyl. In particular embodiments, R¹⁴ is H, acyl, or hydroxyalkyl. In some embodiments, R¹⁴ is halo. In some embodiments, both R¹⁴ and R¹⁵ are H. In some embodiments, both R¹⁵ and R¹⁶ are H. In some embodiments, each of R¹⁴ and R¹⁵ and R¹⁶ is H. In further embodiments, each of R^{13a} and R^{13b} is independently, H or optionally substituted alkyl.

[0409] Further non-limiting examples of modified cytosines include compounds of Formula (b36):

[chemical structure]

or a pharmaceutically acceptable salt or stereoisomer thereof,
[0410] wherein
[0411] each R^{13b} is, independently, H, optionally substituted acyl, optionally substituted acyloxyalkyl, optionally substituted alkyl, or optionally substituted alkoxy, wherein the combination of R^{13b} and R^{14b} can be taken together to form optionally substituted heterocyclyl;
[0412] each R^{14a} and R^{14b} is, independently, H, halo, hydroxy, thiol, optionally substituted acyl, optionally substituted amino acid, optionally substituted alkyl, optionally substituted haloalkyl, optionally substituted alkenyl, optionally substituted alkynyl, optionally substituted hydroxyalkyl (e.g., substituted with an O-protecting group), optionally substituted hydroxyalkenyl, optionally substituted alkoxy, optionally substituted alkenyloxy, optionally substituted alkynyloxy, optionally substituted aminoalkoxy, optionally substituted alkoxyalkoxy, optionally substituted acyloxyalkyl, optionally substituted amino (e.g., —NHR, wherein R is H, alkyl, aryl, phosphoryl, optionally substituted aminoalkyl, or optionally substituted carboxyaminoalkyl), azido, optionally substituted aryl, optionally substituted heterocyclyl, optionally substituted alkheterocyclyl, optionally substituted aminoalkyl, optionally substituted aminoalkenyl, or optionally substituted aminoalkynyl; and
[0413] each of R¹⁵ is, independently, H, optionally substituted alkyl, optionally substituted alkenyl, or optionally substituted alkynyl.

[0414] In particular embodiments, R^{14b} is an optionally substituted amino acid (e.g., optionally substituted lysine). In some embodiments, R^{14a} is H.

[0415] In some embodiments, B is a modified guanine. Exemplary modified guanines include compounds of Formula (b15)-(b17):

[chemical structure]

or a pharmaceutically acceptable salt or stereoisomer thereof,
[0416] wherein
[0417] each of T^{4′}, T^{4″}, T^{5′}, T^{5″}, T^{6′}, and T^{6″} is, independently, H, optionally substituted alkyl, or optionally substituted alkoxy, and wherein the combination of T^{4′} and T^{4″} (e.g., as in T⁴) or the combination of T^{5′} and T^{5″} (e.g., as in T⁵) or the combination of T^{6′} and T^{6″} (e.g., as in T⁶) join together form O (oxo), S (thio), or Se (seleno);
[0418] each of V⁵ and V⁶ is, independently, O, S, N(R^{Vd})ₙᵥ, or C(R^{Vd})ₙᵥ, wherein nv is an integer from 0 to 2 and each R^{Vd} is, independently, H, halo, thiol, optionally substituted amino acid, cyano, amidine, optionally substituted aminoalkyl, optionally substituted aminoalkenyl, optionally substituted aminoalkynyl, optionally substituted alkyl, optionally substituted alkenyl, optionally substituted alkynyl, optionally substituted alkoxy, optionally substituted alkenyloxy, or optionally substituted alkynyloxy (e.g., optionally substituted with any substituent described herein, such as those selected from (1)-(21) for alkyl), optionally substituted thioalkoxy, or optionally substituted amino; and
[0419] each of R¹⁷, R¹⁸, R^{19a}, R^{19b}, R²¹, R²², R²³, and R²⁴ is, independently, H, halo, thiol, optionally substituted alkyl, optionally substituted alkenyl, optionally substituted alkynyl, optionally substituted thioalkoxy, optionally substituted amino, or optionally substituted amino acid.

[0420] Exemplary modified guanosines include compounds of Formula (b37)-(b40):

[chemical structure]

or a pharmaceutically acceptable salt or stereoisomer thereof,
[0421] wherein
[0422] each of T^{4′} is, independently, H, optionally substituted alkyl, or optionally substituted alkoxy, and each T⁴ is, independently, O (oxo), S (thio), or Se (seleno);
[0423] each of R¹⁸, R^{19a}, R^{19b}, and R²¹ is, independently, H, halo, thiol, optionally substituted alkyl, optionally substituted alkenyl, optionally substituted alkynyl, optionally substituted thioalkoxy, optionally substituted amino, or optionally substituted amino acid.

[0424] In some embodiments, R¹⁸ is H or optionally substituted alkyl. In further embodiments, T⁴ is oxo. In some embodiments, each of R^{19a} and R^{19b} is, independently, H or optionally substituted alkyl.

[0425] In some embodiments, B is a modified adenine. Exemplary modified adenines include compounds of Formula (b18)-(b20):

[chemical structure]

or a pharmaceutically acceptable salt or stereoisomer thereof,
[0426] wherein
[0427] each V⁷ is, independently, O, S, N(R^{Ve})ₙᵥ, or C(R^{Ve})ₙᵥ, wherein nv is an integer from 0 to 2 and each R^{Ve} is, independently, H, halo, optionally substituted amino acid, optionally substituted alkyl, optionally substituted alkenyl, optionally substituted alkynyl, optionally substituted alkoxy, optionally substituted alkenyloxy, or optionally substituted alkynyloxy (e.g., optionally substituted with any substituent described herein, such as those selected from (1)-(21) for alkyl);
[0428] each R²⁵ is, independently, H, halo, thiol, optionally substituted alkyl, optionally substituted alkenyl, optionally substituted alkynyl, optionally substituted thioalkoxy, or optionally substituted amino;
[0429] each of R^{26a} and R^{26b} is, independently, H, optionally substituted acyl, optionally substituted amino acid, optionally substituted carbamoylalkyl, optionally substituted alkyl, optionally substituted alkenyl, optionally substituted alkynyl, optionally substituted hydroxyalkyl, optionally substituted hydroxyalkenyl, optionally substituted hydroxyalkynyl, optionally substituted alkoxy, or polyethylene glycol group (e.g., —(CH₂)ₛ₂(OCH₂CH₂)ₛ₁(CH₂)ₛ₃OR′, wherein s1 is an integer from 1 to 10 (e.g., from 1 to 6 or from 1 to 4), each of s2 and s3, independently, is an integer from 0 to 10 (e.g., from 0 to 4, from 0 to 6, from 1 to 4, from 1 to 6, or from 1 to 10), and R′ is H or C₁₋₂₀ alkyl); or an amino-polyethylene glycol group (e.g., —NR^{N1}(CH₂)ₛ₂(CH₂CH₂O)ₛ₁(CH₂)ₛ₃NR^{N1}, wherein s1 is an integer from 1 to 10 (e.g., from 1 to 6 or from 1 to 4), each of s2 and s3, independently, is an integer from 0 to 10 (e.g., from 0 to 4, from 0 to 6, from 1 to 4, from 1 to 6, or from 1 to 10), and each R^{N1} is, independently, hydrogen or optionally substituted C₁₋₆ alkyl);
[0430] each R²⁷ is, independently, H, optionally substituted alkyl, optionally substituted alkenyl, optionally substituted alkynyl, optionally substituted alkoxy, optionally substituted thioalkoxy or optionally substituted amino;
[0431] each R²⁸ is, independently, H, optionally substituted alkyl, optionally substituted alkenyl, or optionally substituted alkynyl; and
[0432] each R²⁹ is, independently, H, optionally substituted acyl, optionally substituted amino acid, optionally substituted carbamoylalkyl, optionally substituted alkyl, optionally substituted alkenyl, optionally substituted alkynyl, optionally substituted hydroxyalkyl, optionally substituted hydroxyalkenyl, optionally substituted alkoxy, or optionally substituted amino.

[0433] Exemplary modified adenines include compounds of Formula (b41)-(b43):

[chemical structure]

or a pharmaceutically acceptable salt or stereoisomer thereof,
[0434] wherein
[0435] each R²⁵ is, independently, H, halo, thiol, optionally substituted alkyl, optionally substituted alkenyl, optionally substituted alkynyl, optionally substituted thioalkoxy, or optionally substituted amino;
[0436] each of R^{26a} and R^{26b} is, independently, H, optionally substituted acyl, optionally substituted amino acid, optionally substituted carbamoylalkyl, optionally substituted alkyl, optionally substituted alkenyl, optionally substituted alkynyl, optionally substituted hydroxyalkyl, optionally substituted hydroxyalkenyl, optionally substituted hydroxyalkynyl, optionally substituted alkoxy, or polyethylene glycol group (e.g., —(CH₂)ₛ₂(OCH₂CH₂)ₛ₁(CH₂)ₛ₃OR′, wherein s1 is an integer from 1 to 10 (e.g., from 1 to 6 or from 1 to 4), each of s2 and s3, independently, is an integer from 0 to 10 (e.g., from 0 to 4, from 0 to 6, from 1 to 4, from 1 to 6, or from 1 to 10), and R′ is H or C₁₋₂₀ alkyl); or an amino-polyethylene glycol group (e.g., —NR^{N1}(CH₂)ₛ₂(CH₂CH₂O)ₛ₁(CH₂)ₛ₃NR^{N1}, wherein s1 is an integer from 1 to 10 (e.g., from 1 to 6 or from 1 to 4), each of s2 and s3, independently, is an integer from 0 to 10 (e.g., from 0 to 4, from 0 to 6, from 1 to 4, from 1 to 6, or from 1 to 10), and each R^{N1} is, independently, hydrogen or optionally substituted C₁₋₆ alkyl); and
[0437] each R²⁷ is, independently, H, optionally substituted alkyl, optionally substituted alkenyl, optionally substituted alkynyl, optionally substituted alkoxy, optionally substituted thioalkoxy, or optionally substituted amino.

[0438] In some embodiments, R^{26a} is H, and R^{26b} is optionally substituted alkyl. In some embodiments, each of R^{26a} and R^{26b} is, independently, optionally substituted alkyl. In particular embodiments, R²⁷ is optionally substituted alkyl, optionally substituted alkoxy, or optionally substituted thioalkoxy. In other embodiments, R²⁵ is optionally substituted alkyl, optionally substituted alkoxy, or optionally substituted thioalkoxy.

[0439] In particular embodiments, the optional substituent for R^{26a}, R^{26b}, or R²⁹ is a polyethylene glycol group (e.g., —(CH₂)ₛ₂(OCH₂CH₂)ₛ₁(CH₂)ₛ₃OR′, wherein s1 is an integer from 1 to 10 (e.g., from 1 to 6 or from 1 to 4), each of s2 and s3, independently, is an integer from 0 to 10 (e.g., from 0 to 4, from 0 to 6, from 1 to 4, from 1 to 6, or from 1 to 10), and R′ is H or C₁₋₂₀ alkyl); or an amino-polyethylene glycol group (e.g., —NR^{N1}(CH₂)ₛ₂(CH₂CH₂O)ₛ₁(CH₂)ₛ₃NR^{N1}, wherein s1 is an integer from 1 to 10 (e.g., from 1 to 6 or from 1 to 4), each of s2 and s3, independently, is an integer from 0 to 10 (e.g., from 0 to 4, from 0 to 6, from 1 to 4, from 1 to 6, or from 1 to 10), and each R^{N1} is, independently, hydrogen or optionally substituted C₁₋₆ alkyl).

[0440] In some embodiments, B may have Formula (b21):

[chemical structure]

wherein X¹² is, independently, O, S, optionally substituted alkylene (e.g., methylene), or optionally substituted heteroalkylene, xa is an integer from 0 to 3, and R^{12a} and T² are as described herein.

[0441] In some embodiments, B may have Formula (b22):

[chemical structure]

wherein R^{10′} is, independently, optionally substituted alkyl, optionally substituted alkenyl, optionally substituted alkynyl, optionally substituted aryl, optionally substituted heterocyclyl, optionally substituted aminoalkyl, optionally substituted aminoalkenyl, optionally substituted aminoalkynyl, optionally substituted alkoxy, optionally substituted alkoxycarbonylalkyl, optionally substituted alkoxycarbonylalkenyl, optionally substituted alkoxycarbonylalkynyl, optionally substituted alkoxycarbonylalkoxy, optionally substituted carboxyalkoxy, optionally substituted carboxyalkyl, or optionally substituted carbamoylalkyl, and R¹¹, R^{12a}, T¹, and T² are as described herein.

[0442] In some embodiments, B may have Formula (b23):

[chemical structure]

wherein R¹⁰ is optionally substituted heterocyclyl (e.g., optionally substituted furyl, optionally substituted thienyl, or optionally substituted pyrrolyl), optionally substituted aryl (e.g., optionally substituted phenyl or optionally substituted naphthyl), or any substituent described herein (e.g., for R¹⁰); and wherein R¹¹ (e.g., H or any substituent described herein), R^{12a} (e.g., H or any substituent described herein), T¹ (e.g., oxo or any substituent described herein), and T² (e.g., oxo or any substituent described herein) are as described herein.
In some embodiments, B may have Formula (b24):

[chemical structure]

wherein R^{14′} is, independently, optionally substituted alkyl, optionally substituted alkenyl, optionally substituted alkynyl, optionally substituted aryl, optionally substituted heterocyclyl, optionally substituted alkaryl, optionally substituted alkheterocyclyl, optionally substituted aminoalkyl, optionally substituted aminoalkenyl, optionally substituted aminoalkynyl, optionally substituted alkoxy, optionally substituted alkoxycarbonylalkenyl, optionally substituted alkoxycarbonylalkynyl, optionally substituted alkoxycarbonylalkyl, optionally substituted alkoxycarbonylalkoxy, optionally substituted carboxyalkoxy, optionally substituted carboxyalkyl, or optionally substituted carbamoylalkyl, and R^{13a}, R^{13b}, R¹⁵, and T³ are as described herein.

[0443] In some embodiments, B may have Formula (b25):

[chemical structure]

wherein R^{14′} is optionally substituted heterocyclyl (e.g., optionally substituted furyl, optionally substitued thienyl, or optionally substitued pyrrolyl), optionally substituted aryl (e.g., optionally substituted phenyl or optionally substituted naphthyl), or any substituent described herein (e.g., for R¹⁴ or R^{14′}); and wherein R^{13a} (e.g., H or any substituent described herein), R^{13b} (e.g., H or any substituent described herein), R¹⁵ (e.g., H or any substituent described herein), and T³ (e.g., oxo or any substituent described herein) are as described herein.

[0444] In some embodiments, B is a nucleobase selected from the group consisting of cytosine, guanine, adenine, and uracil. In some embodiments, B may be:

[chemical structure]

[0445] In some embodiments, the modified nucleobase is a modified uracil. Exemplary nucleobases and nucleosides having a modified uracil include pseudouridine (ψ), pyridin-4-one ribonucleoside, 5-aza-uridine, 6-aza-uridine, 2-thio-5-aza-uridine, 2-thio-uridine (s²U), 4-thio-uridine (s⁴U), 4-thio-pseudouridine, 2-thio-pseudouridine, 5-hydroxy-uridine (ho⁵U), 5-aminoallyl-uridine, 5-halo-uridine (e.g., 5-iodo-uridine or 5-bromo-uridine), 3-methyl-uridine (m³U), 5-methoxy-uridine (mo⁵U), uridine 5-oxyacetic acid (cmo⁵U), uridine 5-oxyacetic acid methyl ester (mcmo⁵U), 5-carboxymethyl-uridine (cm⁵U), 1-carboxymethyl-pseudouridine, 5-carboxyhydroxymethyl-uridine (chm⁵U), 5-carboxyhydroxymethyl-uridine methyl ester (mchm⁵U), 5-methoxycarbonylmethyl-uridine (mcm⁵U), 5-methoxycarbonylmethyl-2-thio-uridine (mcm⁵s²U), 5-aminomethyl-2-thio-uridine (nm⁵s²U), 5-methylaminomethyl-uridine (mnm⁵U), 5-methylaminomethyl-2-thio-uridine (mnm⁵s²U), 5-methylaminomethyl-2-seleno-uridine (mnm⁵se²U), 5-carbamoylmethyl-uridine (ncm⁵U), 5-carboxymethylaminomethyl-uridine (cmnm⁵U), 5-carboxymethylaminomethyl-2-thio-uridine (cmnm⁵s²U), 5-propynyl-uridine, 1-propynyl-pseudouridine, 5-taurinomethyl-uridine (tm⁵U), 1-taurinomethyl-pseudouridine, 5-taurinomethyl-2-thio-uridine (m⁵s²U), 1-taurinomethyl-4-thio-pseudouridine, 5-methyl-uridine (m³U, i.e., having the nucleobase deoxythymine), 1-methylpseudouridine (m¹ψ), 5-methyl-2-thio-uridine (m⁵s²U), 1-methyl-4-thio-pseudouridine (m¹s⁴ψ), 4-thio-1-methyl-pseudouridine, 3-methyl-pseudouridine (m³ψ), 2-thio-1-methyl-pseudouridine, 1-methyl-1-deaza-pseudouridine, 2-thio-1-methyl-1-deaza-pseudouridine, dihydrouridine (D), dihydropseudouridine, 5,6-dihydrouridine, 5-methyl-dihydrouridine (m⁵D), 2-thio-dihydrouridine, 2-thio-dihydropseudouridine, 2-methoxy-uridine, 2-methoxy-4-thio-uridine, 4-methoxy-pseudouridine, 4-methoxy-2-thio-pseudouridine, N1-methyl-pseudouridine (also known as 1-methylpseudouridine (m¹ψ)), 3-(3-amino-3-carboxypropyl) uridine (acp³U), 1-methyl-3-(3-amino-3-carboxypropyl) pseudouridine (acp³ ψ), 5-(isopentenylaminomethyl) uridine (inm⁵U), 5-(isopentenylaminomethyl)-2-thio-uridine (inm⁵s²U), α-thio-uridine, 2′-O-methyl-uridine (Um), 5,2′-O-dimethyl-uridine (m⁵Um), 2′-O-methyl-pseudouridine (ψm), 2-thio-2′-O-methyl-uridine (s²Um), 5-methoxycarbonylmethyl-2′-O-methyl-uridine (mcm⁵Um), 5-carbamoylmethyl-2′-O-methyl-uridine (ncm⁵Um), 5-carboxymethylaminomethyl-2′-O-methyl-uridine (cmnm⁵Um), 3,2′-O-dimethyl-uridine (m3Um), 5-(isopentenylaminomethyl)-2′-O-methyl-uridine (inm⁵Um), 1-thio-uridine, deoxythymidine, 2′-F-ara-uridine, 2′-F-uridine, 2′-OH-ara-uridine, 5-(2-carbomethoxyvinyl) uridine, and 5-[3-(1-E-propenylamino) uridine.

[0446] In some embodiments, the modified nucleobase is a modified cytosine. Exemplary nucleobases and nucleosides having a modified cytosine include 5-aza-cytidine, 6-aza-cytidine, pseudoisocytidine, 3-methyl-cytidine (m³C), N4-acetyl-cytidine (ac⁴C), 5-formyl-cytidine (f⁵C), N4-methyl-cytidine (m⁴C), 5-methyl-cytidine (m⁵C), 5-halo-cytidine (e.g., 5-iodo-cytidine), 5-hydroxymethyl-cytidine (hm⁵C), 1-methyl-pseudoisocytidine, pyrrolo-cytidine, pyrrolo-pseudoisocytidine, 2-thio-cytidine (s²C), 2-thio-5-methyl-cytidine, 4-thio-pseudoisocytidine, 4-thio-1-methyl-pseudoisocytidine, 4-thio-1-methyl-1-deaza-pseudoisocytidine, 1-methyl-1-deaza-pseudoisocytidine, zebularine, 5-aza-zebularine, 5-methyl-zebularine, 5-aza-2-thio-zebularine, 2-thio-zebularine, 2-methoxy-cytidine, 2-methoxy-5-methyl-cytidine, 4-methoxy-pseudoisocytidine, 4-methoxy-1-methyl-pseudoisocytidine, lysidine (k₂C), α-thio-cytidine, 2′-O-methyl-cytidine (Cm), 5,2′-O-dimethyl-cytidine (m⁵Cm), N4-acetyl-2′-O-methyl-cytidine (ac⁴ Cm), N4,2′-O-dimethyl-cytidine (m⁴Cm), 5-formyl-2′-O-methyl-cytidine (f⁵Cm), N4,N4,2′-O-trimethyl-cytidine (m⁴₂Cm), 1-thio-cytidine, 2′-F-ara-cytidine, 2′-F-cytidine, and 2′-OH-ara-cytidine.

[0447] In some embodiments, the modified nucleobase is a modified adenine. Exemplary nucleobases and nucleosides having a modified adenine include 2-amino-purine, 2, 6-diaminopurine, 2-amino-6-halo-purine (e.g., 2-amino-6-chloro-purine), 6-halo-purine (e.g., 6-chloro-purine), 2-amino-6-methyl-purine, 8-azido-adenosine, 7-deaza-adenine, 7-deaza-8-aza-adenine, 7-deaza-2-amino-purine, 7-deaza-8-aza-2-amino-purine, 7-deaza-2,6-diaminopurine, 7-deaza-8-aza-2,6-diaminopurine, 1-methyl-adenosine (m¹A), 2-methyl-adenine (m²A), N6-methyl-adenosine (m⁶A), 2-methylthio-N6-methyl-adenosine (ms²m⁶A), N6-isopentenyl-adenosine (i⁶A), 2-methylthio-N6-isopentenyl-adenosine (ms²i⁶A), N6-(cis-hydroxyisopentenyl) adenosine (io⁶A), 2-methylthio-N6-(cis-hydroxyisopentenyl) adenosine (ms²io⁶A), N6-glycinylcarbamoyl-adenosine (g⁶A), N6-threonylcarbamoyl-adenosine (t⁶A), N6-methyl-N6-threonylcarbamoyl-adenosine (m⁶t⁶A), 2-methylthio-N6-threonylcarbamoyl-adenosine (ms²g⁶A), N6,N6-dimethyl-adenosine (m⁶₂A), N6-hydroxynorvalylcarbamoyl-adenosine (hn⁶A), 2-methylthio-N6-hydroxynorvalylcarbamoyl-adenosine (ms²hn⁶A), N6-acetyl-adenosine (ac⁶A), 7-methyl-adenine, 2-methylthio-adenine, 2-methoxy-adenine, α-thio-adenosine, 2′-O-methyl-adenosine (Am), N6,2′-O-dimethyl-adenosine (m⁶Am), N6,N6,2′-O-trimethyl-adenosine (m⁶₂Am), 1,2′-O-dimethyl-adenosine (m¹Am), 2′-O-ribosyladenosine (phosphate) (Ar(p)), 2-amino-N6-methyl-purine, 1-thio-adenosine, 8-azido-adenosine, 2′-F-ara-adenosine, 2′-F-adenosine, 2′-OH-ara-adenosine, and N6-(19-amino-pentaoxanonadecyl)-adenosine.

[0448] In some embodiments, the modified nucleobase is a modified guanine. Exemplary nucleobases and nucleosides having a modified guanine include inosine (I), 1-methyl-inosine (m¹I), wyosine (imG), methylwyosine (mimG), 4-demethyl-wyosine (imG-14), isowyosine (imG2), wybutosine (yW), peroxywybutosine (o₂yW), hydroxywybutosine (OHyW), undermodified hydroxywybutosine (OHyW*), 7-deaza-guanosine, queuosine (Q), epoxyqueuosine (oQ), galactosyl-queuosine (galQ), mannosyl-queuosine (manQ), 7-cyano-7-deaza-guanosine (preQ₀), 7-aminomethyl-7-deaza-guanosine (preQ₁), archaeosine (G), 7-deaza-8-aza-guanosine, 6-thio-guanosine, 6-thio-7-deaza-guanosine, 6-thio-7-deaza-8-aza-guanosine, 7-methyl-guanosine (m⁷G), 6-thio-7-methyl-guanosine, 7-methyl-inosine, 6-methoxy-guanosine, 1-methyl-guanosine (m¹G), N2-methyl-guanosine (m²G), N2,N2-dimethyl-guanosine (m²₂G), N2,7-dimethyl-guanosine (m^{2,7}G), N2, N2,7-dimethyl-guanosine (m^{2,2,7}G), 8-oxo-guanosine, 7-methyl-8-oxo-guanosine, 1-methyl-6-thio-guanosine, N2-methyl-6-thio-guanosine, N2,N2-dimethyl-6-thio-guanosine, α-thio-guanosine, 2′-O-methyl-guanosine (Gm), N2-methyl-2′-O-methyl-guanosine (m²Gm), N2,N2-dimethyl-2′-O-methyl-guanosine (m²₂Gm), 1-methyl-2′-O-methyl-guanosine (m¹Gm), N2,7-dimethyl-2′-O-methyl-guanosine (m^{2,7}Gm), 2′-O-methyl-inosine (Im), 1,2′-O-dimethyl-inosine (m¹Im), and 2′-O-ribosylguanosine (phosphate) (Gr(p)).

[0449] The nucleobase of the nucleotide can be independently selected from a purine, a pyrimidine, a purine or pyrimidine analog. For example, the nucleobase can each be independently selected from adenine, cytosine, guanine, uracil, or hypoxanthine. In another embodiment, the nucleobase can also include, for example, naturally-occurring and synthetic derivatives of a base, including pyrazolo[3,4-d]pyrimidines, 5-methylcytosine (5-me-C), 5-hydroxymethyl cytosine, xanthine, hypoxanthine, 2-aminoadenine, 6-methyl and other alkyl derivatives of adenine and guanine, 2-propyl and other alkyl derivatives of adenine and guanine, 2-thiouracil, 2-thiothymine and 2-thiocytosine, 5-propynyl uracil and cytosine, 6-azo uracil, cytosine and thymine, 5-uracil (pseudouracil), 4-thiouracil, 8-halo (e.g., 8-bromo), 8-amino, 8-thiol, 8-thioalkyl, 8-hydroxyl and other 8-substituted adenines and guanines, 5-halo particularly 5-bromo, 5-trifluoromethyl and other 5-substituted uracils and cytosines, 7-methylguanine and 7-methyladenine, 8-azaguanine and 8-azaadenine, deazaguanine, 7-deazaguanine, 3-deazaguanine, deazaadenine, 7-deazaadenine, 3-deazaadenine, pyrazolo[3,4-d]pyrimidine, imidazo[1,5-a]1,3,5 triazinones, 9-deazapurines, imidazo[4,5-d]pyrazines, thiazolo[4,5-d]pyrimidines, pyrazin-2-ones, 1,2,4-triazine, pyridazine; and 1,3,5 triazine. When the nucleotides are depicted using the shorthand A, G, C, T or U, each letter refers to the representative base and/or derivatives thereof, e.g., A includes adenine or adenine analogs, e.g., 7-deaza adenine).

### Modifications on the Internucleoside Linkage

[0450] The modified nucleotides, which may be incorporated into a polynucleotide, primary construct, or mmRNA molecule, can be modified on the internucleoside linkage (e.g., phosphate backbone). Herein, in the context of the polynucleotide backbone, the phrases “phosphate” and “phosphodiester” are used interchangeably. Backbone phosphate groups can be modified by replacing one or more of the oxygen atoms with a different substituent. Further, the modified nucleosides and nucleotides can include the wholesale replacement of an unmodified phosphate moiety with another internucleoside linkage as described herein. Examples of modified phosphate groups include, but are not limited to, phosphorothioate, phosphoroselenates, boranophosphates, boranophosphate esters, hydrogen phosphonates, phosphoramidates, phosphorodiamidates, alkyl or aryl phosphonates, and phosphotriesters. Phosphorodithioates have both non-linking oxygens replaced by sulfur. The phosphate linker can also be modified by the replacement of a linking oxygen with nitrogen (bridged phosphoramidates), sulfur (bridged phosphorothioates), and carbon (bridged methylene-phosphonates).

[0451] The α-thio substituted phosphate moiety is provided to confer stability to RNA and DNA polymers through the unnatural phosphorothioate backbone linkages. Phosphorothioate DNA and RNA have increased nuclease resistance and subsequently a longer half-life in a cellular environment. Phosphorothioate linked polynucleotides, primary constructs, or mmRNA molecules are expected to also reduce the innate immune response through weaker binding/activation of cellular innate immune molecules.

[0452] In specific embodiments, a modified nucleoside includes an alpha-thio-nucleoside (e.g., 5′-O-(1-thiophosphate)-adenosine, 5′-O-(1-thiophosphate)-cytidine (α-thio-cytidine), 5′-O-(1-thiophosphate)-guanosine, 5′-O-(1-thiophosphate)-uridine, or 5′-O-(1-thiophosphate)-pseudouridine).

[0453] Other internucleoside linkages that may be employed according to the present invention, including internucleoside linkages which do not contain a phosphorous atom, are described herein below.

### Combinations of Modified Sugars, Nucleobases, and Internucleoside Linkages

[0454] The polynucleotides, primary constructs, and mmRNA of the invention can include a combination of modifications to the sugar, the nucleobase, and/or the internucleoside linkage. These combinations can include any one or more modifications described herein. For examples, any of the nucleotides described herein in Formulas (Ia), (Ia-1)-(Ia-3), (Ib)-(If), (IIa)-(IIp), (IIb-1), (IIb-2), (IIc-1)-(IIc-2), (IIn-1), (IIn-2), (IVa)-(IVl), and (IXa)-(IXr) can be combined with any of the nucleobases described herein (e.g., in Formulas (b1)-(b43) or any other described herein).

Synthesis of Polypeptides, Primary Constructs, and mmRNA Molecules

[0455] The polypeptides, primary constructs, and mmRNA molecules for use in accordance with the invention may be prepared according to any useful technique, as described herein. The modified nucleosides and nucleotides used in the synthesis of polynucleotides, primary constructs, and mmRNA molecules disclosed herein can be prepared from readily available starting materials using the following general methods and procedures. Where typical or preferred process conditions (e.g., reaction temperatures, times, mole ratios of reactants, solvents, pressures, etc.) are provided, a skilled artisan would be able to optimize and develop additional process conditions. Optimum reaction conditions may vary with the particular reactants or solvent used, but such conditions can be determined by one skilled in the art by routine optimization procedures.

[0456] The processes described herein can be monitored according to any suitable method known in the art. For example, product formation can be monitored by spectroscopic means, such as nuclear magnetic resonance spectroscopy (e.g., ¹H or ¹³C) infrared spectroscopy, spectrophotometry (e.g., UV-visible), or mass spectrometry, or by chromatography such as high performance liquid chromatography (HPLC) or thin layer chromatography.

[0457] Preparation of polypeptides, primary constructs, and mmRNA molecules of the present invention can involve the protection and deprotection of various chemical groups. The need for protection and deprotection, and the selection of appropriate protecting groups can be readily determined by one skilled in the art. The chemistry of protecting groups can be found, for example, in Greene, et al., Protective Groups in Organic Synthesis, 2d. Ed., Wiley & Sons, 1991, which is incorporated herein by reference in its entirety.

[0458] The reactions of the processes described herein can be carried out in suitable solvents, which can be readily selected by one of skill in the art of organic synthesis. Suitable solvents can be substantially nonreactive with the starting materials (reactants), the intermediates, or products at the temperatures at which the reactions are carried out, i.e., temperatures which can range from the solvent's freezing temperature to the solvent's boiling temperature. A given reaction can be carried out in one solvent or a mixture of more than one solvent. Depending on the particular reaction step, suitable solvents for a particular reaction step can be selected.

[0459] Resolution of racemic mixtures of modified nucleosides and nucleotides can be carried out by any of numerous methods known in the art. An example method includes fractional recrystallization using a “chiral resolving acid” which is an optically active, salt-forming organic acid. Suitable resolving agents for fractional recrystallization methods are, for example, optically active acids, such as the D and L forms of tartaric acid, diacetyltartaric acid, dibenzoyltartaric acid, mandelic acid, malic acid, lactic acid or the various optically active camphorsulfonic acids. Resolution of racemic mixtures can also be carried out by elution on a column packed with an optically active resolving agent (e.g., dinitrobenzoylphenylglycine). Suitable elution solvent composition can be determined by one skilled in the art.

Modified nucleosides and nucleotides (e.g., building block molecules) can be prepared according to the synthetic methods described in Ogata et al., J. Org. Chem. 74:2585-2588 (2009); Purmal et al., Nucl. Acids Res. 22 (1): 72-78, (1994); Fukuhara et al., Biochemistry, 1 (4): 563-568 (1962); and Xu et al., Tetrahedron, 48 (9): 1729-1740 (1992), each of which are incorporated by reference in their entirety.

[0460] The polypeptides, primary constructs, and mmRNA of the invention may or may not be uniformly modified along the entire length of the molecule. For example, one or more or all types of nucleotide (e.g., purine or pyrimidine, or any one or more or all of A, G, U, C) may or may not be uniformly modified in a polynucleotide of the invention, or in a given predetermined sequence region thereof (e.g. one or more of the sequence regions represented in FIG. 1). In some embodiments, all nucleotides X in a polynucleotide of the invention (or in a given sequence region thereof) are modified, wherein X may any one of nucleotides A, G, U, C, or any one of the combinations A+G, A+U, A+C, G+U, G+C, U+C, A+G+U, A+G+C, G+U+C or A+G+C.

[0461] Different sugar modifications, nucleotide modifications, and/or internucleoside linkages (e.g., backbone structures) may exist at various positions in the polynucleotide, primary construct, or mmRNA. One of ordinary skill in the art will appreciate that the nucleotide analogs or other modification(s) may be located at any position(s) of a polynucleotide, primary construct, or mmRNA such that the function of the polynucleotide, primary construct, or mmRNA is not substantially decreased. A modification may also be a 5′ or 3′ terminal modification. The polynucleotide, primary construct, or mmRNA may contain from about 1% to about 100% modified nucleotides (either in relation to overall nucleotide content, or in relation to one or more types of nucleotide, i.e. any one or more of A, G, U or C) or any intervening percentage (e.g., from 1% to 20%, from 1% to 25%, from 1% to 50%, from 1% to 60%, from 1% to 70%, from 1% to 80%, from 1% to 90%, from 1% to 95%, from 10% to 20%, from 10% to 25%, from 10% to 50%, from 10% to 60%, from 10% to 70%, from 10% to 80%, from 10% to 90%, from 10% to 95%, from 10% to 100%, from 20% to 25%, from 20% to 50%, from 20% to 60%, from 20% to 70%, from 20% to 80%, from 20% to 90%, from 20% to 95%, from 20% to 100%, from 50% to 60%, from 50% to 70%, from 50% to 80%, from 50% to 90%, from 50% to 95%, from 50% to 100%, from 70% to 80%, from 70% to 90%, from 70% to 95%, from 70% to 100%, from 80% to 90%, from 80% to 95%, from 80% to 100%, from 90% to 95%, from 90% to 100%, and from 95% to 100%).

[0462] In some embodiments, the polynucleotide, primary construct, or mmRNA includes a modified pyrimidine (e.g., a modified uracil/uridine/U or modified cytosine/cytidine/C). In some embodiments, the uracil or uridine (generally: U) in the polynucleotide, primary construct, or mmRNA molecule may be replaced with from about 1% to about 100% of a modified uracil or modified uridine (e.g., from 1% to 20%, from 1% to 25%, from 1% to 50%, from 1% to 60%, from 1% to 70%, from 1% to 80%, from 1% to 90%, from 1% to 95%, from 10% to 20%, from 10% to 25%, from 10% to 50%, from 10% to 60%, from 10% to 70%, from 10% to 80%, from 10% to 90%, from 10% to 95%, from 10% to 100%, from 20% to 25%, from 20% to 50%, from 20% to 60%, from 20% to 70%, from 20% to 80%, from 20% to 90%, from 20% to 95%, from 20% to 100%, from 50% to 60%, from 50% to 70%, from 50% to 80%, from 50% to 90%, from 50% to 95%, from 50% to 100%, from 70% to 80%, from 70% to 90%, from 70% to 95%, from 70% to 100%, from 80% to 90%, from 80% to 95%, from 80% to 100%, from 90% to 95%, from 90% to 100%, and from 95% to 100% of a modified uracil or modified uridine). The modified uracil or uridine can be replaced by a compound having a single unique structure or by a plurality of compounds having different structures (e.g., 2, 3, 4 or more unique structures, as described herein). In some embodiments, the cytosine or cytidine (generally: C) in the polynucleotide, primary construct, or mmRNA molecule may be replaced with from about 1% to about 100% of a modified cytosine or modified cytidine (e.g., from 1% to 20%, from 1% to 25%, from 1% to 50%, from 1% to 60%, from 1% to 70%, from 1% to 80%, from 1% to 90%, from 1% to 95%, from 10% to 20%, from 10% to 25%, from 10% to 50%, from 10% to 60%, from 10% to 70%, from 10% to 80%, from 10% to 90%, from 10% to 95%, from 10% to 100%, from 20% to 25%, from 20% to 50%, from 20% to 60%, from 20% to 70%, from 20% to 80%, from 20% to 90%, from 20% to 95%, from 20% to 100%, from 50% to 60%, from 50% to 70%, from 50% to 80%, from 50% to 90%, from 50% to 95%, from 50% to 100%, from 70% to 80%, from 70% to 90%, from 70% to 95%, from 70% to 100%, from 80% to 90%, from 80% to 95%, from 80% to 100%, from 90% to 95%, from 90% to 100%, and from 95% to 100% of a modified cytosine or modified cytidine). The modified cytosine or cytidine can be replaced by a compound having a single unique structure or by a plurality of compounds having different structures (e.g., 2, 3, 4 or more unique structures, as described herein).

In some embodiments, the present disclosure provides methods of synthesizing a polynucleotide, primary construct, or mmRNA (e.g., the first region, first flanking region, or second flanking region) including n number of linked nucleosides having Formula (Ia-1):

[chemical structure]

comprising:
[0463] a) reacting a nucleotide of Formula (IV-1):

[chemical structure]

[0464] with a phosphoramidite compound of Formula (V-1):

[chemical structure]

[0465] wherein Y⁹ is H, hydroxy, phosphoryl, pyrophosphate, sulfate, amino, thiol, optionally substituted amino acid, or a peptide (e.g., including from 2 to 12 amino acids); and each P¹, P², and P³ is, independently, a suitable protecting group; and [symbol] denotes a solid support;
[0466] to provide a polynucleotide, primary construct, or mmRNA of Formula (VI-1):

[chemical structure]

and
[0467] b) oxidizing or sulfurizing the polynucleotide, primary construct, or mmRNA of Formula (V) to yield a polynucleotide, primary construct, or mmRNA of Formula (VII-1):

[chemical structure]

and
[0468] c) removing the protecting groups to yield the polynucleotide, primary construct, or mmRNA of Formula (Ia).

[0469] In some embodiments, steps a) and b) are repeated from 1 to about 10,000 times. In some embodiments, the methods further comprise a nucleotide (e.g., mmRNA molecule) selected from the group consisting of A, C, G and U adenosine, cytosine, guanosine, and uracil. In some embodiments, the nucleobase may be a pyrimidine or derivative thereof. In some embodiments, the polynucleotide, primary construct, or mmRNA is translatable.

[0470] Other components of polynucleotides, primary constructs, and mmRNA are optional, and are beneficial in some embodiments. For example, a 5′ untranslated region (UTR) and/or a 3′UTR are provided, wherein either or both may independently contain one or more different nucleotide modifications. In such embodiments, nucleotide modifications may also be present in the translatable region. Also provided are polynucleotides, primary constructs, and mmRNA containing a Kozak sequence.

[0471] Exemplary syntheses of modified nucleotides, which are incorporated into a modified nucleic acid or mmRNA, e.g., RNA or mRNA, are provided below in Scheme 1 through Scheme 11. Scheme 1 provides a general method for phosphorylation of nucleosides, including modified nucleosides.

[chemical structure]

[0472] Various protecting groups may be used to control the reaction. For example, Scheme 2 provides the use of multiple protecting and deprotecting steps to promote phosphorylation at the 5′ position of the sugar, rather than the 2′ and 3′ hydroxyl groups.

[chemical structure]

[0473] Modified nucleotides can be synthesized in any useful manner. Schemes 3, 4, and 7 provide exemplary methods for synthesizing modified nucleotides having a modified purine nucleobase; and Schemes 5 and 6 provide exemplary methods for synthesizing modified nucleotides having a modified pseudouridine or pseudoisocytidine, respectively.

[chemical structure]

[chemical structure]

[chemical structure]

[chemical structure]

[chemical structure]

[0474] Schemes 8 and 9 provide exemplary syntheses of modified nucleotides. Scheme 10 provides a non-limiting biocatalytic method for producing nucleotides.

[chemical structure]

[chemical structure]

[chemical structure]

[0475] Scheme 11 provides an exemplary synthesis of a modified uracil, where the N1 position is modified with R^{12b}, as provided elsewhere, and the 5′-position of ribose is phosphorylated. T¹, T², R^{12a}, R^{12b}, and r are as provided herein. This synthesis, as well as optimized versions thereof, can be used to modify other pyrimidine nucleobases and purine nucleobases (see e.g., Formulas (b1)-(b43)) and/or to install one or more phosphate groups (e.g., at the 5′ position of the sugar). This alkylating reaction can also be used to include one or more optionally substituted alkyl group at any reactive group (e.g., amino group) in any nucleobase described herein (e.g., the amino groups in the Watson-Crick base-pairing face for cytosine, uracil, adenine, and guanine).

[chemical structure]

Combinations of Nucleotides in mmRNA

[0476] Further examples of modified nucleotides and modified nucleotide combinations are provided below in Table 9. These combinations of modified nucleotides can be used to form the polypeptides, primary constructs, or mmRNA of the invention. Unless otherwise noted, the modified nucleotides may be completely substituted for the natural nucleotides of the modified nucleic acids or mmRNA of the invention. As a non-limiting example, the natural nucleotide uridine may be substituted with a modified nucleoside described herein. In another non-limiting example, the natural nucleotide uridine may be partially substituted (e.g., about 0.1%, 1%, 5%, 10%, 15%, 20%, 25%, 30%, 35%, 40%, 45%, 50%, 55%, 60%, 65%, 70%, 75%, 80%, 85%, 90%, 95% or 99.9%) with at least one of the modified nucleoside disclosed herein.

TABLE 9

| Modified | |
|---|---|
| Nucleotide | Modified Nucleotide Combination |
| α-thio-cytidine | α-thio-cytidine/5-iodo-uridine |
| | α-thio-cytidine/N1-methyl-pseudouridine |
| | α-thio-cytidine/α-thio-uridine |
| | α-thio-cytidine/5-methyl-uridine |
| | α-thio-cytidine/pseudo-uridine |
| | about 50% of the cytosines are α-thio-cytidine |
| pseudoiso- | pseudoisocytidine/5-iodo-uridine |
| cytidine | pseudoisocytidine/N1-methyl-pseudouridine |
| | pseudoisocytidine/α-thio-uridine |
| | pseudoisocytidine/5-methyl-uridine |
| | pseudoisocytidine/pseudouridine |
| | about 25% of cytosines are pseudoisocytidine |
| | pseudoisocytidine/about 50% of uridines are N1-methyl- |
| | pseudouridine and about 50% of uridines are |
| | pseudouridine |
| | pseudoisocytidine/about 25% of uridines are N1-methyl- |
| | pseudouridine and about 25% of uridines are |
| | pseudouridine |
| pyrrolo- | pyrrolo-cytidine/5-iodo-uridine |
| cytidine | pyrrolo-cytidine/N1-methyl-pseudouridine |
| | pyrrolo-cytidine/α-thio-uridine |
| | pyrrolo-cytidine/5-methyl-uridine |
| | pyrrolo-cytidine/pseudouridine |
| | about 50% of the cytosines are pyrrolo-cytidine |
| 5-methyl- | 5-methyl-cytidine/5-iodo-uridine |
| cytidine | 5-methyl-cytidine/N1-methyl-pseudouridine |
| | 5-methyl-cytidine/α-thio-uridine |
| | 5-methyl-cytidine/5-methyl-uridine |
| | 5-methyl-cytidine/pseudouridine |
| | about 25% of cytosines are 5-methyl-cytidine |
| | about 50% of cytosines are 5-methyl-cytidine |
| | 5-methyl-cytidine/5-methoxy-uridine |
| | 5-methyl-cytidine/5-bromo-uridine |
| | 5-methyl-cytidine/2-thio-uridine |
| | 5-methyl-cytidine/about 50% of uridines are 2-thio- |
| | uridine |
| | about 50% of uridines are 5-methyl-cytidine/about 50% |
| | of uridines are 2-thio-uridine |
| N4-acetyl- | N4-acetyl-cytidine/5-iodo-uridine |
| cytidine | N4-acetyl-cytidine/N1-methyl-pseudouridine |
| | N4-acetyl-cytidine/α-thio-uridine |
| | N4-acetyl-cytidine/5-methyl-uridine |
| | N4-acetyl-cytidine/pseudouridine |
| | about 50% of cytosines are N4-acetyl-cytidine |
| | about 25% of cytosines are N4-acetyl-cytidine |
| | N4-acetyl-cytidine/5-methoxy-uridine |
| | N4-acetyl-cytidine/5-bromo-uridine |
| | N4-acetyl-cytidine/2-thio-uridine |
| | about 50% of cytosines are N4-acetyl-cytidine/about |
| | 50% of uridines are 2-thio-uridine |

[0477] Further examples of modified nucleotide combinations are provided below in Table 10. These combinations of modified nucleotides can be used to form the polypeptides, primary constructs, or mmRNA of the invention.

TABLE 10

| Modified | |
|---|---|
| Nucleotide | Modified Nucleotide Combination |
| modified cytidine | modified cytidine with (b10)/pseudouridine |
| having one or | modified cytidine with (b10)/N1-methyl-pseudouridine |
| more nucleobases | modified cytidine with (b10)/5-methoxy-uridine |
| of Formula (b10) | modified cytidine with (b10)/5-methyl-uridine |
| | modified cytidine with (b10)/5-bromo-uridine |
| | modified cytidine with (b10)/2-thio-uridine |
| | about 50% of cytidine substituted with modified |
| | cytidine (b10)/about 50% of uridines are 2-thio- |
| | uridine |
| modified cytidine | modified cytidine with (b32)/pseudouridine |
| having one or | modified cytidine with (b32)/N1-methyl-pseudouridine |
| more nucleobases | modified cytidine with (b32)/5-methoxy-uridine |
| of Formula (b32) | modified cytidine with (b32)/5-methyl-uridine |
| | modified cytidine with (b32)/5-bromo-uridine |
| | modified cytidine with (b32)/2-thio-uridine |
| | about 50% of cytidine substituted with modified |
| | cytidine (b32)/about 50% of uridines are 2-thio- |
| | uridine |
| modified uridine | modified uridine with (b1)/N4-acetyl-cytidine |
| having one or | modified uridine with (b1)/5-methyl-cytidine |
| more nucleobases | |
| of Formula (b1) | |
| modified uridine | modified uridine with (b8)/N4-acetyl-cytidine |
| having one or | modified uridine with (b8)/5-methyl-cytidine |
| more nucleobases | |
| of Formula (b8) | |
| modified uridine | modified uridine with (b28)/N4-acetyl-cytidine |
| having one or | modified uridine with (b28)/5-methyl-cytidine |
| more nucleobases | |
| of Formula (b28) | |
| modified uridine | modified uridine with (b29)/N4-acetyl-cytidine |
| having one or | modified uridine with (b29)/5-methyl-cytidine |
| more nucleobases | |
| of Formula (b29) | |
| modified uridine | modified uridine with (b30)/N4-acetyl-cytidine |
| having one or | modified uridine with (b30)/5-methyl-cytidine |
| more nucleobases | |
| of Formula (b30) | |

[0478] In some embodiments, at least 25% of the cytosines are replaced by a compound of Formula (b10)-(b14) (e.g., at least about 30%, at least about 35%, at least about 40%, at least about 45%, at least about 50%, at least about 55%, at least about 60%, at least about 65%, at least about 70%, at least about 75%, at least about 80%, at least about 85%, at least about 90%, at least about 95%, or about 100%).

[0479] In some embodiments, at least 25% of the uracils are replaced by a compound of Formula (b1)-(b9) (e.g., at least about 30%, at least about 35%, at least about 40%, at least about 45%, at least about 50%, at least about 55%, at least about 60%, at least about 65%, at least about 70%, at least about 75%, at least about 80%, at least about 85%, at least about 90%, at least about 95%, or about 100%).

[0480] In some embodiments, at least 25% of the cytosines are replaced by a compound of Formula (b10)-(b14), and at least 25% of the uracils are replaced by a compound of Formula (b1)-(b9) (e.g., at least about 30%, at least about 35%, at least about 40%, at least about 45%, at least about 50%, at least about 55%, at least about 60%, at least about 65%, at least about 70%, at least about 75%, at least about 80%, at least about 85%, at least about 90%, at least about 95%, or about 100%).

### IV. Pharmaceutical Compositions

### Formulation, Administration, Delivery and Dosing

[0481] The present invention provides polynucleotides, primary constructs and mmRNA compositions and complexes in combination with one or more pharmaceutically acceptable excipients. Pharmaceutical compositions may optionally comprise one or more additional active substances, e.g. therapeutically and/or prophylactically active substances. General considerations in the formulation and/or manufacture of pharmaceutical agents may be found, for example, in Remington: The Science and Practice of Pharmacy 21^{st} ed., Lippincott Williams & Wilkins, 2005 (incorporated herein by reference).

[0482] In some embodiments, compositions are administered to humans, human patients or subjects. For the purposes of the present disclosure, the phrase “active ingredient” generally refers to polynucleotides, primary constructs and mmRNA to be delivered as described herein.

[0483] Although the descriptions of pharmaceutical compositions provided herein are principally directed to pharmaceutical compositions which are suitable for administration to humans, it will be understood by the skilled artisan that such compositions are generally suitable for administration to any other animal, e.g., to non-human animals, e.g. non-human mammals. Modification of pharmaceutical compositions suitable for administration to humans in order to render the compositions suitable for administration to various animals is well understood, and the ordinarily skilled veterinary pharmacologist can design and/or perform such modification with merely ordinary, if any, experimentation. Subjects to which administration of the pharmaceutical compositions is contemplated include, but are not limited to, humans and/or other primates; mammals, including commercially relevant mammals such as cattle, pigs, horses, sheep, cats, dogs, mice, and/or rats; and/or birds, including commercially relevant birds such as poultry, chickens, ducks, geese, and/or turkeys.

[0484] Formulations of the pharmaceutical compositions described herein may be prepared by any method known or hereafter developed in the art of pharmacology. In general, such preparatory methods include the step of bringing the active ingredient into association with an excipient and/or one or more other accessory ingredients, and then, if necessary and/or desirable, dividing, shaping and/or packaging the product into a desired single- or multi-dose unit.

[0485] A pharmaceutical composition in accordance with the invention may be prepared, packaged, and/or sold in bulk, as a single unit dose, and/or as a plurality of single unit doses. As used herein, a “unit dose” is discrete amount of the pharmaceutical composition comprising a predetermined amount of the active ingredient. The amount of the active ingredient is generally equal to the dosage of the active ingredient which would be administered to a subject and/or a convenient fraction of such a dosage such as, for example, one-half or one-third of such a dosage.

[0486] Relative amounts of the active ingredient, the pharmaceutically acceptable excipient, and/or any additional ingredients in a pharmaceutical composition in accordance with the invention will vary, depending upon the identity, size, and/or condition of the subject treated and further depending upon the route by which the composition is to be administered. By way of example, the composition may comprise between 0.1% and 100%, e.g., between 0.5 and 50%, between 1-30%, between 5-80%, at least 80% (w/w) active ingredient.

### Formulations

[0487] The polynucleotide, primary construct, and mmRNA of the invention can be formulated using one or more excipients to: (1) increase stability; (2) increase cell transfection; (3) permit the sustained or delayed release (e.g., from a depot formulation of the polynucleotide, primary construct, or mmRNA); (4) alter the biodistribution (e.g., target the polynucleotide, primary construct, or mmRNA to specific tissues or cell types); (5) increase the translation of encoded protein in vivo; and/or (6) alter the release profile of encoded protein in vivo. In addition to traditional excipients such as any and all solvents, dispersion media, diluents, or other liquid vehicles, dispersion or suspension aids, surface active agents, isotonic agents, thickening or emulsifying agents, preservatives, excipients of the present invention can include, without limitation, lipidoids, liposomes, lipid nanoparticles, polymers, lipoplexes, core-shell nanoparticles, peptides, proteins, cells transfected with polynucleotide, primary construct, or mmRNA (e.g., for transplantation into a subject), hyaluronidase, nanoparticle mimics and combinations thereof. Accordingly, the formulations of the invention can include one or more excipients, each in an amount that together increases the stability of the polynucleotide, primary construct, or mmRNA, increases cell transfection by the polynucleotide, primary construct, or mmRNA, increases the expression of polynucleotide, primary construct, or mmRNA encoded protein, and/or alters the release profile of polynucleotide, primary construct, or mmRNA encoded proteins. Further, the primary construct and mmRNA of the present invention may be formulated using self-assembled nucleic acid nanoparticles.

[0488] Formulations of the pharmaceutical compositions described herein may be prepared by any method known or hereafter developed in the art of pharmacology. In general, such preparatory methods include the step of associating the active ingredient with an excipient and/or one or more other accessory ingredients.

[0489] A pharmaceutical composition in accordance with the present disclosure may be prepared, packaged, and/or sold in bulk, as a single unit dose, and/or as a plurality of single unit doses. As used herein, a “unit dose” refers to a discrete amount of the pharmaceutical composition comprising a predetermined amount of the active ingredient. The amount of the active ingredient may generally be equal to the dosage of the active ingredient which would be administered to a subject and/or a convenient fraction of such a dosage including, but not limited to, one-half or one-third of such a dosage.

[0490] Relative amounts of the active ingredient, the pharmaceutically acceptable excipient, and/or any additional ingredients in a pharmaceutical composition in accordance with the present disclosure may vary, depending upon the identity, size, and/or condition of the subject being treated and further depending upon the route by which the composition is to be administered. For example, the composition may comprise between 0.1% and 99% (w/w) of the active ingredient.

[0491] In some embodiments, the formulations described herein may contain at least one mmRNA. As a non-limiting example, the formulations may contain 1, 2, 3, 4 or 5 mmRNA. In one embodiment the formulation may contain modified mRNA encoding proteins selected from categories such as, but not limited to, human proteins, veterinary proteins, bacterial proteins, biological proteins, antibodies, immunogenic proteins, therapeutic peptides and proteins, secreted proteins, plasma membrane proteins, cytoplasmic and cytoskeletal proteins, intrancellular membrane bound proteins, nuclear proteins, proteins associated with human disease and/or proteins associated with non-human diseases. In one embodiment, the formulation contains at least three modified mRNA encoding proteins. In one embodiment, the formulation contains at least five modified mRNA encoding proteins.

[0492] Pharmaceutical formulations may additionally comprise a pharmaceutically acceptable excipient, which, as used herein, includes, but is not limited to, any and all solvents, dispersion media, diluents, or other liquid vehicles, dispersion or suspension aids, surface active agents, isotonic agents, thickening or emulsifying agents, preservatives, and the like, as suited to the particular dosage form desired. Various excipients for formulating pharmaceutical compositions and techniques for preparing the composition are known in the art (see Remington: The Science and Practice of Pharmacy, 21^{st} Edition, A. R. Gennaro, Lippincott, Williams & Wilkins, Baltimore, MD, 2006; incorporated herein by reference in its entirety). The use of a conventional excipient medium may be contemplated within the scope of the present disclosure, except insofar as any conventional excipient medium may be incompatible with a substance or its derivatives, such as by producing any undesirable biological effect or otherwise interacting in a deleterious manner with any other component(s) of the pharmaceutical composition.

[0493] In some embodiments, the particle size of the lipid nanoparticle may be increased and/or decreased. The change in particle size may be able to help counter biological reaction such as, but not limited to, inflammation or may increase the biological effect of the modified mRNA delivered to mammals.

[0494] Pharmaceutically acceptable excipients used in the manufacture of pharmaceutical compositions include, but are not limited to, inert diluents, surface active agents and/or emulsifiers, preservatives, buffering agents, lubricating agents, and/or oils. Such excipients may optionally be included in the pharmaceutical formulations of the invention.

### Lipidoids

[0495] The synthesis of lipidoids has been extensively described and formulations containing these compounds are particularly suited for delivery of polynucleotides, primary constructs or mmRNA (see Mahon et al., Bioconjug Chem. 2010 21:1448-1454; Schroeder et al., J Intern Med. 2010 267:9-21; Akinc et al., Nat Biotechnol. 2008 26:561-569; Love et al., Proc Natl Acad Sci USA. 2010 107:1864-1869; Siegwart et al., Proc Natl Acad Sci USA. 2011 108:12996-3001; all of which are incorporated herein in their entireties).

[0496] While these lipidoids have been used to effectively deliver double stranded small interfering RNA molecules in rodents and non-human primates (see Akinc et al., Nat Biotechnol. 2008 26:561-569; Frank-Kamenetsky et al., Proc Natl Acad Sci USA. 2008 105:11915-11920; Akinc et al., Mol Ther. 2009 17:872-879; Love et al., Proc Natl Acad Sci USA. 2010 107:1864-1869; Leuschner et al., Nat Biotechnol. 2011 29:1005-1010; all of which is incorporated herein in their entirety), the present disclosure describes their formulation and use in delivering single stranded polynucleotides, primary constructs, or mmRNA. Complexes, micelles, liposomes or particles can be prepared containing these lipidoids and therefore, can result in an effective delivery of the polynucleotide, primary construct, or mmRNA, as judged by the production of an encoded protein, following the injection of a lipidoid formulation via localized and/or systemic routes of administration. Lipidoid complexes of polynucleotides, primary constructs, or mmRNA can be administered by various means including, but not limited to, intravenous, intramuscular, or subcutaneous routes.

[0497] In vivo delivery of nucleic acids may be affected by many parameters, including, but not limited to, the formulation composition, nature of particle PEGylation, degree of loading, oligonucleotide to lipid ratio, and biophysical parameters such as, but not limited to, particle size (Akinc et al., Mol Ther. 2009 17:872-879; herein incorporated by reference in its entirety). As an example, small changes in the anchor chain length of poly(ethylene glycol) (PEG) lipids may result in significant effects on in vivo efficacy. Formulations with the different lipidoids, including, but not limited to penta [3-(1-laurylaminopropionyl)]-triethylenetetramine hydrochloride (TETA-5LAP; aka 98N12-5, see Murugaiah et al., Analytical Biochemistry, 401:61 (2010); herein incorporated by reference in its entirety), C12-200 (including derivatives and variants), and MD1, can be tested for in vivo activity.

[0498] The lipidoid referred to herein as “98N12-5” is disclosed by Akinc et al., Mol Ther. 2009 17:872-879 and is incorporated by reference in its entirety. (See FIG. 2)

[0499] The lipidoid referred to herein as “C12-200” is disclosed by Love et al., Proc Natl Acad Sci USA. 2010 107:1864-1869 (see FIG. 2) and Liu and Huang, Molecular Therapy. 2010 669-670 (see FIG. 2); both of which are herein incorporated by reference in their entirety. The lipidoid formulations can include particles comprising either 3 or 4 or more components in addition to polynucleotide, primary construct, or mmRNA. As an example, formulations with certain lipidoids, include, but are not limited to, 98N12-5 and may contain 42% lipidoid, 48% cholesterol and 10% PEG(C14 alkyl chain length). As another example, formulations with certain lipidoids, include, but are not limited to, C12-200 and may contain 50% lipidoid, 10% disteroylphosphatidyl choline, 38.5% cholesterol, and 1.5% PEG-DMG.

[0500] In one embodiment, a polynucleotide, primary construct, or mmRNA formulated with a lipidoid for systemic intravenous administration can target the liver. For example, a final optimized intravenous formulation using polynucleotide, primary construct, or mmRNA, and comprising a lipid molar composition of 42% 98N12-5, 48% cholesterol, and 10% PEG-lipid with a final weight ratio of about 7.5 to 1 total lipid to polynucleotide, primary construct, or mmRNA, and a C14 alkyl chain length on the PEG lipid, with a mean particle size of roughly 50-60 nm, can result in the distribution of the formulation to be greater than 90% to the liver. (see, Akinc et al., Mol Ther. 2009 17:872-879; herein incorporated by reference in its entirety). In another example, an intravenous formulation using a C12-200 (see U.S. provisional application 61/175,770 and published international application WO2010129709, each of which is herein incorporated by reference in their entirety) lipidoid may have a molar ratio of 50/10/38.5/1.5 of C12-200/disteroylphosphatidyl choline/cholesterol/PEG-DMG, with a weight ratio of 7 to 1 total lipid to polynucleotide, primary construct, or mmRNA, and a mean particle size of 80 nm may be effective to deliver polynucleotide, primary construct, or mmRNA to hepatocytes (see, Love et al., Proc Natl Acad Sci USA. 2010 107:1864-1869 herein incorporated by reference in its entirety). In another embodiment, an MD1 lipidoid-containing formulation may be used to effectively deliver polynucleotide, primary construct, or mmRNA to hepatocytes in vivo. The characteristics of optimized lipidoid formulations for intramuscular or subcutaneous routes may vary significantly depending on the target cell type and the ability of formulations to diffuse through the extracellular matrix into the blood stream. While a particle size of less than 150 nm may be desired for effective hepatocyte delivery due to the size of the endothelial fenestrae (see, Akinc et al., Mol Ther. 2009 17:872-879 herein incorporated by reference in its entirety), use of a lipidoid-formulated polynucleotide, primary construct, or mmRNA to deliver the formulation to other cells types including, but not limited to, endothelial cells, myeloid cells, and muscle cells may not be similarly size-limited. Use of lipidoid formulations to deliver siRNA in vivo to other non-hepatocyte cells such as myeloid cells and endothelium has been reported (see Akinc et al., Nat Biotechnol. 2008 26:561-569; Leuschner et al., Nat Biotechnol. 2011 29:1005-1010; Cho et al. Adv. Funct. Mater. 2009 19:3112-3118; 8th International Judah Folkman Conference, Cambridge, MA Oct. 8-9, 2010; each of which is herein incorporated by reference in its entirety). Effective delivery to myeloid cells, such as monocytes, lipidoid formulations may have a similar component molar ratio. Different ratios of lipidoids and other components including, but not limited to, disteroylphosphatidyl choline, cholesterol and PEG-DMG, may be used to optimize the formulation of the polynucleotide, primary construct, or mmRNA for delivery to different cell types including, but not limited to, hepatocytes, myeloid cells, muscle cells, etc. For example, the component molar ratio may include, but is not limited to, 50% C12-200, 10% disteroylphosphatidyl choline, 38.5% cholesterol, and %1.5 PEG-DMG (see Leuschner et al., Nat Biotechnol 2011 29:1005-1010; herein incorporated by reference in its entirety). The use of lipidoid formulations for the localized delivery of nucleic acids to cells (such as, but not limited to, adipose cells and muscle cells) via either subcutaneous or intramuscular delivery, may not require all of the formulation components desired for systemic delivery, and as such may comprise only the lipidoid and the polynucleotide, primary construct, or mmRNA.

[0501] Combinations of different lipidoids may be used to improve the efficacy of polynucleotide, primary construct, or mmRNA directed protein production as the lipidoids may be able to increase cell transfection by the polynucleotide, primary construct, or mmRNA; and/or increase the translation of encoded protein (see Whitehead et al., Mol. Ther. 2011, 19:1688-1694, herein incorporated by reference in its entirety).

### Liposomes, Lipoplexes, and Lipid Nanoparticles

[0502] The polynucleotide, primary construct, and mmRNA of the invention can be formulated using one or more liposomes, lipoplexes, or lipid nanoparticles. In one embodiment, pharmaceutical compositions of polynucleotide, primary construct, or mmRNA include liposomes. Liposomes are artificially-prepared vesicles which may primarily be composed of a lipid bilayer and may be used as a delivery vehicle for the administration of nutrients and pharmaceutical formulations. Liposomes can be of different sizes such as, but not limited to, a multilamellar vesicle (MLV) which may be hundreds of nanometers in diameter and may contain a series of concentric bilayers separated by narrow aqueous compartments, a small unicellular vesicle (SUV) which may be smaller than 50 nm in diameter, and a large unilamellar vesicle (LUV) which may be between 50 and 500 nm in diameter. Liposome design may include, but is not limited to, opsonins or ligands in order to improve the attachment of liposomes to unhealthy tissue or to activate events such as, but not limited to, endocytosis. Liposomes may contain a low or a high pH in order to improve the delivery of the pharmaceutical formulations.

[0503] The formation of liposomes may depend on the physicochemical characteristics such as, but not limited to, the pharmaceutical formulation entrapped and the liposomal ingredients, the nature of the medium in which the lipid vesicles are dispersed, the effective concentration of the entrapped substance and its potential toxicity, any additional processes involved during the application and/or delivery of the vesicles, the optimization size, polydispersity and the shelf-life of the vesicles for the intended application, and the batch-to-batch reproducibility and possibility of large-scale production of safe and efficient liposomal products.

[0504] In one embodiment, pharmaceutical compositions described herein may include, without limitation, liposomes such as those formed from 1,2-dioleyloxy-N,N-dimethylaminopropane (DODMA) liposomes, DiLa2 liposomes from Marina Biotech (Bothell, WA), 1,2-dilinoleyloxy-3-dimethylaminopropane (DLin-DMA), 2,2-dilinoleyl-4-(2-dimethylaminoethyl)-[1,3]-dioxolane (DLin-KC2-DMA), and MC3 (US20100324120; herein incorporated by reference in its entirety) and liposomes which may deliver small molecule drugs such as, but not limited to, DOXIL® from Janssen Biotech, Inc. (Horsham, PA).

[0505] In one embodiment, pharmaceutical compositions described herein may include, without limitation, liposomes such as those formed from the synthesis of stabilized plasmid-lipid particles (SPLP) or stabilized nucleic acid lipid particle (SNALP) that have been previously described and shown to be suitable for oligonucleotide delivery in vitro and in vivo (see Wheeler et al. Gene Therapy. 1999 6:271-281; Zhang et al. Gene Therapy. 1999 6:1438-1447; Jeffs et al. Pharm Res. 2005 22:362-372; Morrissey et al., Nat Biotechnol. 2005 2:1002-1007; Zimmermann et al., Nature. 2006 441:111-114; Heyes et al. J Contr Rel. 2005 107:276-287; Semple et al. Nature Biotech. 2010 28:172-176; Judge et al. J Clin Invest. 2009 119:661-673; deFougerolles Hum Gene Ther. 2008 19:125-132; all of which are incorporated herein in their entireties). The original manufacture method by Wheeler et al. was a detergent dialysis method, which was later improved by Jeffs et al. and is referred to as the spontaneous vesicle formation method. The liposome formulations are composed of 3 to 4 lipid components in addition to the polynucleotide, primary construct, or mmRNA. As an example a liposome can contain, but is not limited to, 55% cholesterol, 20% disteroylphosphatidyl choline (DSPC), 10% PEG-S-DSG, and 15% 1,2-dioleyloxy-N,N-dimethylaminopropane (DODMA), as described by Jeffs et al. As another example, certain liposome formulations may contain, but are not limited to, 48% cholesterol, 20% DSPC, 2% PEG-c-DMA, and 30% cationic lipid, where the cationic lipid can be 1,2-distearloxy-N,N-dimethylaminopropane (DSDMA), DODMA, DLin-DMA, or 1,2-dilinolenyloxy-3-dimethylaminopropane (DLenDMA), as described by Heyes et al.

[0506] In one embodiment, pharmaceutical compositions may include liposomes which may be formed to deliver mmRNA which may encode at least one immunogen. The mmRNA may be encapsulated by the liposome and/or it may be contained in an aqueous core which may then be encapsulated by the liposome (see International Pub. Nos. WO2012031046, WO2012031043, WO2012030901 and WO2012006378; each of which is herein incorporated by reference in their entirety). In another embodiment, the mmRNA which may encode an immunogen may be formulated in a cationic oil-in-water emulsion where the emulsion particle comprises an oil core and a cationic lipid which can interact with the mmRNA anchoring the molecule to the emulsion particle (see International Pub. No. WO2012006380; herein incorporated by reference in its entirety). In yet another embodiment, the lipid formulation may include at least cationic lipid, a lipid which may enhance transfection and a least one lipid which contains a hydrophilic head group linked to a lipid moiety (International Pub. No. WO2011076807 and U.S. Pub. No. 20110200582; each of which is herein incorporated by reference in their entirety). In another embodiment, the polynucleotides, primary constructs and/or mmRNA encoding an immunogen may be formulated in a lipid vesicle which may have crosslinks between functionalized lipid bilayers (see U.S. Pub. No. 20120177724, herein incorporated by reference in its entirety).

[0507] In one embodiment, the polynucleotides, primary constructs and/or mmRNA may be formulated in a lipid vesicle which may have crosslinks between functionalized lipid bilayers.

[0508] In one embodiment, the polynucleotides, primary constructs and/or mmRNA may be formulated in a liposome comprising a cationic lipid. The liposome may have a molar ratio of nitrogen atoms in the cationic lipid to the phosphates in the RNA (N: P ratio) of between 1:1 and 20:1 as described in International Publication No. WO2013006825, herein incorporated by reference in its entirety. In another embodiment, the liposome may have a N:P ratio of greater than 20:1 or less than 1:1.

[0509] In one embodiment, the polynucleotides, primary constructs and/or mmRNA may be formulated in a lipid-polycation complex. The formation of the lipid-polycation complex may be accomplished by methods known in the art and/or as described in U.S. Pub. No. 20120178702, herein incorporated by reference in its entirety. As a non-limiting example, the polycation may include a cationic peptide or a polypeptide such as, but not limited to, polylysine, polyornithine and/or polyarginine and the cationic peptides described in International Pub. No. WO2012013326; herein incorporated by reference in its entirety. In another embodiment, the polynucleotides, primary constructs and/or mmRNA may be formulated in a lipid-polycation complex which may further include a neutral lipid such as, but not limited to, cholesterol or dioleoyl phosphatidylethanolamine (DOPE).

[0510] The liposome formulation may be influenced by, but not limited to, the selection of the cationic lipid component, the degree of cationic lipid saturation, the nature of the PEGylation, ratio of all components and biophysical parameters such as size. In one example by Semple et al. (Semple et al. Nature Biotech. 2010 28:172-176; herein incorporated by reference in its entirety), the liposome formulation was composed of 57.1% cationic lipid, 7.1% dipalmitoylphosphatidylcholine, 34.3% cholesterol, and 1.4% PEG-c-DMA. As another example, changing the composition of the cationic lipid could more effectively deliver siRNA to various antigen presenting cells (Basha et al. Mol Ther. 2011 19:2186-2200; herein incorporated by reference in its entirety).

[0511] In some embodiments, the ratio of PEG in the lipid nanoparticle (LNP) formulations may be increased or decreased and/or the carbon chain length of the PEG lipid may be modified from C14 to C18 to alter the pharmacokinetics and/or biodistribution of the LNP formulations. As a non-limiting example, LNP formulations may contain 1-5% of the lipid molar ratio of PEG-c-DOMG as compared to the cationic lipid, DSPC and cholesterol. In another embodiment the PEG-c-DOMG may be replaced with a PEG lipid such as, but not limited to, PEG-DSG (1,2-Distearoyl-sn-glycerol, methoxypolyethylene glycol) or PEG-DPG (1,2-Dipalmitoyl-sn-glycerol, methoxypolyethylene glycol). The cationic lipid may be selected from any lipid known in the art such as, but not limited to, DLin-MC3-DMA, DLin-DMA, C12-200 and DLin-KC2-DMA.

[0512] In one embodiment, the polynucleotides, primary constructs or mmRNA may be formulated in a lipid nanoparticle such as those described in International Publication No. WO2012170930, herein incorporated by reference in its entirety.

[0513] In one embodiment, the cationic lipid may be selected from, but not limited to, a cationic lipid described in International Publication Nos. WO2012040184, WO2011153120, WO2011149733, WO2011090965, WO2011043913, WO2011022460, WO2012061259, WO2012054365, WO2012044638, WO2010080724, WO201021865 and WO2008103276, U.S. Pat. Nos. 7,893,302, 7,404,969 and 8,283,333 and US Patent Publication No. US20100036115 and US20120202871; each of which is herein incorporated by reference in their entirety. In another embodiment, the cationic lipid may be selected from, but not limited to, formula A described in International Publication Nos. WO2012040184, WO2011153120, WO2011149733, WO2011090965, WO2011043913, WO2011022460, WO2012061259, WO2012054365 and WO2012044638; each of which is herein incorporated by reference in their entirety. In yet another embodiment, the cationic lipid may be selected from, but not limited to, formula CLI-CLXXIX of International Publication No. WO2008103276, formula CLI-CLXXIX of U.S. Pat. No. 7,893,302, formula CLI-CLXXXXII of U.S. Pat. No. 7,404,969 and formula I-VI of US Patent Publication No. US20100036115; each of which is herein incorporated by reference in their entirety. As a non-limiting example, the cationic lipid may be selected from (20Z,23Z)—N,N-dimethylnonacosa-20,23-dien-10-amine, (17Z,20Z)—N,N-dimemylhexacosa-17,20-dien-9-amine, (1Z,19Z)—N5N-dimethylpentacosa-16, 19-dien-8-amine, (13Z, 16Z)—N,N-dimethyldocosa-13,16-dien-5-amine, (12Z, 15Z)—N,N-dimethylhenicosa-12,15-dien-4-amine, (14Z,17Z)—N,N-dimethyltricosa-14,17-dien-6-amine, (15Z,18Z)—N,N-dimethyltetracosa-15,18-dien-7-amine, (18Z,21Z)—N,N-dimethylheptacosa-18,21-dien-10-amine, (15Z,18Z)—N,N-dimethyltetracosa-15,18-dien-5-amine, (14Z, 17Z)—N,N-dimethyltricosa-14, 17-dien-4-amine, (19Z,22Z)—N,N-dimeihyloctacosa-19,22-dien-9-amine, (18Z,21 Z)—N,N-dimethylheptacosa-18,21-dien-8-amine, (17Z,20Z)—N,N-dimethylhexacosa-17,20-dien-7-amine, (16Z,19Z)—N,N-dimethylpentacosa-16, 19-dien-6-amine, (22Z,25Z)—N,N-dimethylhentriaconta-22,25-dien-10-amine, (21 Z,24Z)—N,N-dimethyltriaconta-21,24-dien-9-amine, (18Z)—N,N-dimetylheptacos-18-en-10-amine, (17Z)—N,N-dimethylhexacos-17-en-9-amine, (19Z,22Z)—N,N-dimethyloctacosa-19,22-dien-7-amine, N,N-dimethylheptacosan-10-amine, (20Z,23Z)—N-ethyl-N-methylnonacosa-20,23-dien-10-amine, 1-[(11Z,14Z)-1-nonylicosa-11,14-dien-1-yl] pyrrolidine, (20Z)—N,N-dimethylheptacos-20-en-10-amine, (15Z)—N,N-dimethyl eptacos-15-en-10-amine, (14Z)—N,N-dimethylnonacos-14-en-10-amine, (17Z)—N,N-dimethylnonacos-17-en-10-amine, (24Z)—N,N-dimethyltritriacont-24-en-10-amine, (20Z)—N,N-dimethylnonacos-20-en-10-amine, (22Z)—N,N-dimethylhentriacont-22-en-10-amine, (16Z)—N,N-dimethylpentacos-16-en-8-amine, (12Z,15Z)—N,N-dimethyl-2-nonylhenicosa-12,15-dien-1-amine, (13Z,16Z)—N,N-dimethyl-3-nonyldocosa-13,16-dien-1-amine, N,N-dimethyl-1-[(1S,2R)-2-octylcyclopropyl] eptadecan-8-amine, 1-[(1S,2R)-2-hexylcyclopropyl]-N,N-dimethylnonadecan-10-amine, N,N-dimethyl-1-[(1S,2R)-2-octylcyclopropyl]nonadecan-10-amine, N,N-dimethyl-21-[(1S,2R)-2-octylcyclopropyl]henicosan-10-amine, N,N-dimethyl-1-[(1S,2S)-2-{[(1R,2R)-2-pentylcyclopropyl]methyl}cyclopropyl]nonadecan-10-amine,N,N-dimethyl-1-[(1S,2R)-2-octylcyclopropyl]hexadecan-8-amine, N,N-dimethyl-[(1R,2S)-2-undecylcyclopropyl]tetradecan-5-amine, N,N-dimethyl-3-{7-[(1S,2R)-2-octylcyclopropyl]heptyl} dodecan-1-amine, 1-[(1R,2S)-2-heptylcyclopropyl]-N,N-dimethyloctadecan-9-amine, 1-[(1S,2R)-2-decylcyclopropyl]-N,N-dimethylpentadecan-6-amine, N,N-dimethyl-1-[(1S,2R)-2-octylcyclopropyl]pentadecan-8-amine, R—N,N-dimethyl-1-[(9Z, 12Z)-octadeca-9, 12-dien-1-yloxy]-3-(octyloxy)propan-2-amine, S—N,N-dimethyl-1-[(9Z,12Z)-octadeca-9,12-dien-1-yloxy]-3-(octyloxy)propan-2-amine, 1-{2-[(9Z,12Z)-octadeca-9,12-dien-1-yloxy]-1-[(octyloxy)methyl]ethyl}pyrrolidine, (2S)—N,N-dimethyl-1-[(9Z,12Z)-octadeca-9,12-dien-1-yloxy]-3-[(5Z)-oct-5-en-1-yloxy]propan-2-amine, 1-{2-[(9Z,12Z)-octadeca-9,12-dien-1-yloxy]-1-[(octyloxy)methyl]ethyl}azetidine, (2S)-1-(hexyloxy)-N,N-dimethyl-3-[(9Z,12Z)-octadeca-9,12-dien-1-yloxy]propan-2-amine, (2S)-1-(heptyloxy)-N,N-dimethyl-3-[(9Z,12Z)-octadeca-9,12-dien-1-yloxy]propan-2-amine, N,N-dimethyl-1-(nonyloxy)-3-[(9Z,12Z)-octadeca-9,12-dien-1-yloxy]propan-2-amine, N,N-dimethyl-1-[(9Z)-octadec-9-en-1-yloxy]-3-(octyloxy)propan-2-amine; (2S)—N,N-dimethyl-1-[(6Z,9Z,12Z)-octadeca-6,9,12-trien-1-yloxy]-3-(octyloxy)propan-2-amine, (2S)-1-[(11Z,14Z)-icosa-11, 14-dien-1-yloxy]-N,N-dimethyl-3-(pentyloxy) propan-2-amine, (2S)-1-(hexyloxy)-3-[(11Z,14Z)-icosa-11,14-dien-1-yloxy]-N,N-dimethylpropan-2-amine, 1-[(11Z,14Z)-icosa-11, 14-dien-1-yloxy]-N,N-dimethyl-3-(octyloxy)propan-2-amine, 1-[(13Z, 16Z)-docosa-13, 16-dien-1-yloxy]-N,N-dimethyl-3-(octyloxy)propan-2-amine, (2S)-1-[(13Z, 16Z)-docosa-13, 16-dien-1-yloxy]-3-(hexyloxy)-N,N-dimethylpropan-2-amine, (2S)-1-[(13Z)-docos-13-en-1-yloxy]-3-(hexyloxy)-N,N-dimethylpropan-2-amine, 1-[(13Z)-docos-13-en-1-yloxy]-N,N-dimethyl-3-(octyloxy)propan-2-amine, 1-[(9Z)-hexadec-9-en-1-yloxy]-N,N-dimethyl-3-(octyloxy)propan-2-amine, (2R)—N,N-dimethyl-H(1-metoyloctyl)oxy]-3-[(9Z,12Z)-octadeca-9,12-dien-1-yloxy]propan-2-amine, (2R)-1-[(3,7-dimethyloctyl)oxy]-N,N-dimethyl-3-[(9Z, 12Z)-octadeca-9,12-dien-1-yloxy]propan-2-amine, N,N-dimethyl-1-(octyloxy)-3-({8-[(1S,2S)-2-{[(1R,2R)-2-pentylcyclopropyl]methyl}cyclopropyl]octyl}oxy)propan-2-amine, N,N-dimethyl-1-{[8-(2-oclylcyclopropyl)octyl]oxy}-3-(octyloxy)propan-2-amine and (11E,20Z,23Z)—N,N-dimethylnonacosa-11,20,2-trien-10-amine or a pharmaceutically acceptable salt or stereoisomer thereof.

[0514] In one embodiment, the lipid may be a cleavable lipid such as those described in International Publication No. WO2012170889, herein incorporated by reference in its entirety.

[0515] In one embodiment, the cationic lipid may be synthesized by methods known in the art and/or as described in International Publication Nos. WO2012040184, WO2011153120, WO2011149733, WO2011090965, WO2011043913, WO2011022460, WO2012061259, WO2012054365, WO2012044638, WO2010080724 and WO201021865; each of which is herein incorporated by reference in their entirety.

[0516] In one embodiment, the LNP formulations of the polynucleotides, primary constructs and/or mmRNA may contain PEG-c-DOMG at 3% lipid molar ratio. In another embodiment, the LNP formulations polynucleotides, primary constructs and/or mmRNA may contain PEG-c-DOMG at 1.5% lipid molar ratio.

[0517] In one embodiment, the pharmaceutical compositions of the polynucleotides, primary constructs and/or mmRNA may include at least one of the PEGylated lipids described in International Publication No. 2012099755, herein incorporated by reference.

[0518] In one embodiment, the LNP formulation may contain PEG-DMG 2000 (1,2-dimyristoyl-sn-glycero-3-phophoethanolamine-N-[methoxy (polyethylene glycol)-2000). In one embodiment, the LNP formulation may contain PEG-DMG 2000, a cationic lipid known in the art and at least one other component. In another embodiment, the LNP formulation may contain PEG-DMG 2000, a cationic lipid known in the art, DSPC and cholesterol. As a non-limiting example, the LNP formulation may contain PEG-DMG 2000, DLin-DMA, DSPC and cholesterol. As another non-limiting example the LNP formulation may contain PEG-DMG 2000, DLin-DMA, DSPC and cholesterol in a molar ratio of 2:40:10:48 (see e.g., Geall et al., Nonviral delivery of self-amplifying RNA vaccines, PNAS 2012; PMID: 22908294; herein incorporated by reference in its entirety). As another non-limiting example, modified RNA described herein may be formulated in a nanoparticle to be delivered by a parenteral route as described in U.S. Pub. No. 20120207845; herein incorporated by reference in its entirety.

[0519] In one embodiment, the LNP formulation may be formulated by the methods described in International Publication Nos. WO2011127255 or WO2008103276, each of which is herein incorporated by reference in their entirety. As a non-limiting example, modified RNA described herein may be encapsulated in LNP formulations as described in WO2011127255 and/or WO2008103276; each of which is herein incorporated by reference in their entirety.

[0520] In one embodiment, LNP formulations described herein may comprise a polycationic composition. As a non-limiting example, the polycationic composition may be selected from formula 1-60 of US Patent Publication No. US20050222064; herein incorporated by reference in its entirety. In another embodiment, the LNP formulations comprising a polycationic composition may be used for the delivery of the modified RNA described herein in vivo and/or in vitro.

[0521] In one embodiment, the LNP formulations described herein may additionally comprise a permeability enhancer molecule. Non-limiting permeability enhancer molecules are described in US Patent Publication No. US20050222064; herein incorporated by reference in its entirety.

[0522] In one embodiment, the pharmaceutical compositions may be formulated in liposomes such as, but not limited to, DiLa2 liposomes (Marina Biotech, Bothell, WA), SMARTICLES® (Marina Biotech, Bothell, WA), neutral DOPC (1,2-dioleoyl-sn-glycero-3-phosphocholine) based liposomes (e.g., siRNA delivery for ovarian cancer (Landen et al. Cancer Biology & Therapy 2006 5 (12) 1708-1713); herein incorporated by reference in its entirety) and hyaluronan-coated liposomes (Quiet Therapeutics, Israel).

[0523] The nanoparticle formulations may be a carbohydrate nanoparticle comprising a carbohydrate carrier and a modified nucleic acid molecule (e.g., mmRNA). As a non-limiting example, the carbohydrate carrier may include, but is not limited to, an anhydride-modified phytoglycogen or glycogen-type material, phtoglycogen octenyl succinate, phytoglycogen beta-dextrin, anhydride-modified phytoglycogen beta-dextrin. (See e.g., International Publication No. WO2012109121; herein incorporated by reference in its entirety).

[0524] Lipid nanoparticle formulations may be improved by replacing the cationic lipid with a biodegradable cationic lipid which is known as a rapidly eliminated lipid nanoparticle (reLNP). Ionizable cationic lipids, such as, but not limited to, DLinDMA, DLin-KC2-DMA, and DLin-MC3-DMA, have been shown to accumulate in plasma and tissues over time and may be a potential source of toxicity. The rapid metabolism of the rapidly eliminated lipids can improve the tolerability and therapeutic index of the lipid nanoparticles by an order of magnitude from a 1 mg/kg dose to a 10 mg/kg dose in rat. Inclusion of an enzymatically degraded ester linkage can improve the degradation and metabolism profile of the cationic component, while still maintaining the activity of the reLNP formulation. The ester linkage can be internally located within the lipid chain or it may be terminally located at the terminal end of the lipid chain. The internal ester linkage may replace any carbon in the lipid chain.

[0525] In one embodiment, the internal ester linkage may be located on either side of the saturated carbon. Non-limiting examples of reLNPs include,

[chemical structure]

[0526] In one embodiment, an immune response may be elicited by delivering a lipid nanoparticle which may include a nanospecies, a polymer and an immunogen. (U.S. Publication No. 20120189700 and International Publication No. WO2012099805; each of which is herein incorporated by reference in their entirety). The polymer may encapsulate the nanospecies or partially encapsulate the nanospecies. The immunogen may be a recombinant protein, a modified RNA and/or a primary construct described herein. In one embodiment, the lipid nanoparticle may be formulated for use in a vaccine such as, but not limited to, against a pathogen.

[0527] Lipid nanoparticles may be engineered to alter the surface properties of particles so the lipid nanoparticles may penetrate the mucosal barrier. Mucus is located on mucosal tissue such as, but not limited to, oral (e.g., the buccal and esophageal membranes and tonsil tissue), ophthalmic, gastrointestinal (e.g., stomach, small intestine, large intestine, colon, rectum), nasal, respiratory (e.g., nasal, pharyngeal, tracheal and bronchial membranes), genital (e.g., vaginal, cervical and urethral membranes). Nanoparticles larger than 10-200 nm which are preferred for higher drug encapsulation efficiency and the ability to provide the sustained delivery of a wide array of drugs have been thought to be too large to rapidly diffuse through mucosal barriers. Mucus is continuously secreted, shed, discarded or digested and recycled so most of the trapped particles may be removed from the mucosla tissue within seconds or within a few hours. Large polymeric nanoparticles (200 nm-500 nm in diameter) which have been coated densely with a low molecular weight polyethylene glycol (PEG) diffused through mucus only 4 to 6-fold lower than the same particles diffusing in water (Lai et al. PNAS 2007 104 (5): 1482-487; Lai et al. Adv Drug Deliv Rev. 2009 61 (2): 158-171; each of which is herein incorporated by reference in their entirety). The transport of nanoparticles may be determined using rates of permeation and/or fluorescent microscopy techniques including, but not limited to, fluorescence recovery after photobleaching (FRAP) and high resolution multiple particle tracking (MPT). As a non-limiting example, compositions which can penetrate a mucosal barrier may be made as described in U.S. Pat. No. 8,241,670, herein incorporated by reference in its entirety.

[0528] The lipid nanoparticle engineered to penetrate mucus may comprise a polymeric material (i.e. a polymeric core) and/or a polymer-vitamin conjugate and/or a tri-block co-polymer. The polymeric material may include, but is not limited to, polyamines, polyethers, polyamides, polyesters, polycarbamates, polyureas, polycarbonates, poly(styrenes), polyimides, polysulfones, polyurethanes, polyacetylenes, polyethylenes, polyethyeneimines, polyisocyanates, polyacrylates, polymethacrylates, polyacrylonitriles, and polyarylates. The polymeric material may be biodegradable and/or biocompatible. The polymeric material may additionally be irradiated. As a non-limiting example, the polymeric material may be gamma irradiated (See e.g., International App. No. WO201282165, herein incorporated by reference in its entirety). Non-limiting examples of specific polymers include poly(caprolactone) (PCL), ethylene vinyl acetate polymer (EVA), poly(lactic acid) (PLA), poly(L-lactic acid) (PLLA), poly(glycolic acid) (PGA), poly(lactic acid-co-glycolic acid) (PLGA), poly(L-lactic acid-co-glycolic acid) (PLLGA), poly(D,L-lactide) (PDLA), poly(L-lactide) (PLLA), poly(D,L-lactide-co-caprolactone), poly(D,L-lactide-co-caprolactone-co-glycolide), poly(D,L-lactide-co-PEO-co-D,L-lactide), poly(D,L-lactide-co-PPO-co-D,L-lactide), polyalkyl cyanoacralate, polyurethane, poly-L-lysine (PLL), hydroxypropyl methacrylate (HPMA), polyethyleneglycol, poly-L-glutamic acid, poly(hydroxy acids), polyanhydrides, polyorthoesters, poly(ester amides), polyamides, poly(ester ethers), polycarbonates, polyalkylenes such as polyethylene and polypropylene, polyalkylene glycols such as poly(ethylene glycol) (PEG), polyalkylene oxides (PEO), polyalkylene terephthalates such as poly(ethylene terephthalate), polyvinyl alcohols (PVA), polyvinyl ethers, polyvinyl esters such as poly(vinyl acetate), polyvinyl halides such as poly(vinyl chloride) (PVC), polyvinylpyrrolidone, polysiloxanes, polystyrene (PS), polyurethanes, derivatized celluloses such as alkyl celluloses, hydroxyalkyl celluloses, cellulose ethers, cellulose esters, nitro celluloses, hydroxypropylcellulose, carboxymethylcellulose, polymers of acrylic acids, such as poly(methyl(meth)acrylate) (PMMA), poly(ethyl(meth)acrylate), poly(butyl(meth)acrylate), poly(isobutyl(meth)acrylate), poly(hexyl(meth)acrylate), poly(isodecyl(meth)acrylate), poly(lauryl(meth)acrylate), poly(phenyl(meth) acrylate), poly(methyl acrylate), poly(isopropyl acrylate), poly(isobutyl acrylate), poly(octadecyl acrylate) and copolymers and mixtures thereof, polydioxanone and its copolymers, polyhydroxyalkanoates, polypropylene fumarate, polyoxymethylene, poloxamers, poly(ortho) esters, poly(butyric acid), poly(valeric acid), poly(lactide-co-caprolactone), and trimethylene carbonate, polyvinylpyrrolidone. The lipid nanoparticle may be coated or associated with a co-polymer such as, but not limited to, a block co-polymer (such as a branched polyether-polyamide block copolymer described in International Publication No. WO2013012476, herein incorporated by reference in its entirety), and (poly(ethylene glycol))-(poly(propylene oxide))-(poly(ethylene glycol)) triblock copolymer (see e.g., US Publication 20120121718 and US Publication 20100003337 and U.S. Pat. No. 8,263,665; each of which is herein incorporated by reference in their entirety). The co-polymer may be a polymer that is generally regarded as safe (GRAS) and the formation of the lipid nanoparticle may be in such a way that no new chemical entities are created. For example, the lipid nanoparticle may comprise poloxamers coating PLGA nanoparticles without forming new chemical entities which are still able to rapidly penetrate human mucus (Yang et al. Angew. Chem. Int. Ed. 2011 50:2597-2600; herein incorporated by reference in its entirety).

[0529] The vitamin of the polymer-vitamin conjugate may be vitamin E. The vitamin portion of the conjugate may be substituted with other suitable components such as, but not limited to, vitamin A, vitamin E, other vitamins, cholesterol, a hydrophobic moiety, or a hydrophobic component of other surfactants (e.g., sterol chains, fatty acids, hydrocarbon chains and alkylene oxide chains).

[0530] The lipid nanoparticle engineered to penetrate mucus may include surface altering agents such as, but not limited to, mmRNA, anionic proteins (e.g., bovine serum albumin), surfactants (e.g., cationic surfactants such as for example dimethyldioctadecyl-ammonium bromide), sugars or sugar derivatives (e.g., cyclodextrin), nucleic acids, polymers (e.g., heparin, polyethylene glycol and poloxamer), mucolytic agents (e.g., N-acetylcysteine, mugwort, bromelain, papain, clerodendrum, acetylcysteine, bromhexine, carbocisteine, eprazinone, mesna, ambroxol, sobrerol, domiodol, letosteine, stepronin, tiopronin, gelsolin, thymosin β4 dornase alfa, neltenexine, erdosteine) and various DNases including rhDNase. The surface altering agent may be embedded or enmeshed in the particle's surface or disposed (e.g., by coating, adsorption, covalent linkage, or other process) on the surface of the lipid nanoparticle. (see e.g., US Publication 20100215580 and US Publication 20080166414; each of which is herein incorporated by reference in their entirety).

[0531] The mucus penetrating lipid nanoparticles may comprise at least one mmRNA described herein. The mmRNA may be encapsulated in the lipid nanoparticle and/or disposed on the surface of the particle. The mmRNA may be covalently coupled to the lipid nanoparticle. Formulations of mucus penetrating lipid nanoparticles may comprise a plurality of nanoparticles. Further, the formulations may contain particles which may interact with the mucus and alter the structural and/or adhesive properties of the surrounding mucus to decrease mucoadhesion which may increase the delivery of the mucus penetrating lipid nanoparticles to the mucosal tissue.

[0532] In one embodiment, the polynucleotide, primary construct, or mmRNA is formulated as a lipoplex, such as, without limitation, the ATUPLEX™ system, the DACC system, the DBTC system and other siRNA-lipoplex technology from Silence Therapeutics (London, United Kingdom), STEMFECT™ from STEMGENT® (Cambridge, MA), and polyethylenimine (PEI) or protamine-based targeted and non-targeted delivery of nucleic acids acids (Aleku et al. Cancer Res. 2008 68:9788-9798; Strumberg et al. Int J Clin Pharmacol Ther 2012 50:76-78; Santel et al., Gene Ther 2006 13:1222-1234; Santel et al., Gene Ther 2006 13:1360-1370; Gutbier et al., Pulm Pharmacol. Ther. 2010 23:334-344; Kaufmann et al. Microvasc Res 2010 80:286-293 Weide et al. J Immunother. 2009 32:498-507; Weide et al. J Immunother. 2008 31:180-188; Pascolo Expert Opin. Biol. Ther. 4:1285-1294; Fotin-Mleczek et al., 2011 J. Immunother. 34:1-15; Song et al., Nature Biotechnol. 2005, 23:709-717; Peer et al., Proc Natl Acad Sci USA. 2007 6; 104:4095-4100; deFougerolles Hum Gene Ther. 2008 19:125-132; all of which are incorporated herein by reference in its entirety).

[0533] In one embodiment such formulations may also be constructed or compositions altered such that they passively or actively are directed to different cell types in vivo, including but not limited to hepatocytes, immune cells, tumor cells, endothelial cells, antigen presenting cells, and leukocytes (Akinc et al. Mol Ther. 2010 18:1357-1364; Song et al., Nat Biotechnol. 2005 23:709-717; Judge et al., J Clin Invest. 2009 119:661-673; Kaufmann et al., Microvasc Res 2010 80:286-293; Santel et al., Gene Ther 2006 13:1222-1234; Santel et al., Gene Ther 2006 13:1360-1370; Gutbier et al., Pulm Pharmacol. Ther. 2010 23:334-344; Basha et al., Mol. Ther. 2011 19:2186-2200; Fenske and Cullis, Expert Opin Drug Deliv. 2008 5:25-44; Peer et al., Science. 2008 319:627-630; Peer and Lieberman, Gene Ther. 2011 18:1127-1133; all of which are incorporated herein by reference in its entirety). One example of passive targeting of formulations to liver cells includes the DLin-DMA, DLin-KC2-DMA and DLin-MC3-DMA-based lipid nanoparticle formulations which have been shown to bind to apolipoprotein E and promote binding and uptake of these formulations into hepatocytes in vivo (Akinc et al. Mol Ther. 2010 18:1357-1364; herein incorporated by reference in its entirety). Formulations can also be selectively targeted through expression of different ligands on their surface as exemplified by, but not limited by, folate, transferrin, N-acetylgalactosamine (GalNAc), and antibody targeted approaches (Kolhatkar et al., Curr Drug Discov Technol. 2011 8:197-206; Musacchio and Torchilin, Front Biosci. 2011 16:1388-1412; Yu et al., Mol Membr Biol. 2010 27:286-298; Patil et al., Crit Rev Ther Drug Carrier Syst. 2008 25:1-61; Benoit et al., Biomacromolecules. 2011 12:2708-2714; Zhao et al., Expert Opin Drug Deliv. 2008 5:309-319; Akinc et al., Mol Ther. 2010 18:1357-1364; Srinivasan et al., Methods Mol Biol. 2012 820:105-116; Ben-Arie et al., Methods Mol Biol. 2012 757:497-507; Peer 2010 J Control Release. 20:63-68; Peer et al., Proc Natl Acad Sci USA. 2007 104:4095-4100; Kim et al., Methods Mol Biol. 2011 721:339-353; Subramanya et al., Mol Ther. 2010 18:2028-2037; Song et al., Nat Biotechnol. 2005 23:709-717; Peer et al., Science. 2008 319:627-630; Peer and Lieberman, Gene Ther. 2011 18:1127-1133; all of which are incorporated herein by reference in its entirety).

[0534] In one embodiment, the polynucleotide, primary construct, or mmRNA is formulated as a solid lipid nanoparticle. A solid lipid nanoparticle (SLN) may be spherical with an average diameter between 10 to 1000 nm. SLN possess a solid lipid core matrix that can solubilize lipophilic molecules and may be stabilized with surfactants and/or emulsifiers. In a further embodiment, the lipid nanoparticle may be a self-assembly lipid-polymer nanoparticle (see Zhang et al., ACS Nano, 2008, 2 (8), pp 1696-1702; herein incorporated by reference in its entirety).

[0535] Liposomes, lipoplexes, or lipid nanoparticles may be used to improve the efficacy of polynucleotide, primary construct, or mmRNA directed protein production as these formulations may be able to increase cell transfection by the polynucleotide, primary construct, or mmRNA; and/or increase the translation of encoded protein. One such example involves the use of lipid encapsulation to enable the effective systemic delivery of polyplex plasmid DNA (Heyes et al., Mol Ther. 2007 15:713-720; herein incorporated by reference in its entirety). The liposomes, lipoplexes, or lipid nanoparticles may also be used to increase the stability of the polynucleotide, primary construct, or mmRNA.

[0536] In one embodiment, the polynucleotides, primary constructs, and/or the mmRNA of the present invention can be formulated for controlled release and/or targeted delivery. As used herein, “controlled release” refers to a pharmaceutical composition or compound release profile that conforms to a particular pattern of release to effect a therapeutic outcome. In one embodiment, the polynucleotides, primary constructs or the mmRNA may be encapsulated into a delivery agent described herein and/or known in the art for controlled release and/or targeted delivery. As used herein, the term “encapsulate” means to enclose, surround or encase. As it relates to the formulation of the compounds of the invention, encapsulation may be substantial, complete or partial. The term “substantially encapsulated” means that at least greater than 50, 60, 70, 80, 85, 90, 95, 96, 97, 98, 99, 99.9, 99.9 or greater than 99.999% of the pharmaceutical composition or compound of the invention may be enclosed, surrounded or encased within the delivery agent. “Partially encapsulation” means that less than 10, 10, 20, 30, 40 50 or less of the pharmaceutical composition or compound of the invention may be enclosed, surrounded or encased within the delivery agent. Advantageously, encapsulation may be determined by measuring the escape or the activity of the pharmaceutical composition or compound of the invention using fluorescence and/or electron micrograph. For example, at least 1, 5, 10, 20, 30, 40, 50, 60, 70, 80, 85, 90, 95, 96, 97, 98, 99, 99.9, 99.99 or greater than 99.99% of the pharmaceutical composition or compound of the invention are encapsulated in the delivery agent.

[0537] In one embodiment, the controlled release formulation may include, but is not limited to, tri-block co-polymers. As a non-limiting example, the formulation may include two different types of tri-block co-polymers (International Pub. No. WO2012131104 and WO2012131106; each of which is herein incorporated by reference in its entirety).

[0538] In another embodiment, the polynucleotides, primary constructs, or the mmRNA may be encapsulated into a lipid nanoparticle or a rapidly eliminated lipid nanoparticle and the lipid nanoparticles or a rapidly eliminated lipid nanoparticle may then be encapsulated into a polymer, hydrogel and/or surgical sealant described herein and/or known in the art. As a non-limiting example, the polymer, hydrogel or surgical sealant may be PLGA, ethylene vinyl acetate (EVAc), poloxamer, GELSITE® (Nanotherapeutics, Inc. Alachua, FL), HYLENEX® (Halozyme Therapeutics, San Diego CA), surgical sealants such as fibrinogen polymers (Ethicon Inc. Cornelia, GA), TISSELL® (Baxter International, Inc Deerfield, IL), PEG-based sealants, and COSEAL® (Baxter International, Inc Deerfield, IL).

[0539] In another embodiment, the lipid nanoparticle may be encapsulated into any polymer known in the art which may form a gel when injected into a subject. As another non-limiting example, the lipid nanoparticle may be encapsulated into a polymer matrix which may be biodegradable.

[0540] In one embodiment, the polynucleotide, primary construct, or mmRNA formulation for controlled release and/or targeted delivery may also include at least one controlled release coating. Controlled release coatings include, but are not limited to, OPADRY®, polyvinylpyrrolidone/vinyl acetate copolymer, polyvinylpyrrolidone, hydroxypropyl methylcellulose, hydroxypropyl cellulose, hydroxyethyl cellulose, EUDRAGIT RL®, EUDRAGIT RS® and cellulose derivatives such as ethylcellulose aqueous dispersions (AQUACOAT® and SURELEASE®).

[0541] In one embodiment, the controlled release and/or targeted delivery formulation may comprise at least one degradable polyester which may contain polycationic side chains. Degradeable polyesters include, but are not limited to, poly(serine ester), poly(L-lactide-co-L-lysine), poly(4-hydroxy-L-proline ester), and combinations thereof. In another embodiment, the degradable polyesters may include a PEG conjugation to form a PEGylated polymer.

[0542] In one embodiment, the polynucleotides, primary constructs, and/or the mmRNA of the present invention may be encapsulated in a therapeutic nanoparticle. Therapeutic nanoparticles may be formulated by methods described herein and known in the art such as, but not limited to, International Pub Nos. WO2010005740, WO2010030763, WO2010005721, WO2010005723, WO2012054923, US Pub. Nos. US20110262491, US20100104645, US20100087337, US20100068285, US20110274759, US20100068286 and US20120288541 and U.S. Pat. Nos. 8,206,747, 8,293,276, 8,318,208 and 8,318,211 each of which is herein incorporated by reference in their entirety. In another embodiment, therapeutic polymer nanoparticles may be identified by the methods described in US Pub No. US20120140790, herein incorporated by reference in its entirety.

[0543] In one embodiment, the therapeutic nanoparticle may be formulated for sustained release. As used herein, “sustained release” refers to a pharmaceutical composition or compound that conforms to a release rate over a specific period of time. The period of time may include, but is not limited to, hours, days, weeks, months and years. As a non-limiting example, the sustained release nanoparticle may comprise a polymer and a therapeutic agent such as, but not limited to, the polynucleotides, primary constructs, and mmRNA of the present invention (see International Pub No. 2010075072 and US Pub No. US20100216804, US20110217377 and US20120201859, each of which is herein incorporated by reference in their entirety).

[0544] In one embodiment, the therapeutic nanoparticles may be formulated to be target specific. As a non-limiting example, the therapeutic nanoparticles may include a corticosteroid (see International Pub. No. WO2011084518; herein incorporated by reference in its entirety). In one embodiment, the therapeutic nanoparticles may be formulated to be cancer specific. As a non-limiting example, the therapeutic nanoparticles may be formulated in nanoparticles described in International Pub No. WO2008121949, WO2010005726, WO2010005725, WO2011084521 and US Pub No. US20100069426, US20120004293 and US20100104655, each of which is herein incorporated by reference in their entirety.

[0545] In one embodiment, the nanoparticles of the present invention may comprise a polymeric matrix. As a non-limiting example, the nanoparticle may comprise two or more polymers such as, but not limited to, polyethylenes, polycarbonates, polyanhydrides, polyhydroxyacids, polypropylfumerates, polycaprolactones, polyamides, polyacetals, polyethers, polyesters, poly(orthoesters), polycyanoacrylates, polyvinyl alcohols, polyurethanes, polyphosphazenes, polyacrylates, polymethacrylates, polycyanoacrylates, polyureas, polystyrenes, polyamines, polylysine, poly(ethylene imine), poly(serine ester), poly(L-lactide-co-L-lysine), poly(4-hydroxy-L-proline ester) or combinations thereof.

[0546] In one embodiment, the therapeutic nanoparticle comprises a diblock copolymer. In one embodiment, the diblock copolymer may include PEG in combination with a polymer such as, but not limited to, polyethylenes, polycarbonates, polyanhydrides, polyhydroxyacids, polypropylfumerates, polycaprolactones, polyamides, polyacetals, polyethers, polyesters, poly(orthoesters), polycyanoacrylates, polyvinyl alcohols, polyurethanes, polyphosphazenes, polyacrylates, polymethacrylates, polycyanoacrylates, polyureas, polystyrenes, polyamines, polylysine, poly(ethylene imine), poly(serine ester), poly(L-lactide-co-L-lysine), poly(4-hydroxy-L-proline ester) or combinations thereof.

[0547] As a non-limiting example the therapeutic nanoparticle comprises a PLGA-PEG block copolymer (see US Pub. No. US20120004293 and U.S. Pat. No. 8,236,330, each of which is herein incorporated by reference in their entirety). In another non-limiting example, the therapeutic nanoparticle is a stealth nanoparticle comprising a diblock copolymer of PEG and PLA or PEG and PLGA (see U.S. Pat. No. 8,246,968 and International Publication No. WO2012166923, each of which is herein incorporated by reference in its entirety).

[0548] In one embodiment, the therapeutic nanoparticle may comprise a multiblock copolymer (See e.g., U.S. Pat. Nos. 8,263,665 and 8,287,910; each of which is herein incorporated by reference in its entirety).

[0549] In one embodiment, the block copolymers described herein may be included in a polyion complex comprising a non-polymeric micelle and the block copolymer. (See e.g., U.S. Pub. No. 20120076836; herein incorporated by reference in its entirety).

[0550] In one embodiment, the therapeutic nanoparticle may comprise at least one acrylic polymer. Acrylic polymers include but are not limited to, acrylic acid, methacrylic acid, acrylic acid and methacrylic acid copolymers, methyl methacrylate copolymers, ethoxyethyl methacrylates, cyanoethyl methacrylate, amino alkyl methacrylate copolymer, poly(acrylic acid), poly(methacrylic acid), polycyanoacrylates and combinations thereof.

[0551] In one embodiment, the therapeutic nanoparticles may comprise at least one cationic polymer described herein and/or known in the art.

[0552] In one embodiment, the therapeutic nanoparticles may comprise at least one amine-containing polymer such as, but not limited to polylysine, polyethylene imine, poly(amidoamine) dendrimers, poly(beta-amino esters) (See e.g., U.S. Pat. No. 8,287,849; herein incorporated by reference in its entirety) and combinations thereof.

[0553] In one embodiment, the therapeutic nanoparticles may comprise at least one degradable polyester which may contain polycationic side chains. Degradeable polyesters include, but are not limited to, poly(serine ester), poly(L-lactide-co-L-lysine), poly(4-hydroxy-L-proline ester), and combinations thereof. In another embodiment, the degradable polyesters may include a PEG conjugation to form a PEGylated polymer.

[0554] In another embodiment, the therapeutic nanoparticle may include a conjugation of at least one targeting ligand. The targeting ligand may be any ligand known in the art such as, but not limited to, a monoclonal antibody. (Kirpotin et al, Cancer Res. 2006 66:6732-6740; herein incorporated by reference in its entirety).

[0555] In one embodiment, the therapeutic nanoparticle may be formulated in an aqueous solution which may be used to target cancer (see International Pub No. WO2011084513 and US Pub No. US20110294717, each of which is herein incorporated by reference in their entirety).

[0556] In one embodiment, the polynucleotides, primary constructs, or mmRNA may be encapsulated in, linked to and/or associated with synthetic nanocarriers. Synthetic nanocarriers include, but are not limited to, those described in International Pub. Nos. WO2010005740, WO2010030763, WO201213501, WO2012149252, WO2012149255, WO2012149259, WO2012149265, WO2012149268, WO2012149282, WO2012149301, WO2012149393, WO2012149405, WO2012149411, WO2012149454 and WO2013019669, and US Pub. Nos. US20110262491, US20100104645, US20100087337 and US20120244222, each of which is herein incorporated by reference in their entirety. The synthetic nanocarriers may be formulated using methods known in the art and/or described herein. As a non-limiting example, the synthetic nanocarriers may be formulated by the methods described in International Pub Nos. WO2010005740, WO2010030763 and WO201213501 and US Pub. Nos. US20110262491, US20100104645, US20100087337 and US2012024422, each of which is herein incorporated by reference in their entirety. In another embodiment, the synthetic nanocarrier formulations may be lyophilized by methods described in International Pub. No. WO2011072218 and U.S. Pat. No. 8,211,473; each of which is herein incorporated by reference in their entirety.

[0557] In one embodiment, the synthetic nanocarriers may contain reactive groups to release the polynucleotides, primary constructs and/or mmRNA described herein (see International Pub. No. WO20120952552 and US Pub No. US20120171229, each of which is herein incorporated by reference in their entirety).

[0558] In one embodiment, the synthetic nanocarriers may contain an immunostimulatory agent to enhance the immune response from delivery of the synthetic nanocarrier. As a non-limiting example, the synthetic nanocarrier may comprise a Th1 immunostimulatory agent which may enhance a Th1-based response of the immune system (see International Pub No. WO2010123569 and US Pub. No. US20110223201, each of which is herein incorporated by reference in its entirety).

[0559] In one embodiment, the synthetic nanocarriers may be formulated for targeted release. In one embodiment, the synthetic nanocarrier is formulated to release the polynucleotides, primary constructs and/or mmRNA at a specified pH and/or after a desired time interval. As a non-limiting example, the synthetic nanoparticle may be formulated to release the polynucleotides, primary constructs and/or mmRNA after 24 hours and/or at a pH of 4.5 (see International Pub. Nos. WO2010138193 and WO2010138194 and US Pub Nos. US20110020388 and US20110027217, each of which is herein incorporated by reference in their entireties).

[0560] In one embodiment, the synthetic nanocarriers may be formulated for controlled and/or sustained release of the polynucleotides, primary constructs and/or mmRNA described herein. As a non-limiting example, the synthetic nanocarriers for sustained release may be formulated by methods known in the art, described herein and/or as described in International Pub No. WO2010138192 and US Pub No. 20100303850, each of which is herein incorporated by reference in their entirety.

[0561] In one embodiment, the synthetic nanocarrier may be formulated for use as a vaccine. In one embodiment, the synthetic nanocarrier may encapsulate at least one polynucleotide, primary construct and/or mmRNA which encode at least one antigen. As a non-limiting example, the synthetic nanocarrier may include at least one antigen and an excipient for a vaccine dosage form (see International Pub No. WO2011150264 and US Pub No. US20110293723, each of which is herein incorporated by reference in their entirety). As another non-limiting example, a vaccine dosage form may include at least two synthetic nanocarriers with the same or different antigens and an excipient (see International Pub No. WO2011150249 and US Pub No. US20110293701, each of which is herein incorporated by reference in their entirety). The vaccine dosage form may be selected by methods described herein, known in the art and/or described in International Pub No. WO2011150258 and US Pub No. US20120027806, each of which is herein incorporated by reference in their entirety).

[0562] In one embodiment, the synthetic nanocarrier may comprise at least one polynucleotide, primary construct and/or mmRNA which encodes at least one adjuvant. As non-limiting example, the adjuvant may comprise dimethyldioctadecylammonium-bromide, dimethyldioctadecylammonium-chloride, dimethyldioctadecylammonium-phosphate or dimethyldioctadecylammonium-acetate (DDA) and an apolar fraction or part of said apolar fraction of a total lipid extract of a mycobacterium (See e.g, U.S. Pat. No. 8,241,610; herein incorporated by reference in its entirety). In another embodiment, the synthetic nanocarrier may comprise at least one polynucleotide, primary construct and/or mmRNA and an adjuvant. As a non-limiting example, the synthetic nanocarrier comprising and adjuvant may be formulated by the methods described in International Pub No. WO2011150240 and US Pub No. US20110293700, each of which is herein incorporated by reference in its entirety.

[0563] In one embodiment, the synthetic nanocarrier may encapsulate at least one polynucleotide, primary construct and/or mmRNA which encodes a peptide, fragment or region from a virus. As a non-limiting example, the synthetic nanocarrier may include, but is not limited to, the nanocarriers described in International Pub No. WO2012024621, WO201202629, WO2012024632 and US Pub No. US20120064110, US20120058153 and US20120058154, each of which is herein incorporated by reference in their entirety.

[0564] In one embodiment, the synthetic nanocarrier may be coupled to a polynucleotide, primary construct or mmRNA which may be able to trigger a humoral and/or cytotoxic T lymphocyte (CTL) response (See e.g., International Publication No. WO2013019669, herein incorporated by reference in its entirety).

[0565] In one embodiment, the nanoparticle may be optimized for oral administration. The nanoparticle may comprise at least one cationic biopolymer such as, but not limited to, chitosan or a derivative thereof. As a non-limiting example, the nanoparticle may be formulated by the methods described in U.S. Pub. No. 20120282343; herein incorporated by reference in its entirety.

### Polymers, Biodegradable Nanoparticles, and Core-Shell Nanoparticles

[0566] The polynucleotide, primary construct, and mmRNA of the invention can be formulated using natural and/or synthetic polymers. Non-limiting examples of polymers which may be used for delivery include, but are not limited to, DYNAMIC POLYCONJUGATE® (Arrowhead Reasearch Corp., Pasadena, CA) formulations from MIRUS® Bio (Madison, WI) and Roche Madison (Madison, WI), PHASERX™ polymer formulations such as, without limitation, SMARTT POLYMER TECHNOLOGY™ (PHASERX®, Seattle, WA), DMRI/DOPE, poloxamer, VAXFECTIN® adjuvant from Vical (San Diego, CA), chitosan, cyclodextrin from Calando Pharmaceuticals (Pasadena, CA), dendrimers and poly(lactic-co-glycolic acid) (PLGA) polymers. RONDEL™ (RNAi/Oligonucleotide Nanoparticle Delivery) polymers (Arrowhead Research Corporation, Pasadena, CA) and pH responsive co-block polymers such as, but not limited to, PHASERX® (Seattle, WA).

[0567] A non-limiting example of chitosan formulation includes a core of positively charged chitosan and an outer portion of negatively charged substrate (U.S. Pub. No. 20120258176; herein incorporated by reference in its entirety). Chitosan includes, but is not limited to N-trimethyl chitosan, mono-N-carboxymethyl chitosan (MCC), N-palmitoyl chitosan (NPCS), EDTA-chitosan, low molecular weight chitosan, chitosan derivatives, or combinations thereof.

[0568] In one embodiment, the polymers used in the present invention have undergone processing to reduce and/or inhibit the attachment of unwanted substances such as, but not limited to, bacteria, to the surface of the polymer. The polymer may be processed by methods known and/or described in the art and/or described in International Pub. No. WO2012150467, herein incorporated by reference in its entirety.

[0569] A non-limiting example of PLGA formulations include, but are not limited to, PLGA injectable depots (e.g., ELIGARD® which is formed by dissolving PLGA in 66% N-methyl-2-pyrrolidone (NMP) and the remainder being aqueous solvent and leuprolide. Once injected, the PLGA and leuprolide peptide precipitates into the subcutaneous space).

[0570] Many of these polymer approaches have demonstrated efficacy in delivering oligonucleotides in vivo into the cell cytoplasm (reviewed in deFougerolles Hum Gene Ther. 2008 19:125-132; herein incorporated by reference in its entirety). Two polymer approaches that have yielded robust in vivo delivery of nucleic acids, in this case with small interfering RNA (siRNA), are dynamic polyconjugates and cyclodextrin-based nanoparticles. The first of these delivery approaches uses dynamic polyconjugates and has been shown in vivo in mice to effectively deliver siRNA and silence endogenous target mRNA in hepatocytes (Rozema et al., Proc Natl Acad Sci USA. 2007 104:12982-12887; herein incorporated by reference in its entirety). This particular approach is a multicomponent polymer system whose key features include a membrane-active polymer to which nucleic acid, in this case siRNA, is covalently coupled via a disulfide bond and where both PEG (for charge masking) and N-acetylgalactosamine (for hepatocyte targeting) groups are linked via pH-sensitive bonds (Rozema et al., Proc Natl Acad Sci USA. 2007 104:12982-12887; herein incorporated by reference in its entirety). On binding to the hepatocyte and entry into the endosome, the polymer complex disassembles in the low-pH environment, with the polymer exposing its positive charge, leading to endosomal escape and cytoplasmic release of the siRNA from the polymer. Through replacement of the N-acetylgalactosamine group with a mannose group, it was shown one could alter targeting from asialoglycoprotein receptor-expressing hepatocytes to sinusoidal endothelium and Kupffer cells. Another polymer approach involves using transferrin-targeted cyclodextrin-containing polycation nanoparticles. These nanoparticles have demonstrated targeted silencing of the EWS-FL11 gene product in transferrin receptor-expressing Ewing's sarcoma tumor cells (Hu-Lieskovan et al., Cancer Res. 2005 65:8984-8982; herein incorporated by reference in its entirety) and siRNA formulated in these nanoparticles was well tolerated in non-human primates (Heidel et al., Proc Natl Acad Sci USA 2007 104:5715-21; herein incorporated by reference in its entirety). Both of these delivery strategies incorporate rational approaches using both targeted delivery and endosomal escape mechanisms.

[0571] The polymer formulation can permit the sustained or delayed release of polynucleotide, primary construct, or mmRNA (e.g., following intramuscular or subcutaneous injection). The altered release profile for the polynucleotide, primary construct, or mmRNA can result in, for example, translation of an encoded protein over an extended period of time. The polymer formulation may also be used to increase the stability of the polynucleotide, primary construct, or mmRNA. Biodegradable polymers have been previously used to protect nucleic acids other than mmRNA from degradation and been shown to result in sustained release of payloads in vivo (Rozema et al., Proc Natl Acad Sci USA. 2007 104:12982-12887; Sullivan et al., Expert Opin Drug Deliv. 2010 7:1433-1446; Convertine et al., Biomacromolecules. 2010 Oct. 1; Chu et al., Acc Chem Res. 2012 Jan. 13; Manganiello et al., Biomaterials. 2012 33:2301-2309; Benoit et al., Biomacromolecules. 2011 12:2708-2714; Singha et al., Nucleic Acid Ther. 2011 2:133-147; deFougerolles Hum Gene Ther. 2008 19:125-132; Schaffert and Wagner, Gene Ther. 2008 16:1131-1138; Chaturvedi et al., Expert Opin Drug Deliv. 2011 8:1455-1468; Davis, Mol Pharm. 2009 6:659-668; Davis, Nature 2010 464:1067-1070; each of which is herein incorporated by reference in its entirety).

[0572] In one embodiment, the pharmaceutical compositions may be sustained release formulations. In a further embodiment, the sustained release formulations may be for subcutaneous delivery. Sustained release formulations may include, but are not limited to, PLGA microspheres, ethylene vinyl acetate (EVAc), poloxamer, GELSITE® (Nanotherapeutics, Inc. Alachua, FL), HYLENEX® (Halozyme Therapeutics, San Diego CA), surgical sealants such as fibrinogen polymers (Ethicon Inc. Cornelia, GA), TISSELL® (Baxter International, Inc Deerfield, IL), PEG-based sealants, and COSEAL® (Baxter International, Inc Deerfield, IL).

[0573] As a non-limiting example modified mRNA may be formulated in PLGA microspheres by preparing the PLGA microspheres with tunable release rates (e.g., days and weeks) and encapsulating the modified mRNA in the PLGA microspheres while maintaining the integrity of the modified mRNA during the encapsulation process. EVAc are non-biodegradeable, biocompatible polymers which are used extensively in pre-clinical sustained release implant applications (e.g., extended release products Ocusert a pilocarpine ophthalmic insert for glaucoma or progestasert a sustained release progesterone intrauterine deivce; transdermal delivery systems Testoderm, Duragesic and Selegiline; catheters). Poloxamer F-407 NF is a hydrophilic, non-ionic surfactant triblock copolymer of polyoxyethylene-polyoxypropylene-polyoxyethylene having a low viscosity at temperatures less than 5° C. and forms a solid gel at temperatures greater than 15° C. PEG-based surgical sealants comprise two synthetic PEG components mixed in a delivery device which can be prepared in one minute, seals in 3 minutes and is reabsorbed within 30 days. GELSITE® and natural polymers are capable of in-situ gelation at the site of administration. They have been shown to interact with protein and peptide therapeutic candidates through ionic interaction to provide a stabilizing effect.

[0574] Polymer formulations can also be selectively targeted through expression of different ligands as exemplified by, but not limited by, folate, transferrin, and N-acetylgalactosamine (GalNAc) (Benoit et al., Biomacromolecules. 2011 12:2708-2714; Rozema et al., Proc Natl Acad Sci USA. 2007 104:12982-12887; Davis, Mol Pharm. 2009 6:659-668; Davis, Nature 2010 464:1067-1070; each of which is herein incorporated by reference in its entirety).

[0575] The modified nucleic acid, and mmRNA of the invention may be formulated with or in a polymeric compound. The polymer may include at least one polymer such as, but not limited to, polyethenes, polyethylene glycol (PEG), poly(1-lysine) (PLL), PEG grafted to PLL, cationic lipopolymer, biodegradable cationic lipopolymer, polyethyleneimine (PEI), cross-linked branched poly(alkylene imines), a polyamine derivative, a modified poloxamer, a biodegradable polymer, elastic biodegradable polymer, biodegradable block copolymer, biodegradable random copolymer, biodegradable polyester copolymer, biodegradable polyester block copolymer, biodegradable polyester block random copolymer, multiblock copolymers, linear biodegradable copolymer, poly[α-(4-aminobutyl)-L-glycolic acid) (PAGA), biodegradable cross-linked cationic multi-block copolymers, polycarbonates, polyanhydrides, polyhydroxyacids, polypropylfumerates, polycaprolactones, polyamides, polyacetals, polyethers, polyesters, poly(orthoesters), polycyanoacrylates, polyvinyl alcohols, polyurethanes, polyphosphazenes, polyacrylates, polymethacrylates, polycyanoacrylates, polyureas, polystyrenes, polyamines, polylysine, poly(ethylene imine), poly(serine ester), poly(L-lactide-co-L-lysine), poly(4-hydroxy-L-proline ester), acrylic polymers, amine-containing polymers, dextran polymers, dextran polymer derivatives or combinations thereof.

[0576] As a non-limiting example, the modified nucleic acid or mmRNA of the invention may be formulated with the polymeric compound of PEG grafted with PLL as described in U.S. Pat. No. 6,177,274; herein incorporated by reference in its entirety. The formulation may be used for transfecting cells in vitro or for in vivo delivery of the modified nucleic acid and mmRNA. In another example, the modified nucleic acid and mmRNA may be suspended in a solution or medium with a cationic polymer, in a dry pharmaceutical composition or in a solution that is capable of being dried as described in U.S. Pub. Nos. 20090042829 and 20090042825; each of which are herein incorporated by reference in their entireties.

[0577] As another non-limiting example the polynucleotides, primary constructs or mmRNA of the invention may be formulated with a PLGA-PEG block copolymer (see US Pub. No. US20120004293 and U.S. Pat. No. 8,236,330, herein incorporated by reference in their entireties) or PLGA-PEG-PLGA block copolymers (See U.S. Pat. No. 6,004,573, herein incorporated by reference in its entirety). As a non-limiting example, the polynucleotides, primary constructs or mmRNA of the invention may be formulated with a diblock copolymer of PEG and PLA or PEG and PLGA (see U.S. Pat. No. 8,246,968, herein incorporated by reference in its entirety).

[0578] A polyamine derivative may be used to deliver nucleic acids or to treat and/or prevent a disease or to be included in an implantable or injectable device (U.S. Pub. No. 20100260817 herein incorporated by reference in its entirety). As a non-limiting example, a pharmaceutical composition may include the modified nucleic acids and mmRNA and the polyamine derivative described in U.S. Pub. No. 20100260817 (the contents of which are incorporated herein by reference in its entirety. As a non-limiting example the polynucleotides, primary constructs and mmRNA of the present invention may be delivered using a polyaminde polymer such as, but not limited to, a polymer comprising a 1,3-dipolar addition polymer prepared by combining a carbohydrate diazide monomer with a dilkyne unite comprising oligoamines (U.S. Pat. No. 8,236,280; herein incorporated by reference in its entirety).

[0579] In one embodiment, the polynucleotides, primary constructs or mmRNA of the present invention may be formulated with at least one polymer and/or derivatives thereof described in International Publication Nos. WO2011115862, WO2012082574 and WO2012068187 and U.S. Pub. No. 20120283427, each of which are herein incorporated by reference in their entireties. In another embodiment, the modified nucleic acid or mmRNA of the present invention may be formulated with a polymer of formula Z as described in WO2011115862, herein incorporated by reference in its entirety. In yet another embodiment, the modified nucleic acid or mmRNA may be formulated with a polymer of formula Z, Z′ or Z″ as described in International Pub. Nos. WO2012082574 or WO2012068187 and U.S. Pub. No. 2012028342, each of which are herein incorporated by reference in their entireties. The polymers formulated with the modified RNA of the present invention may be synthesized by the methods described in International Pub. Nos. WO2012082574 or WO2012068187, each of which are herein incorporated by reference in their entireties.

[0580] The polynucleotides, primary constructs or mmRNA of the invention may be formulated with at least one acrylic polymer. Acrylic polymers include but are not limited to, acrylic acid, methacrylic acid, acrylic acid and methacrylic acid copolymers, methyl methacrylate copolymers, ethoxyethyl methacrylates, cyanoethyl methacrylate, amino alkyl methacrylate copolymer, poly(acrylic acid), poly(methacrylic acid), polycyanoacrylates and combinations thereof.

[0581] Formulations of polynucleotides, primary constructs or mmRNA of the invention may include at least one amine-containing polymer such as, but not limited to polylysine, polyethylene imine, poly(amidoamine) dendrimers or combinations thereof.

[0582] For example, the modified nucleic acid or mmRNA of the invention may be formulated in a pharmaceutical compound including a poly(alkylene imine), a biodegradable cationic lipopolymer, a biodegradable block copolymer, a biodegradable polymer, or a biodegradable random copolymer, a biodegradable polyester block copolymer, a biodegradable polyester polymer, a biodegradable polyester random copolymer, a linear biodegradable copolymer, PAGA, a biodegradable cross-linked cationic multi-block copolymer or combinations thereof. The biodegradable cationic lipopolymer may be made by methods known in the art and/or described in U.S. Pat. No. 6,696,038, U.S. application Ser. Nos. 20/030,073619 and 20040142474 each of which is herein incorporated by reference in their entireties. The poly(alkylene imine) may be made using methods known in the art and/or as described in U.S. Pub. No. 20100004315, herein incorporated by reference in its entirety. The biodegradable polymer, biodegradable block copolymer, the biodegradable random copolymer, biodegradable polyester block copolymer, biodegradable polyester polymer, or biodegradable polyester random copolymer may be made using methods known in the art and/or as described in U.S. Pat. Nos. 6,517,869 and 6,267,987, the contents of which are each incorporated herein by reference in their entirety. The linear biodegradable copolymer may be made using methods known in the art and/or as described in U.S. Pat. No. 6,652,886. The PAGA polymer may be made using methods known in the art and/or as described in U.S. Pat. No. 6,217,912 herein incorporated by reference in its entirety. The PAGA polymer may be copolymerized to form a copolymer or block copolymer with polymers such as but not limited to, poly-L-lysine, polyargine, polyornithine, histones, avidin, protamines, polylactides and poly(lactide-co-glycolides). The biodegradable cross-linked cationic multi-block copolymers may be made my methods known in the art and/or as described in U.S. Pat. No. 8,057,821 or U.S. Pub. No. 2012009145 each of which are herein incorporated by reference in their entireties. For example, the multi-block copolymers may be synthesized using linear polyethyleneimine (LPEI) blocks which have distinct patterns as compared to branched polyethyleneimines. Further, the composition or pharmaceutical composition may be made by the methods known in the art, described herein, or as described in U.S. Pub. No. 20100004315 or U.S. Pat. Nos. 6,267,987 and 6,217,912 each of which are herein incorporated by reference in their entireties.

[0583] The polynucleotides, primary constructs, and mmRNA of the invention may be formulated with at least one degradable polyester which may contain polycationic side chains. Degradable polyesters include, but are not limited to, poly(serine ester), poly(L-lactide-co-L-lysine), poly(4-hydroxy-L-proline ester), and combinations thereof. In another embodiment, the degradable polyesters may include a PEG conjugation to form a PEGylated polymer.

[0584] The polynucleotides, primary construct, mmRNA of the invention may be formulated with at least one crosslinkable polyester. Crosslinkable polyesters include those known in the art and described in US Pub. No. 20120269761, herein incorporated by reference in its entirety.

[0585] In one embodiment, the polymers described herein may be conjugated to a lipid-terminating PEG. As a non-limiting example, PLGA may be conjugated to a lipid-terminating PEG forming PLGA-DSPE-PEG. As another non-limiting example, PEG conjugates for use with the present invention are described in International Publication No. WO2008103276, herein incorporated by reference in its entirety. The polymers may be conjugated using a ligand conjugate such as, but not limited to, the conjugates described in U.S. Pat. No. 8,273,363, herein incorporated by reference in its entirety.

[0586] In one embodiment, the modified RNA described herein may be conjugated with another compound. Non-limiting examples of conjugates are described in U.S. Pat. Nos. 7,964,578 and 7,833,992, each of which are herein incorporated by reference in their entireties. In another embodiment, modified RNA of the present invention may be conjugated with conjugates of formula 1-122 as described in U.S. Pat. Nos. 7,964,578 and 7,833,992, each of which are herein incorporated by reference in their entireties. The polynucleotides, primary constructs and/or mmRNA described herein may be conjugated with a metal such as, but not limited to, gold. (See e.g., Giljohann et al. Journ. Amer. Chem. Soc. 2009 131 (6): 2072-2073; herein incorporated by reference in its entirety). In another embodiment, the polynucleotides, primary constructs and/or mmRNA described herein may be conjugated and/or encapsulated in gold-nanoparticles. (International Pub. No. WO201216269 and U.S. Pub. No. 20120302940; each of which is herein incorporated by reference in its entirety).

[0587] As described in U.S. Pub. No. 20100004313, herein incorporated by reference in its entirety, a gene delivery composition may include a nucleotide sequence and a poloxamer. For example, the modified nucleic acid and mmRNA of the present invention may be used in a gene delivery composition with the poloxamer described in U.S. Pub. No. 20100004313.

[0588] In one embodiment, the polymer formulation of the present invention may be stabilized by contacting the polymer formulation, which may include a cationic carrier, with a cationic lipopolymer which may be covalently linked to cholesterol and polyethylene glycol groups. The polymer formulation may be contacted with a cationic lipopolymer using the methods described in U.S. Pub. No. 20090042829 herein incorporated by reference in its entirety. The cationic carrier may include, but is not limited to, polyethylenimine, poly(trimethylenimine), poly(tetramethylenimine), polypropylenimine, aminoglycoside-polyamine, dideoxy-diamino-b-cyclodextrin, spermine, spermidine, poly(2-dimethylamino)ethyl methacrylate, poly(lysine), poly(histidine), poly(arginine), cationized gelatin, dendrimers, chitosan, 1,2-Dioleoyl-3-Trimethylammonium-Propane (DOTAP), N-[1-(2,3-dioleoyloxy)propyl]-N,N,N-trimethylammonium chloride (DOTMA), 1-[2-(oleoyloxy)ethyl]-2-oleyl-3-(2-hydroxyethyl)imidazolinium chloride (DOTIM), 2,3-dioleyloxy-N-[2 (sperminecarboxamido)ethyl]-N,N-dimethyl-1-propanaminium trifluoroacetate (DOSPA), 3B—[N—(N′,N′-Dimethylaminoethane)-carbamoyl]Cholesterol Hydrochloride (DC-Cholesterol HCl) diheptadecylamidoglycyl spermidine (DOGS), N,N-distearyl-N,N-dimethylammonium bromide (DDAB), N-(1,2-dimyristyloxyprop-3-yl)-N,N-dimethyl-N-hydroxyethyl ammonium bromide (DMRIE), N,N-dioleyl-N,N-dimethylammonium chloride DODAC) and combinations thereof.

[0589] The polynucleotides, primary constructs and/or mmRNA of the invention may be formulated in a polyplex of one or more polymers (U.S. Pub. No. 20120237565 and 20120270927; each of which is herein incorporated by reference in its entirety). In one embodiment, the polyplex comprises two or more cationic polymers. The catioinic polymer may comprise a poly(ethylene imine) (PEI) such as linear PEI.

[0590] The polynucleotide, primary construct, and mmRNA of the invention can also be formulated as a nanoparticle using a combination of polymers, lipids, and/or other biodegradable agents, such as, but not limited to, calcium phosphate. Components may be combined in a core-shell, hybrid, and/or layer-by-layer architecture, to allow for fine-tuning of the nanoparticle so to delivery of the polynucleotide, primary construct and mmRNA may be enhanced (Wang et al., Nat Mater. 2006 5:791-796; Fuller et al., Biomaterials. 2008 29:1526-1532; DeKoker et al., Adv Drug Deliv Rev. 2011 63:748-761; Endres et al., Biomaterials. 2011 32:7721-7731; Su et al., Mol Pharm. 2011 Jun. 6; 8 (3): 774-87; herein incorporated by reference in its entirety). As a non-limiting example, the nanoparticle may comprise a plurality of polymers such as, but not limited to hydrophilic-hydrophobic polymers (e.g., PEG-PLGA), hydrophobic polymers (e.g., PEG) and/or hydrophilic polymers (International Pub. No. WO20120225129; herein incorporated by reference in its entirety).

[0591] Biodegradable calcium phosphate nanoparticles in combination with lipids and/or polymers have been shown to deliver polynucleotides, primary constructs and mmRNA in vivo. In one embodiment, a lipid coated calcium phosphate nanoparticle, which may also contain a targeting ligand such as anisamide, may be used to deliver the polynucleotide, primary construct and mmRNA of the present invention. For example, to effectively deliver siRNA in a mouse metastatic lung model a lipid coated calcium phosphate nanoparticle was used (Li et al., J Contr Rel. 2010 142:416-421; Li et al., J Contr Rel. 2012 158:108-114; Yang et al., Mol Ther. 2012 20:609-615; herein incorporated by reference in its entirety). This delivery system combines both a targeted nanoparticle and a component to enhance the endosomal escape, calcium phosphate, in order to improve delivery of the siRNA.

[0592] In one embodiment, calcium phosphate with a PEG-polyanion block copolymer may be used to delivery polynucleotides, primary constructs and mmRNA (Kazikawa et al., J Contr Rel. 2004 97:345-356; Kazikawa et al., J Contr Rel. 2006 111:368-370; herein incorporated by reference in its entirety).

[0593] In one embodiment, a PEG-charge-conversional polymer (Pitella et al., Biomaterials. 2011 32:3106-3114) may be used to form a nanoparticle to deliver the polynucleotides, primary constructs and mmRNA of the present invention. The PEG-charge-conversional polymer may improve upon the PEG-polyanion block copolymers by being cleaved into a polycation at acidic pH, thus enhancing endosomal escape.

[0594] The use of core-shell nanoparticles has additionally focused on a high-throughput approach to synthesize cationic cross-linked nanogel cores and various shells (Siegwart et al., Proc Natl Acad Sci USA. 2011 108:12996-13001). The complexation, delivery, and internalization of the polymeric nanoparticles can be precisely controlled by altering the chemical composition in both the core and shell components of the nanoparticle. For example, the core-shell nanoparticles may efficiently deliver siRNA to mouse hepatocytes after they covalently attach cholesterol to the nanoparticle.

[0595] In one embodiment, a hollow lipid core comprising a middle PLGA layer and an outer neutral lipid layer containing PEG may be used to delivery of the polynucleotide, primary construct and mmRNA of the present invention. As a non-limiting example, in mice bearing a luciferease-expressing tumor, it was determined that the lipid-polymer-lipid hybrid nanoparticle significantly suppressed luciferase expression, as compared to a conventional lipoplex (Shi et al, Angew Chem Int Ed. 2011 50:7027-7031; herein incorporated by reference in its entirety).

[0596] In one embodiment, the lipid nanoparticles may comprise a core of the modified nucleic acid molecules disclosed herein and a polymer shell. The polymer shell may be any of the polymers described herein and are known in the art. In an additional embodiment, the polymer shell may be used to protect the modified nucleic acids in the core.

[0597] Core-shell nanoparticles for use with the modified nucleic acid molecules of the present invention are described and may be formed by the methods described in U.S. Pat. No. 8,313,777 herein incorporated by reference in its entirety.

[0598] In one embodiment, the core-shell nanoparticles may comprise a core of the modified nucleic acid molecules disclosed herein and a polymer shell. The polymer shell may be any of the polymers described herein and are known in the art. In an additional embodiment, the polymer shell may be used to protect the modified nucleic acid molecules in the core. As a non-limiting example, the core-shell nanoparticle may be used to treat an eye disease or disorder (See e.g. US Publication No. 20120321719, herein incorporated by reference in its entirety).

[0599] In one embodiment, the polymer used with the formulations described herein may be a modified polymer (such as, but not limited to, a modified polyacetal) as described in International Publication No. WO2011120053, herein incorporated by reference in its entirety.

### Peptides and Proteins

[0600] The polynucleotide, primary construct, and mmRNA of the invention can be formulated with peptides and/or proteins in order to increase transfection of cells by the polynucleotide, primary construct, or mmRNA. In one embodiment, peptides such as, but not limited to, cell penetrating peptides and proteins and peptides that enable intracellular delivery may be used to deliver pharmaceutical formulations. A non-limiting example of a cell penetrating peptide which may be used with the pharmaceutical formulations of the present invention includes a cell-penetrating peptide sequence attached to polycations that facilitates delivery to the intracellular space, e.g., HIV-derived TAT peptide, penetratins, transportans, or hCT derived cell-penetrating peptides (see, e.g., Caron et al., Mol. Ther. 3 (3): 310-8 (2001); Langel, Cell-Penetrating Peptides: Processes and Applications (CRC Press, Boca Raton FL, 2002); El-Andaloussi et al., Curr. Pharm. Des. 11 (28): 3597-611 (2003); and Deshayes et al., Cell. Mol. Life Sci. 62 (16): 1839-49 (2005), all of which are incorporated herein by reference in their entirety). The compositions can also be formulated to include a cell penetrating agent, e.g., liposomes, which enhance delivery of the compositions to the intracellular space. Polynucleotides, primary constructs, and mmRNA of the invention may be complexed to peptides and/or proteins such as, but not limited to, peptides and/or proteins from Aileron Therapeutics (Cambridge, MA) and Permeon Biologics (Cambridge, MA) in order to enable intracellular delivery (Cronican et al., ACS Chem. Biol. 2010 5:747-752; McNaughton et al., Proc. Natl. Acad. Sci. USA 2009 106:6111-6116; Sawyer, Chem Biol Drug Des. 2009 73:3-6; Verdine and Hilinski, Methods Enzymol. 2012; 503:3-33; all of which are herein incorporated by reference in its entirety).

[0601] In one embodiment, the cell-penetrating polypeptide may comprise a first domain and a second domain. The first domain may comprise a supercharged polypeptide. The second domain may comprise a protein-binding partner. As used herein, “protein-binding partner” includes, but are not limited to, antibodies and functional fragments thereof, scaffold proteins, or peptides. The cell-penetrating polypeptide may further comprise an intracellular binding partner for the protein-binding partner. The cell-penetrating polypeptide may be capable of being secreted from a cell where the polynucleotide, primary construct, or mmRNA may be introduced.

[0602] Formulations of the including peptides or proteins may be used to increase cell transfection by the polynucleotide, primary construct, or mmRNA, alter the biodistribution of the polynucleotide, primary construct, or mmRNA (e.g., by targeting specific tissues or cell types), and/or increase the translation of encoded protein. (See e.g., International Pub. No. WO2012110636; herein incorporated by reference in its entirety).

### Cells

[0603] The polynucleotide, primary construct, and mmRNA of the invention can be transfected ex vivo into cells, which are subsequently transplanted into a subject. As non-limiting examples, the pharmaceutical compositions may include red blood cells to deliver modified RNA to liver and myeloid cells, virosomes to deliver modified RNA in virus-like particles (VLPs), and electroporated cells such as, but not limited to, from MAXCYTE® (Gaithersburg, MD) and from ERYTECH® (Lyon, France) to deliver modified RNA. Examples of use of red blood cells, viral particles and electroporated cells to deliver payloads other than mmRNA have been documented (Godfrin et al., Expert Opin Biol Ther. 2012 12:127-133; Fang et al., Expert Opin Biol Ther. 2012 12:385-389; Hu et al., Proc Natl Acad Sci USA. 2011 108:10980-10985; Lund et al., Pharm Res. 2010 27:400-420; Huckriede et al., J Liposome Res. 2007; 17:39-47; Cusi, Hum Vaccin. 2006 2:1-7; de Jonge et al., Gene Ther. 2006 13:400-411; all of which are herein incorporated by reference in its entirety).

[0604] The polynucleotides, primary constructs and mmRNA may be delivered in synthetic VLPs synthesized by the methods described in International Pub No. WO2011085231 and US Pub No. 20110171248, each of which are herein incorporated by reference in their entireties.

[0605] Cell-based formulations of the polynucleotide, primary construct, and mmRNA of the invention may be used to ensure cell transfection (e.g., in the cellular carrier), alter the biodistribution of the polynucleotide, primary construct, or mmRNA (e.g., by targeting the cell carrier to specific tissues or cell types), and/or increase the translation of encoded protein.

[0606] A variety of methods are known in the art and suitable for introduction of nucleic acid into a cell, including viral and non-viral mediated techniques. Examples of typical non-viral mediated techniques include, but are not limited to, electroporation, calcium phosphate mediated transfer, nucleofection, sonoporation, heat shock, magnetofection, liposome mediated transfer, microinjection, microprojectile mediated transfer (nanoparticles), cationic polymer mediated transfer (DEAE-dextran, polyethylenimine, polyethylene glycol (PEG) and the like) or cell fusion.

[0607] The technique of sonoporation, or cellular sonication, is the use of sound (e.g., ultrasonic frequencies) for modifying the permeability of the cell plasma membrane. Sonoporation methods are known to those in the art and are used to deliver nucleic acids in vivo (Yoon and Park, Expert Opin Drug Deliv. 2010 7:321-330; Postema and Gilja, Curr Pharm Biotechnol. 2007 8:355-361; Newman and Bettinger, Gene Ther. 2007 14:465-475; all herein incorporated by reference in their entirety). Sonoporation methods are known in the art and are also taught for example as it relates to bacteria in US Patent Publication 20100196983 and as it relates to other cell types in, for example, US Patent Publication 20100009424, each of which are incorporated herein by reference in their entirety.

[0608] Electroporation techniques are also well known in the art and are used to deliver nucleic acids in vivo and clinically (Andre et al., Curr Gene Ther. 2010 10:267-280; Chiarella et al., Curr Gene Ther. 2010 10:281-286; Hojman, Curr Gene Ther. 2010 10:128-138; all herein incorporated by reference in their entirety). In one embodiment, polynucleotides, primary constructs or mmRNA may be delivered by electroporation as described in Example 8.

### Hyaluronidase

[0609] The intramuscular or subcutaneous localized injection of polynucleotide, primary construct, or mmRNA of the invention can include hyaluronidase, which catalyzes the hydrolysis of hyaluronan. By catalyzing the hydrolysis of hyaluronan, a constituent of the interstitial barrier, hyaluronidase lowers the viscosity of hyaluronan, thereby increasing tissue permeability (Frost, Expert Opin. Drug Deliv. (2007) 4:427-440; herein incorporated by reference in its entirety). It is useful to speed their dispersion and systemic distribution of encoded proteins produced by transfected cells. Alternatively, the hyaluronidase can be used to increase the number of cells exposed to a polynucleotide, primary construct, or mmRNA of the invention administered intramuscularly or subcutaneously.

### Nanoparticle Mimics

[0610] The polynucleotide, primary construct or mmRNA of the invention may be encapsulated within and/or absorbed to a nanoparticle mimic. A nanoparticle mimic can mimic the delivery function organisms or particles such as, but not limited to, pathogens, viruses, bacteria, fungus, parasites, prions and cells. As a non-limiting example the polynucleotide, primary construct or mmRNA of the invention may be encapsulated in a non-viron particle which can mimic the delivery function of a virus (see International Pub. No. WO2012006376 herein incorporated by reference in its entirety).

### Nanotubes

[0611] The polynucleotides, primary constructs or mmRNA of the invention can be attached or otherwise bound to at least one nanotube such as, but not limited to, rosette nanotubes, rosette nanotubes having twin bases with a linker, carbon nanotubes and/or single-walled carbon nanotubes, The polynucleotides, primary constructs or mmRNA may be bound to the nanotubes through forces such as, but not limited to, steric, ionic, covalent and/or other forces.

[0612] In one embodiment, the nanotube can release one or more polynucleotides, primary constructs or mmRNA into cells. The size and/or the surface structure of at least one nanotube may be altered so as to govern the interaction of the nanotubes within the body and/or to attach or bind to the polynucleotides, primary constructs or mmRNA disclosed herein. In one embodiment, the building block and/or the functional groups attached to the building block of the at least one nanotube may be altered to adjust the dimensions and/or properties of the nanotube. As a non-limiting example, the length of the nanotubes may be altered to hinder the nanotubes from passing through the holes in the walls of normal blood vessels but still small enough to pass through the larger holes in the blood vessels of tumor tissue.

[0613] In one embodiment, at least one nanotube may also be coated with delivery enhancing compounds including polymers, such as, but not limited to, polyethylene glycol. In another embodiment, at least one nanotube and/or the polynucleotides, primary constructs or mmRNA may be mixed with pharmaceutically acceptable excipients and/or delivery vehicles.

[0614] In one embodiment, the polynucleotides, primary constructs or mmRNA are attached and/or otherwise bound to at least one rosette nanotube. The rosette nanotubes may be formed by a process known in the art and/or by the process described in International Publication No. WO2012094304, herein incorporated by reference in its entirety. At least one polynucleotide, primary construct and/or mmRNA may be attached and/or otherwise bound to at least one rosette nanotube by a process as described in International Publication No. WO2012094304, herein incorporated by reference in its entirety, where rosette nanotubes or modules forming rosette nanotubes are mixed in aqueous media with at least one polynucleotide, primary construct and/or mmRNA under conditions which may cause at least one polynucleotide, primary construct or mmRNA to attach or otherwise bind to the rosette nanotubes.

[0615] In one embodiment, the polynucleotides, primary constructs or mmRNA may be attached to and/or otherwise bound to at least one carbon nanotube. As a non-limiting example, the polynucleotides, primary constructs or mmRNA may be bound to a linking agent and the linked agent may be bound to the carbon nanotube (See e.g., U.S. Pat. No. 8,246,995; herein incorporated by reference in its entirety). The carbon nanotube may be a single-walled nanotube (See e.g., U.S. Pat. No. 8,246,995; herein incorporated by reference in its entirety).

### Conjugates

[0616] The polynucleotides, primary constructs, and mmRNA of the invention include conjugates, such as a polynucleotide, primary construct, or mmRNA covalently linked to a carrier or targeting group, or including two encoding regions that together produce a fusion protein (e.g., bearing a targeting group and therapeutic protein or peptide).

[0617] The conjugates of the invention include a naturally occurring substance, such as a protein (e.g., human serum albumin (HSA), low-density lipoprotein (LDL), high-density lipoprotein (HDL), or globulin); an carbohydrate (e.g., a dextran, pullulan, chitin, chitosan, inulin, cyclodextrin or hyaluronic acid); or a lipid. The ligand may also be a recombinant or synthetic molecule, such as a synthetic polymer, e.g., a synthetic polyamino acid, an oligonucleotide (e.g. an aptamer). Examples of polyamino acids include polyamino acid is a polylysine (PLL), poly L-aspartic acid, poly L-glutamic acid, styrene-maleic acid anhydride copolymer, poly(L-lactide-co-glycolied) copolymer, divinyl ether-maleic anhydride copolymer, N-(2-hydroxypropyl) methacrylamide copolymer (HMPA), polyethylene glycol (PEG), polyvinyl alcohol (PVA), polyurethane, poly(2-ethylacryllic acid), N-isopropylacrylamide polymers, or polyphosphazine. Example of polyamines include: polyethylenimine, polylysine (PLL), spermine, spermidine, polyamine, pseudopeptide-polyamine, peptidomimetic polyamine, dendrimer polyamine, arginine, amidine, protamine, cationic lipid, cationic porphyrin, quaternary salt of a polyamine, or an alpha helical peptide.

[0618] Representative U.S. patents that teach the preparation of polynucleotide conjugates, particularly to RNA, include, but are not limited to, U.S. Pat. Nos. 4,828,979; 4,948,882; 5,218,105; 5,525,465; 5,541,313; 5,545,730; 5,552,538; 5,578,717, 5,580,731; 5,591,584; 5,109,124; 5,118,802; 5,138,045; 5,414,077; 5,486,603; 5,512,439; 5,578,718; 5,608,046; 4,587,044; 4,605,735; 4,667,025; 4,762,779; 4,789,737; 4,824,941; 4,835,263; 4,876,335; 4,904,582; 4,958,013; 5,082,830; 5,112,963; 5,214,136; 5,082,830; 5,112,963; 5,214,136; 5,245,022; 5,254,469; 5,258,506; 5,262,536; 5,272,250; 5,292,873; 5,317,098; 5,371,241, 5,391,723; 5,416,203, 5,451,463; 5,510,475; 5,512,667; 5,514,785; 5,565,552; 5,567,810; 5,574,142; 5,585,481; 5,587,371; 5,595,726; 5,597,696; 5,599,923; 5,599,928 and 5,688,941; 6,294,664; 6,320,017; 6,576,752; 6,783,931; 6,900,297; 7,037,646; each of which is herein incorporated by reference in their entireties.

[0619] In one embodiment, the conjugate of the present invention may function as a carrier for the modified nucleic acids and mmRNA of the present invention. The conjugate may comprise a cationic polymer such as, but not limited to, polyamine, polylysine, polyalkylenimine, and polyethylenimine which may be grafted to with poly(ethylene glycol). As a non-limiting example, the conjugate may be similar to the polymeric conjugate and the method of synthesizing the polymeric conjugate described in U.S. Pat. No. 6,586,524 herein incorporated by reference in its entirety.

[0620] The conjugates can also include targeting groups, e.g., a cell or tissue targeting agent, e.g., a lectin, glycoprotein, lipid or protein, e.g., an antibody, that binds to a specified cell type such as a kidney cell. A targeting group can be a thyrotropin, melanotropin, lectin, glycoprotein, surfactant protein A, Mucin carbohydrate, multivalent lactose, multivalent galactose, N-acetyl-galactosamine, N-acetyl-glucosamine multivalent mannose, multivalent fucose, glycosylated polyaminoacids, multivalent galactose, transferrin, bisphosphonate, polyglutamate, polyaspartate, a lipid, cholesterol, a steroid, bile acid, folate, vitamin B12, biotin, an RGD peptide, an RGD peptide mimetic or an aptamer.

[0621] Targeting groups can be proteins, e.g., glycoproteins, or peptides, e.g., molecules having a specific affinity for a co-ligand, or antibodies e.g., an antibody, that binds to a specified cell type such as a cancer cell, endothelial cell, or bone cell. Targeting groups may also include hormones and hormone receptors. They can also include non-peptidic species, such as lipids, lectins, carbohydrates, vitamins, cofactors, multivalent lactose, multivalent galactose, N-acetyl-galactosamine, N-acetyl-glucosamine multivalent mannose, multivalent fucose, or aptamers. The ligand can be, for example, a lipopolysaccharide, or an activator of p38 MAP kinase.

[0622] The targeting group can be any ligand that is capable of targeting a specific receptor. Examples include, without limitation, folate, GalNAc, galactose, mannose, mannose-6P, apatamers, integrin receptor ligands, chemokine receptor ligands, transferrin, biotin, serotonin receptor ligands, PSMA, endothelin, GCPII, somatostatin, LDL, and HDL ligands. In particular embodiments, the targeting group is an aptamer. The aptamer can be unmodified or have any combination of modifications disclosed herein.

[0623] In one embodiment, pharmaceutical compositions of the present invention may include chemical modifications such as, but not limited to, modifications similar to locked nucleic acids.

[0624] Representative U.S. Patents that teach the preparation of locked nucleic acid (LNA) such as those from Santaris, include, but are not limited to, the following: U.S. Pat. Nos. 6,268,490; 6,670,461; 6,794,499; 6,998,484; 7,053,207; 7,084,125; and 7,399,845, each of which is herein incorporated by reference in its entirety.

[0625] Representative U.S. patents that teach the preparation of PNA compounds include, but are not limited to, U.S. Pat. Nos. 5,539,082; 5,714,331; and 5,719,262, each of which is herein incorporated by reference. Further teaching of PNA compounds can be found, for example, in Nielsen et al., Science, 1991, 254, 1497-1500.

[0626] Some embodiments featured in the invention include polynucleotides, primary constructs or mmRNA with phosphorothioate backbones and oligonucleosides with other modified backbones, and in particular —CH₂—NH—CH₂—, —CH₂—N(CH₃)—O—CH₂— [known as a methylene (methylimino) or MMI backbone], —CH₂—O—N(CH₃)—CH₂—, —CH₂—N(CH₃)—N(CH₃)—CH₂— and —N(CH₃)—CH₂—CH₂—[wherein the native phosphodiester backbone is represented as —O—P(O)₂—O—CH₂—] of the above-referenced U.S. Pat. No. 5,489,677, and the amide backbones of the above-referenced U.S. Pat. No. 5,602,240. In some embodiments, the polynucleotides featured herein have morpholino backbone structures of the above-referenced U.S. Pat. No. 5,034,506.

[0627] Modifications at the 2′ position may also aid in delivery. Preferably, modifications at the 2′ position are not located in a polypeptide-coding sequence, i.e., not in a translatable region. Modifications at the 2′ position may be located in a 5′UTR, a 3′UTR and/or a tailing region. Modifications at the 2′ position can include one of the following at the 2′ position: H (i.e., 2′-deoxy); F; O-, S-, or N-alkyl; O-, S-, or N-alkenyl; O-, S- or N-alkynyl; or O-alkyl-O-alkyl, wherein the alkyl, alkenyl and alkynyl may be substituted or unsubstituted C₁ to C₁₀ alkyl or C₂ to C₁₀ alkenyl and alkynyl. Exemplary suitable modifications include O[(CH₂)ₙO]ₘCH³, O(CH₂)·ₙOCH₃, O(CH₂)ₙNH₂, O(CH₂)ₙCH³, O(CH₂)ₙONH₂, and O(CH₂)ₙON[(CH₂)ₙCH₃)]₂, where n and m are from 1 to about 10. In other embodiments, the polynucleotides, primary constructs or mmRNA include one of the following at the 2′ position: C₁ to C₁₀ lower alkyl, substituted lower alkyl, alkaryl, aralkyl, O-alkaryl or O-aralkyl, SH, SCH₃, OCN, Cl, Br, CN, CF₃, OCF₃, SOCH₃, SO₂CH₃, ONO₂, NO₂, N₃, NH₂, heterocycloalkyl, heterocycloalkaryl, aminoalkylamino, polyalkylamino, substituted silyl, an RNA cleaving group, a reporter group, an intercalator, a group for improving the pharmacokinetic properties, or a group for improving the pharmacodynamic properties, and other substituents having similar properties. In some embodiments, the modification includes a 2′-methoxyethoxy (2′-O—CH₂CH₂OCH₃, also known as 2′-O-(2-methoxyethyl) or 2′-MOE) (Martin et al., Helv. Chim. Acta, 1995, 78:486-504) i.e., an alkoxy-alkoxy group. Another exemplary modification is 2′-dimethylaminooxyethoxy, i.e., a O(CH₂)₂ON(CH₃)₂ group, also known as 2′-DMAOE, as described in examples herein below, and 2′-dimethylaminoethoxyethoxy (also known in the art as 2′-O-dimethylaminoethoxyethyl or 2′-DMAEOE), i.e., 2′-O—CH₂—O—CH₂—N(CH₂)₂, also described in examples herein below. Other modifications include 2′-methoxy (2′-OCH₃), 2′-aminopropoxy (2′-OCH₂CH₂CH₂NH₂) and 2′-fluoro (2′-F). Similar modifications may also be made at other positions, particularly the 3′ position of the sugar on the 3′ terminal nucleotide or in 2′-5′ linked dsRNAs and the 5′ position of 5′ terminal nucleotide. Polynucleotides of the invention may also have sugar mimetics such as cyclobutyl moieties in place of the pentofuranosyl sugar. Representative U.S. patents that teach the preparation of such modified sugar structures include, but are not limited to, U.S. Pat. Nos. 4,981,957; 5,118,800; 5,319,080; 5,359,044; 5,393,878; 5,446,137; 5,466,786; 5,514,785; 5,519,134; 5,567,811; 5,576,427; 5,591,722; 5,597,909; 5,610,300; 5,627,053; 5,639,873; 5,646,265; 5,658,873; 5,670,633; and 5,700,920 and each of which is herein incorporated by reference.

[0628] In still other embodiments, the polynucleotide, primary construct, or mmRNA is covalently conjugated to a cell penetrating polypeptide. The cell-penetrating peptide may also include a signal sequence. The conjugates of the invention can be designed to have increased stability; increased cell transfection; and/or altered the biodistribution (e.g., targeted to specific tissues or cell types).

[0629] In one embodiment, the polynucleotides, primary constructs or mmRNA may be conjugated to an agent to enhance delivery. As a non-limiting example, the agent may be a monomer or polymer such as a targeting monomer or a polymer having targeting blocks as described in International Publication No. WO2011062965, herein incorporated by reference in its entirety. In another non-limiting example, the agent may be a transport agent covalently coupled to the polynucleotides, primary constructs or mmRNA of the present invention (See e.g., U.S. Pat. Nos. 6,835,393 and 7,374,778, each of which is herein incorporated by reference in its entirety). In yet another non-limiting example, the agent may be a membrane barrier transport enhancing agent such as those described in U.S. Pat. Nos. 7,737,108 and 8,003,129, each of which is herein incorporated by reference in its entirety.

[0630] In another embodiment, polynucleotides, primary constructs or mmRNA may be conjugated to SMARTT POLYMER TECHNOLOGY® (PHASERX®, Inc. Seattle, WA).

### Self-Assembled Nanoparticles

### Nucleic Acid Self-Assembled Nanoparticles

[0631] Self-assembled nanoparticles have a well-defined size which may be precisely controlled as the nucleic acid strands may be easily reprogrammable. For example, the optimal particle size for a cancer-targeting nanodelivery carrier is 20-100 nm as a diameter greater than 20 nm avoids renal clearance and enhances delivery to certain tumors through enhanced permeability and retention effect. Using self-assembled nucleic acid nanoparticles a single uniform population in size and shape having a precisely controlled spatial orientation and density of cancer-targeting ligands for enhanced delivery. As a non-limiting example, oligonucleotide nanoparticles were prepared using programmable self-assembly of short DNA fragments and therapeutic siRNAs. These nanoparticles are molecularly identical with controllable particle size and target ligand location and density. The DNA fragments and siRNAs self-assembled into a one-step reaction to generate DNA/siRNA tetrahedral nanoparticles for targeted in vivo delivery. (Lee et al., Nature Nanotechnology 2012 7:389-393; herein incorporated by reference in its entirety).

[0632] In one embodiment, the polynucleotides, primary constructs and/or mmRNA disclosed herein may be formulated as self-assembled nanoparticles. As a non-limiting example, nucleic acids may be used to make nanoparticles which may be used in a delivery system for the polynucleotides, primary constructs and/or mmRNA of the present invention (See e.g., International Pub. No. WO2012125987; herein incorporated by reference in its entirety).

[0633] In one embodiment, the nucleic acid self-assembled nanoparticles may comprise a core of the polynucleotides, primary constructs or mmRNA disclosed herein and a polymer shell. The polymer shell may be any of the polymers described herein and are known in the art. In an additional embodiment, the polymer shell may be used to protect the polynucleotides, primary constructs and mmRNA in the core.

### Polymer-Based Self-Assembled Nanoparticles

[0634] Polymers may be used to form sheets which self-assembled into nanoparticles. These nanoparticles may be used to deliver the polynucleotides, primary constructs and mmRNA of the present invention. In one embodiment, these self-assembled nanoparticles may be microsponges formed of long polymers of RNA hairpins which form into crystalline ‘pleated’ sheets before self-assembling into microsponges. These microsponges are densely-packed sponge like microparticles which may function as an efficient carrier and may be able to deliver cargo to a cell. The microsponges may be from 1 um to 300 nm in diameter. The microsponges may be complexed with other agents known in the art to form larger microsponges. As a non-limiting example, the microsponge may be complexed with an agent to form an outer layer to promote cellular uptake such as polycation polyethyleneime (PEI). This complex can form a 250-nm diameter particle that can remain stable at high temperatures (150° C.) (Grabow and Jaegar, Nature Materials 2012, 11:269-269; herein incorporated by reference in its entirety). Additionally these microsponges may be able to exhibit an extraordinary degree of protection from degradation by ribonucleases.

[0635] In another embodiment, the polymer-based self-assembled nanoparticles such as, but not limited to, microsponges, may be fully programmable nanoparticles. The geometry, size and stoichiometry of the nanoparticle may be precisely controlled to create the optimal nanoparticle for delivery of cargo such as, but not limited to, polynucleotides, primary constructs and/or mmRNA.

[0636] In one embodiment, the polymer based nanoparticles may comprise a core of the polynucleotides, primary constructs and/or mmRNA disclosed herein and a polymer shell. The polymer shell may be any of the polymers described herein and are known in the art. In an additional embodiment, the polymer shell may be used to protect the polynucleotides, primary construct and/or mmRNA in the core.

[0637] In yet another embodiment, the polymer based nanoparticle may comprise a non-nucleic acid polymer comprising a plurality of heterogenous monomers such as those described in International Publication No. WO2013009736, herein incorporated by reference in its entirety.

### Inorganic Nanoparticles

[0638] The polynucleotides, primary constructs and/or mmRNAs of the present invention may be formulated in inorganic nanoparticles (U.S. Pat. No. 8,257,745, herein incorporated by reference in its entirety). The inorganic nanoparticles may include, but are not limited to, clay substances that are water swellable. As a non-limiting example, the inorganic nanoparticle may include synthetic smectite clays which are made from simple silicates (See e.g., U.S. Pat. Nos. 5,585,108 and 8,257,745 each of which are herein incorporated by reference in their entirety).

[0639] In one embodiment, the inorganic nanoparticles may comprise a core of the modified nucleic acids disclosed herein and a polymer shell. The polymer shell may be any of the polymers described herein and are known in the art. In an additional embodiment, the polymer shell may be used to protect the modified nucleic acids in the core.

### Semi-Conductive and Metallic Nanoparticles

[0640] The polynucleotides, primary constructs and/or mmRNAs of the present invention may be formulated in water-dispersible nanoparticle comprising a semiconductive or metallic material (U.S. Pub. No. 20120228565; herein incorporated by reference in its entirety) or formed in a magnetic nanoparticle (U.S. Pub. No. 20120265001 and 20120283503; each of which is herein incorporated by reference in its entirety). The water-dispersible nanoparticles may be hydrophobic nanoparticles or hydrophilic nanoparticles.

[0641] In one embodiment, the semi-conductive and/or metallic nanoparticles may comprise a core of the polynucleotides, primary constructs and/or mmRNA disclosed herein and a polymer shell. The polymer shell may be any of the polymers described herein and are known in the art. In an additional embodiment, the polymer shell may be used to protect the polynucleotides, primary constructs and/or mmRNA in the core.

### Gels and Hydrogels

[0642] In one embodiment, the polynucleotides, primary constructs and/or mmRNA disclosed herein may be encapsulated into any hydrogel known in the art which may form a gel when injected into a subject. Hydrogels are a network of polymer chains that are hydrophilic, and are sometimes found as a colloidal gel in which water is the dispersion medium. Hydrogels are highly absorbent (they can contain over 99% water) natural or synthetic polymers. Hydrogels also possess a degree of flexibility very similar to natural tissue, due to their significant water content. The hydrogel described herein may used to encapsulate lipid nanoparticles which are biocompatible, biodegradable and/or porous.

[0643] As a non-limiting example, the hydrogel may be an aptamer-functionalized hydrogel. The aptamer-functionalized hydrogel may be programmed to release one or more polynucleotides, primary constructs and/or mmRNA using nucleic acid hybridization. (Battig et al., J. Am. Chem. Society. 2012 134:12410-12413; herein incorporated by reference in its entirety).

[0644] As another non-limiting example, the hydrogel may be a shaped as an inverted opal.

[0645] The opal hydrogels exhibit higher swelling ratios and the swelling kinetics is an order of magnitude faster as well. Methods of producing opal hydrogels and description of opal hydrogels are described in International Pub. No. WO2012148684, herein incorporated by reference in its entirety.

[0646] In yet another non-limiting example, the hydrogel may be an antibacterial hydrogel. The antibacterial hydrogel may comprise a pharmaceutical acceptable salt or organic material such as, but not limited to pharmaceutical grade and/or medical grade silver salt and aloe vera gel or extract. (International Pub. No. WO2012151438, herein incorporated by reference in its entirety).

[0647] In one embodiment, the modified mRNA may be encapsulated in a lipid nanoparticle and then the lipid nanoparticle may be encapsulated into a hyrdogel.

[0648] In one embodiment, the polynucleotides, primary constructs and/or mmRNA disclosed herein may be encapsulated into any gel known in the art. As a non-limiting example the gel may be a fluorouracil injectable gel or a fluorouracil injectable gel containing a chemical compound and/or drug known in the art. As another example, the polynucleotides, primary constructs and/or mmRNA may be encapsulated in a fluorouracil gel containing epinephrine (See e.g., Smith et al. Cancer Chemotherapy and Pharmacology, 1999 44 (4): 267-274; herein incorporated by reference in its entirety).

[0649] In one embodiment, the polynucleotides, primary constructs and/or mmRNA disclosed herein may be encapsulated into a fibrin gel, fibrin hydrogel or fibrin glue. In another embodiment, the polynucleotides, primary constructs and/or mmRNA may be formulated in a lipid nanoparticle or a rapidly eliminated lipid nanoparticle prior to being encapsulated into a fibrin gel, fibrin hydrogel or a fibrin glue. In yet another embodiment, the polynucleotides, primary constructs and/or mmRNA may be formulated as a lipoplex prior to being encapsulated into a fibrin gel, hydrogel or a fibrin glue. Fibrin gels, hydrogels and glues comprise two components, a fibrinogen solution and a thrombin solution which is rich in calcium (See e.g., Spicer and Mikos, Journal of Controlled Release 2010. 148:49-55; Kidd et al. Journal of Controlled Release 2012. 157:80-85; each of which is herein incorporated by reference in its entirety). The concentration of the components of the fibrin gel, hydrogel and/or glue can be altered to change the characteristics, the network mesh size, and/or the degradation characteristics of the gel, hydrogel and/or glue such as, but not limited to changing the release characteristics of the fibrin gel, hydrogel and/or glue. (See e.g., Spicer and Mikos, Journal of Controlled Release 2010. 148:49-55; Kidd et al. Journal of Controlled Release 2012. 157:80-85; Catelas et al. Tissue Engineering 2008. 14:119-128; each of which is herein incorporated by reference in its entirety). This feature may be advantageous when used to deliver the modified mRNA disclosed herein. (See e.g., Kidd et al. Journal of Controlled Release 2012. 157:80-85; Catelas et al. Tissue Engineering 2008. 14:119-128; each of which is herein incorporated by reference in its entirety).

### Cations and Anions

[0650] Formulations of polynucleotides, primary constructs and/or mmRNA disclosed herein may include cations or anions. In one embodiment, the formulations include metal cations such as, but not limited to, Zn2+, Ca2+, Cu2+, Mg+ and combinations thereof. As a non-limiting example, formulations may include polymers and a polynucleotides, primary constructs and/or mmRNA complexed with a metal cation (See e.g., U.S. Pat. Nos. 6,265,389 and 6,555,525, each of which is herein incorporated by reference in its entirety).

### Molded Nanoparticles and Microparticles

[0651] The polynucleotides, primary constructs and/or mmRNA disclosed herein may be formulated in nanoparticles and/or microparticles. These nanoparticles and/or microparticles may be molded into any size shape and chemistry. As an example, the nanoparticles and/or microparticles may be made using the PRINT® technology by LIQUIDA TECHNOLOGIES® (Morrisville, NC) (See e.g., International Pub. No. WO2007024323; herein incorporated by reference in its entirety).

[0652] In one embodiment, the molded nanoparticles may comprise a core of the polynucleotides, primary constructs and/or mmRNA disclosed herein and a polymer shell. The polymer shell may be any of the polymers described herein and are known in the art. In an additional embodiment, the polymer shell may be used to protect the polynucleotides, primary construct and/or mmRNA in the core.

### NanoJackets and NanoLiposomes

[0653] The polynucleotides, primary constructs and/or mmRNA disclosed herein may be formulated in NanoJackets and NanoLiposomes by Keystone Nano (State College, PA). NanoJackets are made of compounds that are naturally found in the body including calcium, phosphate and may also include a small amount of silicates. Nanojackets may range in size from 5 to 50 nm and may be used to deliver hydrophilic and hydrophobic compounds such as, but not limited to, polynucleotides, primary constructs and/or mmRNA.

[0654] NanoLiposomes are made of lipids such as, but not limited to, lipids which naturally occur in the body. NanoLiposomes may range in size from 60-80 nm and may be used to deliver hydrophilic and hydrophobic compounds such as, but not limited to, polynucleotides, primary constructs and/or mmRNA. In one aspect, the polynucleotides, primary constructs and/or mmRNA disclosed herein are formulated in a NanoLiposome such as, but not limited to, Ceramide NanoLiposomes.

### Excipients

[0655] Pharmaceutical formulations may additionally comprise a pharmaceutically acceptable excipient, which, as used herein, includes any and all solvents, dispersion media, diluents, or other liquid vehicles, dispersion or suspension aids, surface active agents, isotonic agents, thickening or emulsifying agents, preservatives, solid binders, lubricants and the like, as suited to the particular dosage form desired. Remington's The Science and Practice of Pharmacy, 21^{st} Edition, A. R. Gennaro (Lippincott, Williams & Wilkins, Baltimore, MD, 2006; incorporated herein by reference in its entirety) discloses various excipients used in formulating pharmaceutical compositions and known techniques for the preparation thereof. Except insofar as any conventional excipient medium is incompatible with a substance or its derivatives, such as by producing any undesirable biological effect or otherwise interacting in a deleterious manner with any other component(s) of the pharmaceutical composition, its use is contemplated to be within the scope of this invention.

[0656] In some embodiments, a pharmaceutically acceptable excipient is at least 95%, at least 96%, at least 97%, at least 98%, at least 99%, or 100% pure. In some embodiments, an excipient is approved for use in humans and for veterinary use. In some embodiments, an excipient is approved by United States Food and Drug Administration. In some embodiments, an excipient is pharmaceutical grade. In some embodiments, an excipient meets the standards of the United States Pharmacopoeia (USP), the European Pharmacopoeia (EP), the British Pharmacopoeia, and/or the International Pharmacopoeia.

[0657] Pharmaceutically acceptable excipients used in the manufacture of pharmaceutical compositions include, but are not limited to, inert diluents, dispersing and/or granulating agents, surface active agents and/or emulsifiers, disintegrating agents, binding agents, preservatives, buffering agents, lubricating agents, and/or oils. Such excipients may optionally be included in pharmaceutical compositions.

[0658] Exemplary diluents include, but are not limited to, calcium carbonate, sodium carbonate, calcium phosphate, dicalcium phosphate, calcium sulfate, calcium hydrogen phosphate, sodium phosphate lactose, sucrose, cellulose, microcrystalline cellulose, kaolin, mannitol, sorbitol, inositol, sodium chloride, dry starch, cornstarch, powdered sugar, etc., and/or combinations thereof.

[0659] Exemplary granulating and/or dispersing agents include, but are not limited to, potato starch, corn starch, tapioca starch, sodium starch glycolate, clays, alginic acid, guar gum, citrus pulp, agar, bentonite, cellulose and wood products, natural sponge, cation-exchange resins, calcium carbonate, silicates, sodium carbonate, cross-linked poly(vinyl-pyrrolidone) (crospovidone), sodium carboxymethyl starch (sodium starch glycolate), carboxymethyl cellulose, cross-linked sodium carboxymethyl cellulose (croscarmellose), methylcellulose, pregelatinized starch (starch 1500), microcrystalline starch, water insoluble starch, calcium carboxymethyl cellulose, magnesium aluminum silicate (VEEGUM®), sodium lauryl sulfate, quaternary ammonium compounds, etc., and/or combinations thereof.

[0660] Exemplary surface active agents and/or emulsifiers include, but are not limited to, natural emulsifiers (e.g. acacia, agar, alginic acid, sodium alginate, tragacanth, chondrux, cholesterol, xanthan, pectin, gelatin, egg yolk, casein, wool fat, cholesterol, wax, and lecithin), colloidal clays (e.g. bentonite [aluminum silicate] and VEEGUM® [magnesium aluminum silicate]), long chain amino acid derivatives, high molecular weight alcohols (e.g. stearyl alcohol, cetyl alcohol, oleyl alcohol, triacetin monostearate, ethylene glycol distearate, glyceryl monostearate, and propylene glycol monostearate, polyvinyl alcohol), carbomers (e.g. carboxy polymethylene, polyacrylic acid, acrylic acid polymer, and carboxyvinyl polymer), carrageenan, cellulosic derivatives (e.g. carboxymethylcellulose sodium, powdered cellulose, hydroxymethyl cellulose, hydroxypropyl cellulose, hydroxypropyl methylcellulose, methylcellulose), sorbitan fatty acid esters (e.g. polyoxyethylene sorbitan monolaurate [TWEEN®20], polyoxyethylene sorbitan [TWEENn®60], polyoxyethylene sorbitan monooleate [TWEEN®80], sorbitan monopalmitate [SPAN®40], sorbitan monostearate [SPAN®60], sorbitan tristearate [SPAN®65], glyceryl monooleate, sorbitan monooleate [SPAN®80]), polyoxyethylene esters (e.g. polyoxyethylene monostearate [MYRJ®45], polyoxyethylene hydrogenated castor oil, polyethoxylated castor oil, polyoxymethylene stearate, and SOLUTOL®), sucrose fatty acid esters, polyethylene glycol fatty acid esters (e.g. CREMOPHOR®), polyoxyethylene ethers, (e.g. polyoxyethylene lauryl ether [BRIJ®30]), poly(vinyl-pyrrolidone), diethylene glycol monolaurate, triethanolamine oleate, sodium oleate, potassium oleate, ethyl oleate, oleic acid, ethyl laurate, sodium lauryl sulfate, PLUORINC®F 68, POLOXAMER®188, cetrimonium bromide, cetylpyridinium chloride, benzalkonium chloride, docusate sodium, etc. and/or combinations thereof.

[0661] Exemplary binding agents include, but are not limited to, starch (e.g. cornstarch and starch paste); gelatin; sugars (e.g. sucrose, glucose, dextrose, dextrin, molasses, lactose, lactitol, mannitol,); natural and synthetic gums (e.g. acacia, sodium alginate, extract of Irish moss, panwar gum, ghatti gum, mucilage of isapol husks, carboxymethylcellulose, methylcellulose, ethylcellulose, hydroxyethylcellulose, hydroxypropyl cellulose, hydroxypropyl methylcellulose, microcrystalline cellulose, cellulose acetate, poly(vinyl-pyrrolidone), magnesium aluminum silicate (Veegum®), and larch arabogalactan); alginates; polyethylene oxide; polyethylene glycol; inorganic calcium salts; silicic acid; polymethacrylates; waxes; water; alcohol; etc.; and combinations thereof.

[0662] Exemplary preservatives may include, but are not limited to, antioxidants, chelating agents, antimicrobial preservatives, antifungal preservatives, alcohol preservatives, acidic preservatives, and/or other preservatives. Exemplary antioxidants include, but are not limited to, alpha tocopherol, ascorbic acid, acorbyl palmitate, butylated hydroxyanisole, butylated hydroxytoluene, monothioglycerol, potassium metabisulfite, propionic acid, propyl gallate, sodium ascorbate, sodium bisulfite, sodium metabisulfite, and/or sodium sulfite. Exemplary chelating agents include ethylenediaminetetraacetic acid (EDTA), citric acid monohydrate, disodium edetate, dipotassium edetate, edetic acid, fumaric acid, malic acid, phosphoric acid, sodium edetate, tartaric acid, and/or trisodium edetate. Exemplary antimicrobial preservatives include, but are not limited to, benzalkonium chloride, benzethonium chloride, benzyl alcohol, bronopol, cetrimide, cetylpyridinium chloride, chlorhexidine, chlorobutanol, chlorocresol, chloroxylenol, cresol, ethyl alcohol, glycerin, hexetidine, imidurea, phenol, phenoxyethanol, phenylethyl alcohol, phenylmercuric nitrate, propylene glycol, and/or thimerosal. Exemplary antifungal preservatives include, but are not limited to, butyl paraben, methyl paraben, ethyl paraben, propyl paraben, benzoic acid, hydroxybenzoic acid, potassium benzoate, potassium sorbate, sodium benzoate, sodium propionate, and/or sorbic acid. Exemplary alcohol preservatives include, but are not limited to, ethanol, polyethylene glycol, phenol, phenolic compounds, bisphenol, chlorobutanol, hydroxybenzoate, and/or phenylethyl alcohol. Exemplary acidic preservatives include, but are not limited to, vitamin A, vitamin C, vitamin E, beta-carotene, citric acid, acetic acid, dehydroacetic acid, ascorbic acid, sorbic acid, and/or phytic acid. Other preservatives include, but are not limited to, tocopherol, tocopherol acetate, deteroxime mesylate, cetrimide, butylated hydroxyanisol (BHA), butylated hydroxytoluened (BHT), ethylenediamine, sodium lauryl sulfate (SLS), sodium lauryl ether sulfate (SLES), sodium bisulfite, sodium metabisulfite, potassium sulfite, potassium metabisulfite, GLYDANT PLUS®, PHENONIP®, methylparaben, GERMALL®115, GERMABEN®II, NEOLONE™, KATHON™, and/or EUXYL®.

[0663] Exemplary buffering agents include, but are not limited to, citrate buffer solutions, acetate buffer solutions, phosphate buffer solutions, ammonium chloride, calcium carbonate, calcium chloride, calcium citrate, calcium glubionate, calcium gluceptate, calcium gluconate, D-gluconic acid, calcium glycerophosphate, calcium lactate, propanoic acid, calcium levulinate, pentanoic acid, dibasic calcium phosphate, phosphoric acid, tribasic calcium phosphate, calcium hydroxide phosphate, potassium acetate, potassium chloride, potassium gluconate, potassium mixtures, dibasic potassium phosphate, monobasic potassium phosphate, potassium phosphate mixtures, sodium acetate, sodium bicarbonate, sodium chloride, sodium citrate, sodium lactate, dibasic sodium phosphate, monobasic sodium phosphate, sodium phosphate mixtures, tromethamine, magnesium hydroxide, aluminum hydroxide, alginic acid, pyrogen-free water, isotonic saline, Ringer's solution, ethyl alcohol, etc., and/or combinations thereof.

[0664] Exemplary lubricating agents include, but are not limited to, magnesium stearate, calcium stearate, stearic acid, silica, talc, malt, glyceryl behanate, hydrogenated vegetable oils, polyethylene glycol, sodium benzoate, sodium acetate, sodium chloride, leucine, magnesium lauryl sulfate, sodium lauryl sulfate, etc., and combinations thereof.

[0665] Exemplary oils include, but are not limited to, almond, apricot kernel, avocado, babassu, bergamot, black current seed, borage, cade, camomile, canola, caraway, carnauba, castor, cinnamon, cocoa butter, coconut, cod liver, coffee, corn, cotton seed, emu, eucalyptus, evening primrose, fish, flaxseed, geraniol, gourd, grape seed, hazel nut, hyssop, isopropyl myristate, jojoba, kukui nut, lavandin, lavender, lemon, litsea cubeba, macademia nut, mallow, mango seed, meadowfoam seed, mink, nutmeg, olive, orange, orange roughy, palm, palm kernel, peach kernel, peanut, poppy seed, pumpkin seed, rapeseed, rice bran, rosemary, safflower, sandalwood, sasquana, savoury, sea buckthorn, sesame, shea butter, silicone, soybean, sunflower, tea tree, thistle, tsubaki, vetiver, walnut, and wheat germ oils. Exemplary oils include, but are not limited to, butyl stearate, caprylic triglyceride, capric triglyceride, cyclomethicone, diethyl sebacate, dimethicone 360, isopropyl myristate, mineral oil, octyldodecanol, oleyl alcohol, silicone oil, and/or combinations thereof.

[0666] Excipients such as cocoa butter and suppository waxes, coloring agents, coating agents, sweetening, flavoring, and/or perfuming agents can be present in the composition, according to the judgment of the formulator.

### Delivery

[0667] The present disclosure encompasses the delivery of polynucleotides, primary constructs or mmRNA for any of therapeutic, pharmaceutical, diagnostic or imaging by any appropriate route taking into consideration likely advances in the sciences of drug delivery. Delivery may be naked or formulated.

### Naked Delivery

[0668] The polynucleotides, primary constructs or mmRNA of the present invention may be delivered to a cell naked. As used herein in, “naked” refers to delivering polynucleotides, primary constructs or mmRNA free from agents which promote transfection. For example, the polynucleotides, primary constructs or mmRNA delivered to the cell may contain no modifications. The naked polynucleotides, primary constructs or mmRNA may be delivered to the cell using routes of administration known in the art and described herein.

### Formulated Delivery

[0669] The polynucleotides, primary constructs or mmRNA of the present invention may be formulated, using the methods described herein. The formulations may contain polynucleotides, primary constructs or mmRNA which may be modified and/or unmodified. The formulations may further include, but are not limited to, cell penetration agents, a pharmaceutically acceptable carrier, a delivery agent, a bioerodible or biocompatible polymer, a solvent, and a sustained-release delivery depot. The formulated polynucleotides, primary constructs or mmRNA may be delivered to the cell using routes of administration known in the art and described herein.

[0670] The compositions may also be formulated for direct delivery to an organ or tissue in any of several ways in the art including, but not limited to, direct soaking or bathing, via a catheter, by gels, powder, ointments, creams, gels, lotions, and/or drops, by using substrates such as fabric or biodegradable materials coated or impregnated with the compositions, and the like.

### Administration

[0671] The polynucleotides, primary constructs or mmRNA of the present invention may be administered by any route which results in a therapeutically effective outcome. These include, but are not limited to enteral, gastroenteral, epidural, oral, transdermal, epidural (peridural), intracerebral (into the cerebrum), intracerebroventricular (into the cerebral ventricles), epicutaneous (application onto the skin), intradermal, (into the skin itself), subcutaneous (under the skin), nasal administration (through the nose), intravenous (into a vein), intraarterial (into an artery), intramuscular (into a muscle), intracardiac (into the heart), intraosseous infusion (into the bone marrow), intrathecal (into the spinal canal), intraperitoneal, (infusion or injection into the peritoneum), intravesical infusion, intravitreal, (through the eye), intracavernous injection, (into the base of the penis), intravaginal administration, intrauterine, extra-amniotic administration, transdermal (diffusion through the intact skin for systemic distribution), transmucosal (diffusion through a mucous membrane), insufflation (snorting), sublingual, sublabial, enema, eye drops (onto the conjunctiva), or in ear drops. In specific embodiments, compositions may be administered in a way which allows them cross the blood-brain barrier, vascular barrier, or other epithelial barrier. Non-limiting routes of administration for the polynucleotides, primary constructs or mmRNA of the present invention are described below.

### Parenteral and Injectible Administration

[0672] Liquid dosage forms for parenteral administration include, but are not limited to, pharmaceutically acceptable emulsions, microemulsions, solutions, suspensions, syrups, and/or elixirs. In addition to active ingredients, liquid dosage forms may comprise inert diluents commonly used in the art such as, for example, water or other solvents, solubilizing agents and emulsifiers such as ethyl alcohol, isopropyl alcohol, ethyl carbonate, ethyl acetate, benzyl alcohol, benzyl benzoate, propylene glycol, 1,3-butylene glycol, dimethylformamide, oils (in particular, cottonseed, groundnut, corn, germ, olive, castor, and sesame oils), glycerol, tetrahydrofurfuryl alcohol, polyethylene glycols and fatty acid esters of sorbitan, and mixtures thereof. Besides inert diluents, oral compositions can include adjuvants such as wetting agents, emulsifying and suspending agents, sweetening, flavoring, and/or perfuming agents. In certain embodiments for parenteral administration, compositions are mixed with solubilizing agents such as CREMOPHOR®, alcohols, oils, modified oils, glycols, polysorbates, cyclodextrins, polymers, and/or combinations thereof.

[0673] Injectable preparations, for example, sterile injectable aqueous or oleaginous suspensions may be formulated according to the known art using suitable dispersing agents, wetting agents, and/or suspending agents. Sterile injectable preparations may be sterile injectable solutions, suspensions, and/or emulsions in nontoxic parenterally acceptable diluents and/or solvents, for example, as a solution in 1,3-butanediol. Among the acceptable vehicles and solvents that may be employed are water, Ringer's solution, U.S.P., and isotonic sodium chloride solution. Sterile, fixed oils are conventionally employed as a solvent or suspending medium. For this purpose any bland fixed oil can be employed including synthetic mono- or diglycerides. Fatty acids such as oleic acid can be used in the preparation of injectables.

[0674] Injectable formulations can be sterilized, for example, by filtration through a bacterial-retaining filter, and/or by incorporating sterilizing agents in the form of sterile solid compositions which can be dissolved or dispersed in sterile water or other sterile injectable medium prior to use.

[0675] In order to prolong the effect of an active ingredient, it is often desirable to slow the absorption of the active ingredient from subcutaneous or intramuscular injection. This may be accomplished by the use of a liquid suspension of crystalline or amorphous material with poor water solubility. The rate of absorption of the drug then depends upon its rate of dissolution which, in turn, may depend upon crystal size and crystalline form. Alternatively, delayed absorption of a parenterally administered drug form is accomplished by dissolving or suspending the drug in an oil vehicle. Injectable depot forms are made by forming microencapsule matrices of the drug in biodegradable polymers such as polylactide-polyglycolide. Depending upon the ratio of drug to polymer and the nature of the particular polymer employed, the rate of drug release can be controlled. Examples of other biodegradable polymers include poly(orthoesters) and poly(anhydrides). Depot injectable formulations are prepared by entrapping the drug in liposomes or microemulsions which are compatible with body tissues.

### Rectal and Vaginal Administration

[0676] Compositions for rectal or vaginal administration are typically suppositories which can be prepared by mixing compositions with suitable non-irritating excipients such as cocoa butter, polyethylene glycol or a suppository wax which are solid at ambient temperature but liquid at body temperature and therefore melt in the rectum or vaginal cavity and release the active ingredient.

### Oral Administration

[0677] Liquid dosage forms for oral administration include, but are not limited to, pharmaceutically acceptable emulsions, microemulsions, solutions, suspensions, syrups, and/or elixirs. In addition to active ingredients, liquid dosage forms may comprise inert diluents commonly used in the art such as, for example, water or other solvents, solubilizing agents and emulsifiers such as ethyl alcohol, isopropyl alcohol, ethyl carbonate, ethyl acetate, benzyl alcohol, benzyl benzoate, propylene glycol, 1,3-butylene glycol, dimethylformamide, oils (in particular, cottonseed, groundnut, corn, germ, olive, castor, and sesame oils), glycerol, tetrahydrofurfuryl alcohol, polyethylene glycols and fatty acid esters of sorbitan, and mixtures thereof. Besides inert diluents, oral compositions can include adjuvants such as wetting agents, emulsifying and suspending agents, sweetening, flavoring, and/or perfuming agents. In certain embodiments for parenteral administration, compositions are mixed with solubilizing agents such as CREMOPHOR®, alcohols, oils, modified oils, glycols, polysorbates, cyclodextrins, polymers, and/or combinations thereof.

[0678] Solid dosage forms for oral administration include capsules, tablets, pills, powders, and granules. In such solid dosage forms, an active ingredient is mixed with at least one inert, pharmaceutically acceptable excipient such as sodium citrate or dicalcium phosphate and/or fillers or extenders (e.g. starches, lactose, sucrose, glucose, mannitol, and silicic acid), binders (e.g. carboxymethylcellulose, alginates, gelatin, polyvinylpyrrolidinone, sucrose, and acacia), humectants (e.g. glycerol), disintegrating agents (e.g. agar, calcium carbonate, potato or tapioca starch, alginic acid, certain silicates, and sodium carbonate), solution retarding agents (e.g. paraffin), absorption accelerators (e.g. quaternary ammonium compounds), wetting agents (e.g. cetyl alcohol and glycerol monostearate), absorbents (e.g. kaolin and bentonite clay), and lubricants (e.g. talc, calcium stearate, magnesium stearate, solid polyethylene glycols, sodium lauryl sulfate), and mixtures thereof. In the case of capsules, tablets and pills, the dosage form may comprise buffering agents.

### Topical or Transdermal Administration

[0679] As described herein, compositions containing the polynucleotides, primary constructs or mmRNA of the invention may be formulated for administration topically. The skin may be an ideal target site for delivery as it is readily accessible. Gene expression may be restricted not only to the skin, potentially avoiding nonspecific toxicity, but also to specific layers and cell types within the skin.

[0680] The site of cutaneous expression of the delivered compositions will depend on the route of nucleic acid delivery. Three routes are commonly considered to deliver polynucleotides, primary constructs or mmRNA to the skin: (i) topical application (e.g. for local/regional treatment and/or cosmetic applications); (ii) intradermal injection (e.g. for local/regional treatment and/or cosmetic applications); and (iii) systemic delivery (e.g. for treatment of dermatologic diseases that affect both cutaneous and extracutaneous regions). Polynucleotides, primary constructs or mmRNA can be delivered to the skin by several different approaches known in the art. Most topical delivery approaches have been shown to work for delivery of DNA, such as but not limited to, topical application of non-cationic liposome-DNA complex, cationic liposome-DNA complex, particle-mediated (gene gun), puncture-mediated gene transfections, and viral delivery approaches. After delivery of the nucleic acid, gene products have been detected in a number of different skin cell types, including, but not limited to, basal keratinocytes, sebaceous gland cells, dermal fibroblasts and dermal macrophages.

[0681] In one embodiment, the invention provides for a variety of dressings (e.g., wound dressings) or bandages (e.g., adhesive bandages) for conveniently and/or effectively carrying out methods of the present invention. Typically dressing or bandages may comprise sufficient amounts of pharmaceutical compositions and/or polynucleotides, primary constructs or mmRNA described herein to allow a user to perform multiple treatments of a subject(s).

[0682] In one embodiment, the invention provides for the polynucleotides, primary constructs or mmRNA compositions to be delivered in more than one injection.

[0683] In one embodiment, before topical and/or transdermal administration at least one area of tissue, such as skin, may be subjected to a device and/or solution which may increase permeability. In one embodiment, the tissue may be subjected to an abrasion device to increase the permeability of the skin (see U.S. Patent Publication No. 20080275468, herein incorporated by reference in its entirety). In another embodiment, the tissue may be subjected to an ultrasound enhancement device. An ultrasound enhancement device may include, but is not limited to, the devices described in U.S. Publication No. 20040236268 and U.S. Pat. Nos. 6,491,657 and 6,234,990; each of which are herein incorporated by reference in their entireties. Methods of enhancing the permeability of tissue are described in U.S. Publication Nos. 20040171980 and 20040236268 and U.S. Pat. No. 6,190,315; each of which are herein incorporated by reference in their entireties.

[0684] In one embodiment, a device may be used to increase permeability of tissue before delivering formulations of modified mRNA described herein. The permeability of skin may be measured by methods known in the art and/or described in U.S. Pat. No. 6,190,315, herein incorporated by reference in its entirety. As a non-limiting example, a modified mRNA formulation may be delivered by the drug delivery methods described in U.S. Pat. No. 6,190,315, herein incorporated by reference in its entirety.

[0685] In another non-limiting example tissue may be treated with a eutectic mixture of local anesthetics (EMLA) cream before, during and/or after the tissue may be subjected to a device which may increase permeability. Katz et al. (Anesth Analg (2004); 98:371-76; herein incorporated by reference in its entirety) showed that using the EMLA cream in combination with a low energy, an onset of superficial cutaneous analgesia was seen as fast as 5 minutes after a pretreatment with a low energy ultrasound.

[0686] In one embodiment, enhancers may be applied to the tissue before, during, and/or after the tissue has been treated to increase permeability. Enhancers include, but are not limited to, transport enhancers, physical enhancers, and cavitation enhancers. Non-limiting examples of enhancers are described in U.S. Pat. No. 6,190,315, herein incorporated by reference in its entirety.

[0687] In one embodiment, a device may be used to increase permeability of tissue before delivering formulations of modified mRNA described herein, which may further contain a substance that invokes an immune response. In another non-limiting example, a formulation containing a substance to invoke an immune response may be delivered by the methods described in U.S. Publication Nos. 20040171980 and 20040236268; each of which are herein incorporated by reference in their entireties.

[0688] Dosage forms for topical and/or transdermal administration of a composition may include ointments, pastes, creams, lotions, gels, powders, solutions, sprays, inhalants and/or patches. Generally, an active ingredient is admixed under sterile conditions with a pharmaceutically acceptable excipient and/or any needed preservatives and/or buffers as may be required.

[0689] Additionally, the present invention contemplates the use of transdermal patches, which often have the added advantage of providing controlled delivery of a compound to the body. Such dosage forms may be prepared, for example, by dissolving and/or dispensing the compound in the proper medium. Alternatively or additionally, rate may be controlled by either providing a rate controlling membrane and/or by dispersing the compound in a polymer matrix and/or gel.

[0690] Formulations suitable for topical administration include, but are not limited to, liquid and/or semi liquid preparations such as liniments, lotions, oil in water and/or water in oil emulsions such as creams, ointments and/or pastes, and/or solutions and/or suspensions.

[0691] Topically-administrable formulations may, for example, comprise from about 0.1% to about 10% (w/w) active ingredient, although the concentration of active ingredient may be as high as the solubility limit of the active ingredient in the solvent. Formulations for topical administration may further comprise one or more of the additional ingredients described herein.

### Depot Administration

[0692] As described herein, in some embodiments, the composition is formulated in depots for extended release. Generally, a specific organ or tissue (a “target tissue”) is targeted for administration.

[0693] In some aspects of the invention, the polynucleotides, primary constructs or mmRNA are spatially retained within or proximal to a target tissue. Provided are method of providing a composition to a target tissue of a mammalian subject by contacting the target tissue (which contains one or more target cells) with the composition under conditions such that the composition, in particular the nucleic acid component(s) of the composition, is substantially retained in the target tissue, meaning that at least 10, 20, 30, 40, 50, 60, 70, 80, 85, 90, 95, 96, 97, 98, 99, 99.9, 99.99 or greater than 99.99% of the composition is retained in the target tissue. Advantageously, retention is determined by measuring the amount of the nucleic acid present in the composition that enters one or more target cells. For example, at least 1, 5, 10, 20, 30, 40, 50, 60, 70, 80, 85, 90, 95, 96, 97, 98, 99, 99.9, 99.99 or greater than 99.99% of the nucleic acids administered to the subject are present intracellularly at a period of time following administration. For example, intramuscular injection to a mammalian subject is performed using an aqueous composition containing a ribonucleic acid and a transfection reagent, and retention of the composition is determined by measuring the amount of the ribonucleic acid present in the muscle cells.

[0694] Aspects of the invention are directed to methods of providing a composition to a target tissue of a mammalian subject, by contacting the target tissue (containing one or more target cells) with the composition under conditions such that the composition is substantially retained in the target tissue. The composition contains an effective amount of a polynucleotides, primary constructs or mmRNA such that the polypeptide of interest is produced in at least one target cell. The compositions generally contain a cell penetration agent, although “naked” nucleic acid (such as nucleic acids without a cell penetration agent or other agent) is also contemplated, and a pharmaceutically acceptable carrier.

[0695] In some circumstances, the amount of a protein produced by cells in a tissue is desirably increased. Preferably, this increase in protein production is spatially restricted to cells within the target tissue. Thus, provided are methods of increasing production of a protein of interest in a tissue of a mammalian subject. A composition is provided that contains polynucleotides, primary constructs or mmRNA characterized in that a unit quantity of composition has been determined to produce the polypeptide of interest in a substantial percentage of cells contained within a predetermined volume of the target tissue.

[0696] In some embodiments, the composition includes a plurality of different polynucleotides, primary constructs or mmRNA, where one or more than one of the polynucleotides, primary constructs or mmRNA encodes a polypeptide of interest. Optionally, the composition also contains a cell penetration agent to assist in the intracellular delivery of the composition. A determination is made of the dose of the composition required to produce the polypeptide of interest in a substantial percentage of cells contained within the predetermined volume of the target tissue (generally, without inducing significant production of the polypeptide of interest in tissue adjacent to the predetermined volume, or distally to the target tissue). Subsequent to this determination, the determined dose is introduced directly into the tissue of the mammalian subject.

[0697] In one embodiment, the invention provides for the polynucleotides, primary constructs or mmRNA to be delivered in more than one injection or by split dose injections.

[0698] In one embodiment, the invention may be retained near target tissue using a small disposable drug reservoir, patch pump or osmotic pump. Non-limiting examples of patch pumps include those manufactured and/or sold by BD® (Franklin Lakes, NJ), Insulet Corporation (Bedford, MA), SteadyMed Therapeutics (San Francisco, CA), Medtronic (Minneapolis, MN) (e.g., MiniMed), UniLife (York, PA), Valeritas (Bridgewater, NJ), and SpringLeaf Therapeutics (Boston, MA). A non-limiting example of an osmotic pump include those manufactured by DURECT® (Cupertino, CA) (e.g., DUROS® and ALZET®).

### Pulmonary Administration

[0699] A pharmaceutical composition may be prepared, packaged, and/or sold in a formulation suitable for pulmonary administration via the buccal cavity. Such a formulation may comprise dry particles which comprise the active ingredient and which have a diameter in the range from about 0.5 nm to about 7 nm or from about 1 nm to about 6 nm. Such compositions are suitably in the form of dry powders for administration using a device comprising a dry powder reservoir to which a stream of propellant may be directed to disperse the powder and/or using a self propelling solvent/powder dispensing container such as a device comprising the active ingredient dissolved and/or suspended in a low-boiling propellant in a sealed container. Such powders comprise particles wherein at least 98% of the particles by weight have a diameter greater than 0.5 nm and at least 95% of the particles by number have a diameter less than 7 nm. Alternatively, at least 95% of the particles by weight have a diameter greater than 1 nm and at least 90% of the particles by number have a diameter less than 6 nm. Dry powder compositions may include a solid fine powder diluent such as sugar and are conveniently provided in a unit dose form.

[0700] Low boiling propellants generally include liquid propellants having a boiling point of below 65° F. at atmospheric pressure. Generally the propellant may constitute 50% to 99.9% (w/w) of the composition, and active ingredient may constitute 0.1% to 20% (w/w) of the composition. A propellant may further comprise additional ingredients such as a liquid non-ionic and/or solid anionic surfactant and/or a solid diluent (which may have a particle size of the same order as particles comprising the active ingredient).

[0701] As a non-limiting example, the polynucleotides, primary constructs and/or mmRNA described herein may be formulated for pulmonary delivery by the methods described in U.S. Pat. No. 8,257,685; herein incorporated by reference in its entirety.

[0702] Pharmaceutical compositions formulated for pulmonary delivery may provide an active ingredient in the form of droplets of a solution and/or suspension. Such formulations may be prepared, packaged, and/or sold as aqueous and/or dilute alcoholic solutions and/or suspensions, optionally sterile, comprising active ingredient, and may conveniently be administered using any nebulization and/or atomization device. Such formulations may further comprise one or more additional ingredients including, but not limited to, a flavoring agent such as saccharin sodium, a volatile oil, a buffering agent, a surface active agent, and/or a preservative such as methylhydroxybenzoate. Droplets provided by this route of administration may have an average diameter in the range from about 0.1 nm to about 200 nm.

Intranasal, Nasal and buccal Administration

[0703] Formulations described herein as being useful for pulmonary delivery are useful for intranasal delivery of a pharmaceutical composition. Another formulation suitable for intranasal administration is a coarse powder comprising the active ingredient and having an average particle from about 0.2 μm to 500 μm. Such a formulation is administered in the manner in which snuff is taken, i.e. by rapid inhalation through the nasal passage from a container of the powder held close to the nose.

[0704] Formulations suitable for nasal administration may, for example, comprise from about as little as 0.1% (w/w) and as much as 100% (w/w) of active ingredient, and may comprise one or more of the additional ingredients described herein. A pharmaceutical composition may be prepared, packaged, and/or sold in a formulation suitable for buccal administration. Such formulations may, for example, be in the form of tablets and/or lozenges made using conventional methods, and may, for example, 0.1% to 20% (w/w) active ingredient, the balance comprising an orally dissolvable and/or degradable composition and, optionally, one or more of the additional ingredients described herein. Alternately, formulations suitable for buccal administration may comprise a powder and/or an aerosolized and/or atomized solution and/or suspension comprising active ingredient. Such powdered, aerosolized, and/or aerosolized formulations, when dispersed, may have an average particle and/or droplet size in the range from about 0.1 nm to about 200 nm, and may further comprise one or more of any additional ingredients described herein.

### Ophthalmic Administration

[0705] A pharmaceutical composition may be prepared, packaged, and/or sold in a formulation suitable for ophthalmic administration. Such formulations may, for example, be in the form of eye drops including, for example, a 0.1/1.0% (w/w) solution and/or suspension of the active ingredient in an aqueous or oily liquid excipient. Such drops may further comprise buffering agents, salts, and/or one or more other of any additional ingredients described herein. Other ophthalmically-administrable formulations which are useful include those which comprise the active ingredient in microcrystalline form and/or in a liposomal preparation. Ear drops and/or eye drops are contemplated as being within the scope of this invention. A multilayer thin film device may be prepared to contain a pharmaceutical composition for delivery to the eye and/or surrounding tissue.

### Payload Administration: Detectable Agents and Therapeutic Agents

[0706] The polynucleotides, primary constructs or mmRNA described herein can be used in a number of different scenarios in which delivery of a substance (the “payload”) to a biological target is desired, for example delivery of detectable substances for detection of the target, or delivery of a therapeutic agent. Detection methods can include, but are not limited to, both imaging in vitro and in vivo imaging methods, e.g., immunohistochemistry, bioluminescence imaging (BLI), Magnetic Resonance Imaging (MRI), positron emission tomography (PET), electron microscopy, X-ray computed tomography, Raman imaging, optical coherence tomography, absorption imaging, thermal imaging, fluorescence reflectance imaging, fluorescence microscopy, fluorescence molecular tomographic imaging, nuclear magnetic resonance imaging, X-ray imaging, ultrasound imaging, photoacoustic imaging, lab assays, or in any situation where tagging/staining/imaging is required.

[0707] The polynucleotides, primary constructs or mmRNA can be designed to include both a linker and a payload in any useful orientation. For example, a linker having two ends is used to attach one end to the payload and the other end to the nucleobase, such as at the C-7 or C-8 positions of the deaza-adenosine or deaza-guanosine or to the N-3 or C-5 positions of cytosine or uracil. The polynucleotide of the invention can include more than one payload (e.g., a label and a transcription inhibitor), as well as a cleavable linker. In one embodiment, the modified nucleotide is a modified 7-deaza-adenosine triphosphate, where one end of a cleavable linker is attached to the C7 position of 7-deaza-adenine, the other end of the linker is attached to an inhibitor (e.g., to the C5 position of the nucleobase on a cytidine), and a label (e.g., Cy5) is attached to the center of the linker (see, e.g., compound 1 of A*pCp C5 Parg Capless in FIG. 5 and columns 9 and 10 of U.S. Pat. No. 7,994,304, incorporated herein by reference). Upon incorporation of the modified 7-deaza-adenosine triphosphate to an encoding region, the resulting polynucleotide having a cleavable linker attached to a label and an inhibitor (e.g., a polymerase inhibitor). Upon cleavage of the linker (e.g., with reductive conditions to reduce a linker having a cleavable disulfide moiety), the label and inhibitor are released. Additional linkers and payloads (e.g., therapeutic agents, detectable labels, and cell penetrating payloads) are described herein.

[0708] Scheme 12 below depicts an exemplary modified nucleotide wherein the nucleobase, adenine, is attached to a linker at the C-7 carbon of 7-deaza adenine. In addition, Scheme 12 depicts the modified nucleotide with the linker and payload, e.g., a detectable agent, incorporated onto the 3′ end of the mRNA. Disulfide cleavage and 1,2-addition of the thiol group onto the propargyl ester releases the detectable agent. The remaining structure (depicted, for example, as pApC5Parg in Scheme 12) is the inhibitor. The rationale for the structure of the modified nucleotides is that the tethered inhibitor sterically interferes with the ability of the polymerase to incorporate a second base. Thus, it is critical that the tether be long enough to affect this function and that the inhibiter be in a stereochemical orientation that inhibits or prohibits second and follow on nucleotides into the growing polynucleotide strand.

[chemical structure]

[0709] For example, the polynucleotides, primary constructs or mmRNA described herein can be used in reprogramming induced pluripotent stem cells (iPS cells), which can directly track cells that are transfected compared to total cells in the cluster. In another example, a drug that may be attached to the polynucleotides, primary constructs or mmRNA via a linker and may be fluorescently labeled can be used to track the drug in vivo, e.g. intracellularly. Other examples include, but are not limited to, the use of a polynucleotides, primary constructs or mmRNA in reversible drug delivery into cells.

[0710] The polynucleotides, primary constructs or mmRNA described herein can be used in intracellular targeting of a payload, e.g., detectable or therapeutic agent, to specific organelle. Exemplary intracellular targets can include, but are not limited to, the nuclear localization for advanced mRNA processing, or a nuclear localization sequence (NLS) linked to the mRNA containing an inhibitor.

[0711] In addition, the polynucleotides, primary constructs or mmRNA described herein can be used to deliver therapeutic agents to cells or tissues, e.g., in living animals. For example, the polynucleotides, primary constructs or mmRNA described herein can be used to deliver highly polar chemotherapeutics agents to kill cancer cells. The polynucleotides, primary constructs or mmRNA attached to the therapeutic agent through a linker can facilitate member permeation allowing the therapeutic agent to travel into a cell to reach an intracellular target.

[0712] In one example, the linker is attached at the 2′-position of the ribose ring and/or at the 3′ and/or 5′ position of the polynucleotides, primary constructs mmRNA (See e.g., International Pub. No. WO2012030683, herein incorporated by reference in its entirety). The linker may be any linker disclosed herein, known in the art and/or disclosed in International Pub. No. WO2012030683, herein incorporated by reference in its entirety.

[0713] In another example, the polynucleotides, primary constructs or mmRNA can be attached to the polynucleotides, primary constructs or mmRNA a viral inhibitory peptide (VIP) through a cleavable linker. The cleavable linker can release the VIP and dye into the cell. In another example, the polynucleotides, primary constructs or mmRNA can be attached through the linker to an ADP-ribosylate, which is responsible for the actions of some bacterial toxins, such as cholera toxin, diphtheria toxin, and pertussis toxin. These toxin proteins are ADP-ribosyltransferases that modify target proteins in human cells. For example, cholera toxin ADP-ribosylates G proteins modifies human cells by causing massive fluid secretion from the lining of the small intestine, which results in life-threatening diarrhea.

[0714] In some embodiments, the payload may be a therapeutic agent such as a cytotoxin, radioactive ion, chemotherapeutic, or other therapeutic agent. A cytotoxin or cytotoxic agent includes any agent that may be detrimental to cells. Examples include, but are not limited to, taxol, cytochalasin B, gramicidin D, ethidium bromide, emetine, mitomycin, etoposide, teniposide, vincristine, vinblastine, colchicine, doxorubicin, daunorubicin, dihydroxyanthracinedione, mitoxantrone, mithramycin, actinomycin D, 1-dehydrotestosterone, glucocorticoids, procaine, tetracaine, lidocaine, propranolol, puromycin, maytansinoids, e.g., maytansinol (see U.S. Pat. No. 5,208,020 incorporated herein in its entirety), rachelmycin (CC-1065, see U.S. Pat. Nos. 5,475,092, 5,585,499, and 5,846,545, all of which are incorporated herein by reference), and analogs or homologs thereof. Radioactive ions include, but are not limited to iodine (e.g., iodine 125 or iodine 131), strontium 89, phosphorous, palladium, cesium, iridium, phosphate, cobalt, yttrium 90, samarium 153, and praseodymium. Other therapeutic agents include, but are not limited to, antimetabolites (e.g., methotrexate, 6-mercaptopurine, 6-thioguanine, cytarabine, 5-fluorouracil decarbazine), alkylating agents (e.g., mechlorethamine, thiotepa chlorambucil, rachelmycin (CC-1065), melphalan, carmustine (BSNU), lomustine (CCNU), cyclophosphamide, busulfan, dibromomannitol, streptozotocin, mitomycin C, and cis-dichlorodiamine platinum (II) (DDP) cisplatin), anthracyclines (e.g., daunorubicin (formerly daunomycin) and doxorubicin), antibiotics (e.g., dactinomycin (formerly actinomycin), bleomycin, mithramycin, and anthramycin (AMC)), and anti-mitotic agents (e.g., vincristine, vinblastine, taxol and maytansinoids).

[0715] In some embodiments, the payload may be a detectable agent, such as various organic small molecules, inorganic compounds, nanoparticles, enzymes or enzyme substrates, fluorescent materials, luminescent materials (e.g., luminol), bioluminescent materials (e.g., luciferase, luciferin, and aequorin), chemiluminescent materials, radioactive materials (e.g., ¹⁸F, ⁶⁷Ga, ^{81m}Kr, ⁸²Rb, ¹¹¹In, ¹²³I, ¹³³Xe, ²⁰¹Tl, ¹²⁵I, ³⁵S, ¹⁴C, ³H, or ^{99m}Tc (e.g., as pertechnetate (technetate (VII), TcO₄⁻)), and contrast agents (e.g., gold (e.g., gold nanoparticles), gadolinium (e.g., chelated Gd), iron oxides (e.g., superparamagnetic iron oxide (SPIO), monocrystalline iron oxide nanoparticles (MIONs), and ultrasmall superparamagnetic iron oxide (USPIO)), manganese chelates (e.g., Mn-DPDP), barium sulfate, iodinated contrast media (iohexol), microbubbles, or perfluorocarbons). Such optically-detectable labels include for example, without limitation, 4-acetamido-4′-isothiocyanatostilbene-2,2′disulfonic acid; acridine and derivatives (e.g., acridine and acridine isothiocyanate); 5-(2′-aminoethyl)aminonaphthalene-1-sulfonic acid (EDANS); 4-amino-N-[3-vinylsulfonyl phenyl]naphthalimide-3,5 disulfonate; N-(4-anilino-1-naphthyl)maleimide; anthranilamide; BODIPY; Brilliant Yellow; coumarin and derivatives (e.g., coumarin, 7-amino-4-methylcoumarin (AMC, Coumarin 120), and 7-amino-4-trifluoromethylcoumarin (Coumarin 151)); cyanine dyes; cyanosine; 4′,6-diaminidino-2-phenylindole (DAPI); 5′ 5″-dibromopyrogallol-sulfonaphthalein (Bromopyrogallol Red); 7-diethylamino-3-(4′-isothiocyanatophenyl)-4-methylcoumarin; diethylenetriamine pentaacetate; 4,4′-diisothiocyanatodihydro-stilbene-2,2′-disulfonic acid; 4,4′-diisothiocyanatostilbene-2,2′-disulfonic acid; 5-[dimethylamino]-naphthalene-1-sulfonyl chloride (DNS, dansylchloride); 4-dimethylaminophenylazophenyl-4′-isothiocyanate (DABITC); eosin and derivatives (e.g., eosin and eosin isothiocyanate); erythrosin and derivatives (e.g., erythrosin B and erythrosin isothiocyanate); ethidium; fluorescein and derivatives (e.g., 5-carboxyfluorescein (FAM), 5-(4,6-dichlorotriazin-2-yl)aminofluorescein (DTAF), 2′,7′-dimethoxy-4′5′-dichloro-6-carboxyfluorescein, fluorescein, fluorescein isothiocyanate, X-rhodamine-5-(and-6)-isothiocyanate (QFITC or XRITC), and fluorescamine); 2-[2-[3-[[1,3-dihydro-1,1-dimethyl-3-(3-sulfopropyl)-2H-benz[e]indol-2-ylidene]ethylidene]-2-[4-(ethoxycarbonyl)-1-piperazinyl]-1-cyclopenten-1-yl]ethenyl]-1,1-dimethyl-3-(3-sulforpropyl)-1H-benz[e]indolium hydroxide, inner salt, compound with n,n-diethylethanamine (1:1) (IR144); 5-chloro-2-[2-[3-[(5-chloro-3-ethyl-2 (3H)-benzothiazol-ylidene)ethylidene]-2-(diphenylamino)-1-cyclopenten-1-yl]ethenyl]-3-ethyl benzothiazolium perchlorate (IR140); Malachite Green isothiocyanate; 4-methylumbelliferone orthocresolphthalein; nitrotyrosine; pararosaniline; Phenol Red; B-phycoerythrin; o-phthaldialdehyde; pyrene and derivatives (e.g., pyrene, pyrene butyrate, and succinimidyl 1-pyrene); butyrate quantum dots; Reactive Red 4 (CIBACRON™ Brilliant Red 3B-A); rhodamine and derivatives (e.g., 6-carboxy-X-rhodamine (ROX), 6-carboxyrhodamine (R6G), lissamine rhodamine B sulfonyl chloride rhodarnine (Rhod), rhodamine B, rhodamine 123, rhodamine X isothiocyanate, sulforhodamine B, sulforhodamine 101, sulfonyl chloride derivative of sulforhodamine 101 (Texas Red), N,N,N′,N′tetramethyl-6-carboxyrhodamine (TAMRA) tetramethyl rhodamine, and tetramethyl rhodamine isothiocyanate (TRITC)); riboflavin; rosolic acid; terbium chelate derivatives; Cyanine-3 (Cy3); Cyanine-5 (Cy5); cyanine-5.5 (Cy5.5), Cyanine-7 (Cy7); IRD 700; IRD 800; Alexa 647; La Jolta Blue; phthalo cyanine; and naphthalo cyanine.

[0716] In some embodiments, the detectable agent may be a non-detectable pre-cursor that becomes detectable upon activation (e.g., fluorogenic tetrazine-fluorophore constructs (e.g., tetrazine-BODIPY FL, tetrazine-Oregon Green 488, or tetrazine-BODIPY TMR-X) or enzyme activatable fluorogenic agents (e.g., PROSENSE® (VisEn Medical))). In vitro assays in which the enzyme labeled compositions can be used include, but are not limited to, enzyme linked immunosorbent assays (ELISAs), immunoprecipitation assays, immunofluorescence, enzyme immunoassays (EIA), radioimmunoassays (RIA), and Western blot analysis.

### Combinations

[0717] The polynucleotides, primary constructs or mmRNA may be used in combination with one or more other therapeutic, prophylactic, diagnostic, or imaging agents. By “in combination with,” it is not intended to imply that the agents must be administered at the same time and/or formulated for delivery together, although these methods of delivery are within the scope of the present disclosure. Compositions can be administered concurrently with, prior to, or subsequent to, one or more other desired therapeutics or medical procedures. In general, each agent will be administered at a dose and/or on a time schedule determined for that agent. In some embodiments, the present disclosure encompasses the delivery of pharmaceutical, prophylactic, diagnostic, or imaging compositions in combination with agents that may improve their bioavailability, reduce and/or modify their metabolism, inhibit their excretion, and/or modify their distribution within the body. As a non-limiting example, the nucleic acids or mmRNA may be used in combination with a pharmaceutical agent for the treatment of cancer or to control hyperproliferative cells. In U.S. Pat. No. 7,964,571, herein incorporated by reference in its entirety, a combination therapy for the treatment of solid primary or metastasized tumor is described using a pharmaceutical composition including a DNA plasmid encoding for interleukin-12 with a lipopolymer and also administering at least one anticancer agent or chemotherapeutic. Further, the nucleic acids and mmRNA of the present invention that encodes anti-proliferative molecules may be in a pharmaceutical composition with a lipopolymer (see e.g., U.S. Pub. No. 20110218231, herein incorporated by reference in its entirety, claiming a pharmaceutical composition comprising a DNA plasmid encoding an anti-proliferative molecule and a lipopolymer) which may be administered with at least one chemotherapeutic or anticancer agent.

[0718] It will further be appreciated that therapeutically, prophylactically, diagnostically, or imaging active agents utilized in combination may be administered together in a single composition or administered separately in different compositions. In general, it is expected that agents utilized in combination with be utilized at levels that do not exceed the levels at which they are utilized individually. In some embodiments, the levels utilized in combination will be lower than those utilized individually. In one embodiment, the combinations, each or together may be administered according to the split dosing regimens described herein.

### Dosing

[0719] The present invention provides methods comprising administering modified mRNAs and their encoded proteins or complexes in accordance with the invention to a subject in need thereof. Nucleic acids, proteins or complexes, or pharmaceutical, imaging, diagnostic, or prophylactic compositions thereof, may be administered to a subject using any amount and any route of administration effective for preventing, treating, diagnosing, or imaging a disease, disorder, and/or condition (e.g., a disease, disorder, and/or condition relating to working memory deficits). The exact amount required will vary from subject to subject, depending on the species, age, and general condition of the subject, the severity of the disease, the particular composition, its mode of administration, its mode of activity, and the like. Compositions in accordance with the invention are typically formulated in dosage unit form for ease of administration and uniformity of dosage. It will be understood, however, that the total daily usage of the compositions of the present invention may be decided by the attending physician within the scope of sound medical judgment. The specific therapeutically effective, prophylactically effective, or appropriate imaging dose level for any particular patient will depend upon a variety of factors including the disorder being treated and the severity of the disorder; the activity of the specific compound employed; the specific composition employed; the age, body weight, general health, sex and diet of the patient; the time of administration, route of administration, and rate of excretion of the specific compound employed; the duration of the treatment; drugs used in combination or coincidental with the specific compound employed; and like factors well known in the medical arts.

[0720] In certain embodiments, compositions in accordance with the present invention may be administered at dosage levels sufficient to deliver from about 0.0001 mg/kg to about 100 mg/kg, from about 0.001 mg/kg to about 0.05 mg/kg, from about 0.005 mg/kg to about 0.05 mg/kg, from about 0.001 mg/kg to about 0.005 mg/kg, from about 0.05 mg/kg to about 0.5 mg/kg, from about 0.01 mg/kg to about 50 mg/kg, from about 0.1 mg/kg to about 40 mg/kg, from about 0.5 mg/kg to about 30 mg/kg, from about 0.01 mg/kg to about 10 mg/kg, from about 0.1 mg/kg to about 10 mg/kg, or from about 1 mg/kg to about 25 mg/kg, of subject body weight per day, one or more times a day, to obtain the desired therapeutic, diagnostic, prophylactic, or imaging effect. The desired dosage may be delivered three times a day, two times a day, once a day, every other day, every third day, every week, every two weeks, every three weeks, or every four weeks. In certain embodiments, the desired dosage may be delivered using multiple administrations (e.g., two, three, four, five, six, seven, eight, nine, ten, eleven, twelve, thirteen, fourteen, or more administrations). When multiple administrations are employed, split dosing regimens such as those described herein may be used.

[0721] According to the present invention, it has been discovered that administration of mmRNA in split-dose regimens produce higher levels of proteins in mammalian subjects. As used herein, a “split dose” is the division of single unit dose or total daily dose into two or more doses, e.g, two or more administrations of the single unit dose. As used herein, a “single unit dose” is a dose of any therapeutic administered in one dose/at one time/single route/single point of contact, i.e., single administration event. As used herein, a “total daily dose” is an amount given or prescribed in 24 hr period. It may be administered as a single unit dose. In one embodiment, the mmRNA of the present invention are administered to a subject in split doses. The mmRNA may be formulated in buffer only or in a formulation described herein.

### Dosage Forms

[0722] A pharmaceutical composition described herein can be formulated into a dosage form described herein, such as a topical, intranasal, intratracheal, or injectable (e.g., intravenous, intraocular, intravitreal, intramuscular, intracardiac, intraperitoneal, subcutaneous).

### Liquid Dosage Forms

[0723] Liquid dosage forms for parenteral administration include, but are not limited to, pharmaceutically acceptable emulsions, microemulsions, solutions, suspensions, syrups, and/or elixirs. In addition to active ingredients, liquid dosage forms may comprise inert diluents commonly used in the art including, but not limited to, water or other solvents, solubilizing agents and emulsifiers such as ethyl alcohol, isopropyl alcohol, ethyl carbonate, ethyl acetate, benzyl alcohol, benzyl benzoate, propylene glycol, 1,3-butylene glycol, dimethylformamide, oils (in particular, cottonseed, groundnut, corn, germ, olive, castor, and sesame oils), glycerol, tetrahydrofurfuryl alcohol, polyethylene glycols and fatty acid esters of sorbitan, and mixtures thereof. In certain embodiments for parenteral administration, compositions may be mixed with solubilizing agents such as CREMOPHOR®, alcohols, oils, modified oils, glycols, polysorbates, cyclodextrins, polymers, and/or combinations thereof.

### Injectable

[0724] Injectable preparations, for example, sterile injectable aqueous or oleaginous suspensions may be formulated according to the known art and may include suitable dispersing agents, wetting agents, and/or suspending agents. Sterile injectable preparations may be sterile injectable solutions, suspensions, and/or emulsions in nontoxic parenterally acceptable diluents and/or solvents, for example, a solution in 1,3-butanediol. Among the acceptable vehicles and solvents that may be employed include, but are not limited to, water, Ringer's solution, U.S.P., and isotonic sodium chloride solution. Sterile, fixed oils are conventionally employed as a solvent or suspending medium. For this purpose any bland fixed oil can be employed including synthetic mono- or diglycerides. Fatty acids such as oleic acid can be used in the preparation of injectables.

[0725] Injectable formulations can be sterilized, for example, by filtration through a bacterial-retaining filter, and/or by incorporating sterilizing agents in the form of sterile solid compositions which can be dissolved or dispersed in sterile water or other sterile injectable medium prior to use.

[0726] In order to prolong the effect of an active ingredient, it may be desirable to slow the absorption of the active ingredient from subcutaneous or intramuscular injection. This may be accomplished by the use of a liquid suspension of crystalline or amorphous material with poor water solubility. The rate of absorption of the polynucleotide, primary construct or mmRNA then depends upon its rate of dissolution which, in turn, may depend upon crystal size and crystalline form. Alternatively, delayed absorption of a parenterally administered polynucleotide, primary construct or mmRNA may be accomplished by dissolving or suspending the polynucleotide, primary construct or mmRNA in an oil vehicle. Injectable depot forms are made by forming microencapsule matrices of the polynucleotide, primary construct or mmRNA in biodegradable polymers such as polylactide-polyglycolide. Depending upon the ratio of polynucleotide, primary construct or mmRNA to polymer and the nature of the particular polymer employed, the rate of polynucleotide, primary construct or mmRNA release can be controlled. Examples of other biodegradable polymers include, but are not limited to, poly(orthoesters) and poly(anhydrides). Depot injectable formulations may be prepared by entrapping the polynucleotide, primary construct or mmRNA in liposomes or microemulsions which are compatible with body tissues.

### Pulmonary

[0727] Formulations described herein as being useful for pulmonary delivery may also be used for intranasal delivery of a pharmaceutical composition. Another formulation suitable for intranasal administration may be a coarse powder comprising the active ingredient and having an average particle from about 0.2 μm to 500 μm. Such a formulation may be administered in the manner in which snuff is taken, i.e. by rapid inhalation through the nasal passage from a container of the powder held close to the nose.

[0728] Formulations suitable for nasal administration may, for example, comprise from about as little as 0.1% (w/w) and as much as 100% (w/w) of active ingredient, and may comprise one or more of the additional ingredients described herein. A pharmaceutical composition may be prepared, packaged, and/or sold in a formulation suitable for buccal administration. Such formulations may, for example, be in the form of tablets and/or lozenges made using conventional methods, and may, for example, contain about 0.1% to 20% (w/w) active ingredient, where the balance may comprise an orally dissolvable and/or degradable composition and, optionally, one or more of the additional ingredients described herein. Alternately, formulations suitable for buccal administration may comprise a powder and/or an aerosolized and/or atomized solution and/or suspension comprising active ingredient. Such powdered, aerosolized, and/or aerosolized formulations, when dispersed, may have an average particle and/or droplet size in the range from about 0.1 nm to about 200 nm, and may further comprise one or more of any additional ingredients described herein.

[0729] General considerations in the formulation and/or manufacture of pharmaceutical agents may be found, for example, in Remington: The Science and Practice of Pharmacy 21^{st} ed., Lippincott Williams & Wilkins, 2005 (incorporated herein by reference in its entirety).

### Coatings or Shells

[0730] Solid dosage forms of tablets, dragees, capsules, pills, and granules can be prepared with coatings and shells such as enteric coatings and other coatings well known in the pharmaceutical formulating art. They may optionally comprise opacifying agents and can be of a composition that they release the active ingredient(s) only, or preferentially, in a certain part of the intestinal tract, optionally, in a delayed manner. Examples of embedding compositions which can be used include polymeric substances and waxes. Solid compositions of a similar type may be employed as fillers in soft and hard-filled gelatin capsules using such excipients as lactose or milk sugar as well as high molecular weight polyethylene glycols and the like.

### Properties of Pharmaceutical Compositions

[0731] The pharmaceutical compositions described herein can be characterized by one or more of bioavailability, therapeutic window and/or volume of distribution.

### Bioavailability

[0732] The polynucleotides, primary constructs or mmRNA, when formulated into a composition with a delivery agent as described herein, can exhibit an increase in bioavailability as compared to a composition lacking a delivery agent as described herein. As used herein, the term “bioavailability” refers to the systemic availability of a given amount of polynucleotides, primary constructs or mmRNA administered to a mammal. Bioavailability can be assessed by measuring the area under the curve (AUC) or the maximum serum or plasma concentration (Cₘₐₓ) of the unchanged form of a compound following administration of the compound to a mammal. AUC is a determination of the area under the curve plotting the serum or plasma concentration of a compound along the ordinate (Y-axis) against time along the abscissa (X-axis). Generally, the AUC for a particular compound can be calculated using methods known to those of ordinary skill in the art and as described in G. S. Banker, Modern Pharmaceutics, Drugs and the Pharmaceutical Sciences, v. 72, Marcel Dekker, New York, Inc., 1996, herein incorporated by reference in its entirety.

[0733] The Cₘₐₓ value is the maximum concentration of the compound achieved in the serum or plasma of a mammal following administration of the compound to the mammal. The Cₘₐₓ value of a particular compound can be measured using methods known to those of ordinary skill in the art. The phrases “increasing bioavailability” or “improving the pharmacokinetics,” as used herein mean that the systemic availability of a first polynucleotide, primary construct or mmRNA, measured as AUC, Cₘₐₓ, or Cₘᵢₙ in a mammal is greater, when co-administered with a delivery agent as described herein, than when such co-administration does not take place. In some embodiments, the bioavailability of the polynucleotide, primary construct or mmRNA can increase by at least about 2%, at least about 5%, at least about 10%, at least about 15%, at least about 20%, at least about 25%, at least about 30%, at least about 35%, at least about 40%, at least about 45%, at least about 50%, at least about 55%, at least about 60%, at least about 65%, at least about 70%, at least about 75%, at least about 80%, at least about 85%, at least about 90%, at least about 95%, or about 100%.

### Therapeutic Window

[0734] The polynucleotides, primary constructs or mmRNA, when formulated into a composition with a delivery agent as described herein, can exhibit an increase in the therapeutic window of the administered polynucleotide, primary construct or mmRNA composition as compared to the therapeutic window of the administered polynucleotide, primary construct or mmRNA composition lacking a delivery agent as described herein. As used herein “therapeutic window” refers to the range of plasma concentrations, or the range of levels of therapeutically active substance at the site of action, with a high probability of eliciting a therapeutic effect. In some embodiments, the therapeutic window of the polynucleotide, primary construct or mmRNA when co-administered with a delivery agent as described herein can increase by at least about 2%, at least about 5%, at least about 10%, at least about 15%, at least about 20%, at least about 25%, at least about 30%, at least about 35%, at least about 40%, at least about 45%, at least about 50%, at least about 55%, at least about 60%, at least about 65%, at least about 70%, at least about 75%, at least about 80%, at least about 85%, at least about 90%, at least about 95%, or about 100%.

### Volume of Distribution

[0735] The polynucleotides, primary constructs or mmRNA, when formulated into a composition with a delivery agent as described herein, can exhibit an improved volume of distribution (V_{dist}), e.g., reduced or targeted, relative to a composition lacking a delivery agent as described herein. The volume of distribution (V_{dist}) relates the amount of the drug in the body to the concentration of the drug in the blood or plasma. As used herein, the term “volume of distribution” refers to the fluid volume that would be required to contain the total amount of the drug in the body at the same concentration as in the blood or plasma: V_{dist} equals the amount of drug in the body/concentration of drug in blood or plasma. For example, for a 10 mg dose and a plasma concentration of 10 mg/L, the volume of distribution would be 1 liter. The volume of distribution reflects the extent to which the drug is present in the extravascular tissue. A large volume of distribution reflects the tendency of a compound to bind to the tissue components compared with plasma protein binding. In a clinical setting, V_{dist} can be used to determine a loading dose to achieve a steady state concentration. In some embodiments, the volume of distribution of the polynucleotide, primary construct or mmRNA when co-administered with a delivery agent as described herein can decrease at least about 2%, at least about 5%, at least about 10%, at least about 15%, at least about 20%, at least about 25%, at least about 30%, at least about 35%, at least about 40%, at least about 45%, at least about 50%, at least about 55%, at least about 60%, at least about 65%, at least about 70%.

### Biological Effect

[0736] In one embodiment, the biological effect of the modified mRNA delivered to the animals may be categorized by analyzing the protein expression in the animals. The protein expression may be determined from analyzing a biological sample collected from a mammal administered the modified mRNA of the present invention. In one embodiment, the expression protein encoded by the modified mRNA administered to the mammal of at least 50 pg/ml may be preferred. For example, a protein expression of 50-200 pg/ml for the protein encoded by the modified mRNA delivered to the mammal may be seen as a therapeutically effective amount of protein in the mammal.

### Detection of Modified Nucleic Acids by Mass Spectrometry

[0737] Mass spectrometry (MS) is an analytical technique that can provide structural and molecular mass/concentration information on molecules after their conversion to ions. The molecules are first ionized to acquire positive or negative charges and then they travel through the mass analyzer to arrive at different areas of the detector according to their mass/charge (m/z) ratio.

[0738] Mass spectrometry is performed using a mass spectrometer which includes an ion source for ionizing the fractionated sample and creating charged molecules for further analysis. For example ionization of the sample may be performed by electrospray ionization (ESI), atmospheric pressure chemical ionization (APCI), photoionization, electron ionization, fast atom bombardment (FAB)/liquid secondary ionization (LSIMS), matrix assisted laser desorption/ionization (MALDI), field ionization, field desorption, thermospray/plasmaspray ionization, and particle beam ionization. The skilled artisan will understand that the choice of ionization method can be determined based on the analyte to be measured, type of sample, the type of detector, the choice of positive versus negative mode, etc.

[0739] After the sample has been ionized, the positively charged or negatively charged ions thereby created may be analyzed to determine a mass-to-charge ratio (i.e., m/z). Suitable analyzers for determining mass-to-charge ratios include quadropole analyzers, ion traps analyzers, and time-of-flight analyzers. The ions may be detected using several detection modes. For example, selected ions may be detected (i.e., using a selective ion monitoring mode (SIM)), or alternatively, ions may be detected using a scanning mode, e.g., multiple reaction monitoring (MRM) or selected reaction monitoring (SRM).

[0740] Liquid chromatography-multiple reaction monitoring (LC-MS/MRM) coupled with stable isotope labeled dilution of peptide standards has been shown to be an effective method for protein verification (e.g., Keshishian et al., Mol Cell Proteomics 2009 8:2339-2349; Kuhn et al., Clin Chem 2009 55:1108-1117; Lopez et al., Clin Chem 2010 56:281-290; each of which are herein incorporated by reference in its entirety). Unlike untargeted mass spectrometry frequently used in biomarker discovery studies, targeted MS methods are peptide sequence-based modes of MS that focus the full analytical capacity of the instrument on tens to hundreds of selected peptides in a complex mixture. By restricting detection and fragmentation to only those peptides derived from proteins of interest, sensitivity and reproducibility are improved dramatically compared to discovery-mode MS methods. This method of mass spectrometry-based multiple reaction monitoring (MRM) quantitation of proteins can dramatically impact the discovery and quantitation of biomarkers via rapid, targeted, multiplexed protein expression profiling of clinical samples.

[0741] In one embodiment, a biological sample which may contain at least one protein encoded by at least one modified mRNA of the present invention may be analyzed by the method of MRM-MS. The quantification of the biological sample may further include, but is not limited to, isotopically labeled peptides or proteins as internal standards.

[0742] According to the present invention, the biological sample, once obtained from the subject, may be subjected to enzyme digestion. As used herein, the term “digest” means to break apart into shorter peptides. As used herein, the phrase “treating a sample to digest proteins” means manipulating a sample in such a way as to break down proteins in a sample. These enzymes include, but are not limited to, trypsin, endoproteinase Glu-C and chymotrypsin. In one embodiment, a biological sample which may contain at least one protein encoded by at least one modified mRNA of the present invention may be digested using enzymes.

[0743] In one embodiment, a biological sample which may contain protein encoded by modified mRNA of the present invention may be analyzed for protein using electrospray ionization. Electrospray ionization (ESI) mass spectrometry (ESIMS) uses electrical energy to aid in the transfer of ions from the solution to the gaseous phase before they are analyzed by mass spectrometry. Samples may be analyzed using methods known in the art (e.g., Ho et al., Clin Biochem Rev. 2003 24(1): 3-12; herein incorporated by reference in its entirety). The ionic species contained in solution may be transferred into the gas phase by dispersing a fine spray of charge droplets, evaporating the solvent and ejecting the ions from the charged droplets to generate a mist of highly charged droplets. The mist of highly charged droplets may be analyzed using at least 1, at least 2, at least 3 or at least 4 mass analyzers such as, but not limited to, a quadropole mass analyzer. Further, the mass spectrometry method may include a purification step. As a non-limiting example, the first quadrapole may be set to select a single m/z ratio so it may filter out other molecular ions having a different m/z ratio which may eliminate complicated and time-consuming sample purification procedures prior to MS analysis.

[0744] In one embodiment, a biological sample which may contain protein encoded by modified mRNA of the present invention may be analyzed for protein in a tandem ESIMS system (e.g., MS/MS). As non-limiting examples, the droplets may be analyzed using a product scan (or daughter scan) a precursor scan (parent scan) a neutral loss or a multiple reaction monitoring.

[0745] In one embodiment, a biological sample which may contain protein encoded by modified mRNA of the present invention may be analyzed using matrix-assisted laser desorption/ionization (MALDI) mass spectrometry (MALDIMS). MALDI provides for the nondestructive vaporization and ionization of both large and small molecules, such as proteins. In MALDI analysis, the analyte is first co-crystallized with a large molar excess of a matrix compound, which may also include, but is not limited to, an ultraviolet absorbing weak organic acid. Non-limiting examples of matrices used in MALDI are α-cyano-4-hydroxycinnamic acid, 3,5-dimethoxy-4-hydroxycinnamic acid and 2,5-dihydroxybenzoic acid. Laser radiation of the analyte-matrix mixture may result in the vaporization of the matrix and the analyte. The laser induced desorption provides high ion yields of the intact analyte and allows for measurement of compounds with high accuracy. Samples may be analyzed using methods known in the art (e.g., Lewis, Wei and Siuzdak, Encyclopedia of Analytical Chemistry 2000:5880-5894; herein incorporated by reference in its entirety). As non-limiting examples, mass analyzers used in the MALDI analysis may include a linear time-of-flight (TOF), a TOF reflectron or a Fourier transform mass analyzer.

[0746] In one embodiment, the analyte-matrix mixture may be formed using the dried-droplet method. A biologic sample is mixed with a matrix to create a saturated matrix solution where the matrix-to-sample ratio is approximately 5000:1. An aliquot (approximately 0.5-2.0 uL) of the saturated matrix solution is then allowed to dry to form the analyte-matrix mixture.

[0747] In one embodiment, the analyte-matrix mixture may be formed using the thin-layer method. A matrix homogeneous film is first formed and then the sample is then applied and may be absorbed by the matrix to form the analyte-matrix mixture.

[0748] In one embodiment, the analyte-matrix mixture may be formed using the thick-layer method. A matrix homogeneous film is formed with a nitro-cellulose matrix additive. Once the uniform nitro-cellulose matrix layer is obtained the sample is applied and absorbed into the matrix to form the analyte-matrix mixture.

[0749] In one embodiment, the analyte-matrix mixture may be formed using the sandwich method. A thin layer of matrix crystals is prepared as in the thin-layer method followed by the addition of droplets of aqueous trifluoroacetic acid, the sample and matrix. The sample is then absorbed into the matrix to form the analyte-matrix mixture.

### V. Uses of Polynucleotides, Primary Constructs and mmRNA of the Invention

[0750] The polynucleotides, primary constructs and mmRNA of the present invention are designed, in preferred embodiments, to provide for avoidance or evasion of deleterious bio-responses such as the immune response and/or degradation pathways, overcoming the threshold of expression and/or improving protein production capacity, improved expression rates or translation efficiency, improved drug or protein half life and/or protein concentrations, optimized protein localization, to improve one or more of the stability and/or clearance in tissues, receptor uptake and/or kinetics, cellular access by the compositions, engagement with translational machinery, secretion efficiency (when applicable), accessibility to circulation, and/or modulation of a cell's status, function and/or activity.

### Therapeutics

### Therapeutic Agents

[0751] The polynucleotides, primary constructs or mmRNA of the present invention, such as modified nucleic acids and modified RNAs, and the proteins translated from them described herein can be used as therapeutic or prophylactic agents. They are provided for use in medicine. For example, a polynucleotide, primary construct or mmRNA described herein can be administered to a subject, wherein the polynucleotide, primary construct or mmRNA is translated in vivo to produce a therapeutic or prophylactic polypeptide in the subject. Provided are compositions, methods, kits, and reagents for diagnosis, treatment or prevention of a disease or condition in humans and other mammals. The active therapeutic agents of the invention include polynucleotides, primary constructs or mmRNA, cells containing polynucleotides, primary constructs or mmRNA or polypeptides translated from the polynucleotides, primary constructs or mmRNA.

[0752] In certain embodiments, provided herein are combination therapeutics containing one or more polynucleotide, primary construct or mmRNA containing translatable regions that encode for a protein or proteins that boost a mammalian subject's immunity along with a protein that induces antibody-dependent cellular toxicity. For example, provided herein are therapeutics containing one or more nucleic acids that encode trastuzumab and granulocyte-colony stimulating factor (G-CSF). In particular, such combination therapeutics are useful in Her2+ breast cancer patients who develop induced resistance to trastuzumab. (See, e.g., Albrecht, Immunotherapy. 2 (6): 795-8 (2010)).

[0753] Provided herein are methods of inducing translation of a recombinant polypeptide in a cell population using the polynucleotide, primary construct or mmRNA described herein. Such translation can be in vivo, ex vivo, in culture, or in vitro. The cell population is contacted with an effective amount of a composition containing a nucleic acid that has at least one nucleoside modification, and a translatable region encoding the recombinant polypeptide. The population is contacted under conditions such that the nucleic acid is localized into one or more cells of the cell population and the recombinant polypeptide is translated in the cell from the nucleic acid.

[0754] An “effective amount” of the composition is provided based, at least in part, on the target tissue, target cell type, means of administration, physical characteristics of the nucleic acid (e.g., size, and extent of modified nucleosides), and other determinants. In general, an effective amount of the composition provides efficient protein production in the cell, preferably more efficient than a composition containing a corresponding unmodified nucleic acid. Increased efficiency may be demonstrated by increased cell transfection (i.e., the percentage of cells transfected with the nucleic acid), increased protein translation from the nucleic acid, decreased nucleic acid degradation (as demonstrated, e.g., by increased duration of protein translation from a modified nucleic acid), or reduced innate immune response of the host cell.

[0755] Aspects of the invention are directed to methods of inducing in vivo translation of a recombinant polypeptide in a mammalian subject in need thereof. Therein, an effective amount of a composition containing a nucleic acid that has at least one structural or chemical modification and a translatable region encoding the recombinant polypeptide is administered to the subject using the delivery methods described herein. The nucleic acid is provided in an amount and under other conditions such that the nucleic acid is localized into a cell of the subject and the recombinant polypeptide is translated in the cell from the nucleic acid. The cell in which the nucleic acid is localized, or the tissue in which the cell is present, may be targeted with one or more than one rounds of nucleic acid administration.

[0756] In certain embodiments, the administered polynucleotide, primary construct or mmRNA directs production of one or more recombinant polypeptides that provide a functional activity which is substantially absent in the cell, tissue or organism in which the recombinant polypeptide is translated. For example, the missing functional activity may be enzymatic, structural, or gene regulatory in nature. In related embodiments, the administered polynucleotide, primary construct or mmRNA directs production of one or more recombinant polypeptides that increases (e.g., synergistically) a functional activity which is present but substantially deficient in the cell in which the recombinant polypeptide is translated.

[0757] In other embodiments, the administered polynucleotide, primary construct or mmRNA directs production of one or more recombinant polypeptides that replace a polypeptide (or multiple polypeptides) that is substantially absent in the cell in which the recombinant polypeptide is translated. Such absence may be due to genetic mutation of the encoding gene or regulatory pathway thereof. In some embodiments, the recombinant polypeptide increases the level of an endogenous protein in the cell to a desirable level; such an increase may bring the level of the endogenous protein from a subnormal level to a normal level or from a normal level to a super-normal level.

[0758] Alternatively, the recombinant polypeptide functions to antagonize the activity of an endogenous protein present in, on the surface of, or secreted from the cell. Usually, the activity of the endogenous protein is deleterious to the subject; for example, due to mutation of the endogenous protein resulting in altered activity or localization. Additionally, the recombinant polypeptide antagonizes, directly or indirectly, the activity of a biological moiety present in, on the surface of, or secreted from the cell. Examples of antagonized biological moieties include lipids (e.g., cholesterol), a lipoprotein (e.g., low density lipoprotein), a nucleic acid, a carbohydrate, a protein toxin such as shiga and tetanus toxins, or a small molecule toxin such as botulinum, cholera, and diphtheria toxins. Additionally, the antagonized biological molecule may be an endogenous protein that exhibits an undesirable activity, such as a cytotoxic or cytostatic activity.

[0759] The recombinant proteins described herein may be engineered for localization within the cell, potentially within a specific compartment such as the nucleus, or are engineered for secretion from the cell or translocation to the plasma membrane of the cell.

[0760] In some embodiments, modified mRNAs and their encoded polypeptides in accordance with the present invention may be used for treatment of any of a variety of diseases, disorders, and/or conditions, including but not limited to one or more of the following: autoimmune disorders (e.g. diabetes, lupus, multiple sclerosis, psoriasis, rheumatoid arthritis); inflammatory disorders (e.g. arthritis, pelvic inflammatory disease); infectious diseases (e.g. viral infections (e.g., HIV, HCV, RSV), bacterial infections, fungal infections, sepsis); neurological disorders (e.g. Alzheimer's disease, Huntington's disease; autism; Duchenne muscular dystrophy); cardiovascular disorders (e.g. atherosclerosis, hypercholesterolemia, thrombosis, clotting disorders, angiogenic disorders such as macular degeneration); proliferative disorders (e.g. cancer, benign neoplasms); respiratory disorders (e.g. chronic obstructive pulmonary disease); digestive disorders (e.g. inflammatory bowel disease, ulcers); musculoskeletal disorders (e.g. fibromyalgia, arthritis); endocrine, metabolic, and nutritional disorders (e.g. diabetes, osteoporosis); urological disorders (e.g. renal disease); psychological disorders (e.g. depression, schizophrenia); skin disorders (e.g. wounds, eczema); blood and lymphatic disorders (e.g. anemia, hemophilia); etc.

[0761] Diseases characterized by dysfunctional or aberrant protein activity include cystic fibrosis, sickle cell anemia, epidermolysis bullosa, amyotrophic lateral sclerosis, and glucose-6-phosphate dehydrogenase deficiency. The present invention provides a method for treating such conditions or diseases in a subject by introducing nucleic acid or cell-based therapeutics containing the polynucleotide, primary construct or mmRNA provided herein, wherein the polynucleotide, primary construct or mmRNA encode for a protein that antagonizes or otherwise overcomes the aberrant protein activity present in the cell of the subject. Specific examples of a dysfunctional protein are the missense mutation variants of the cystic fibrosis transmembrane conductance regulator (CFTR) gene, which produce a dysfunctional protein variant of CFTR protein, which causes cystic fibrosis.

[0762] Diseases characterized by missing (or substantially diminished such that proper (normal or physiological protein function does not occur) protein activity include cystic fibrosis, Niemann-Pick type C, β thalassemia major, Duchenne muscular dystrophy, Hurler Syndrome, Hunter Syndrome, and Hemophilia A. Such proteins may not be present, or are essentially non-functional. The present invention provides a method for treating such conditions or diseases in a subject by introducing nucleic acid or cell-based therapeutics containing the polynucleotide, primary construct or mmRNA provided herein, wherein the polynucleotide, primary construct or mmRNA encode for a protein that replaces the protein activity missing from the target cells of the subject. Specific examples of a dysfunctional protein are the nonsense mutation variants of the cystic fibrosis transmembrane conductance regulator (CFTR) gene, which produce a nonfunctional protein variant of CFTR protein, which causes cystic fibrosis.

[0763] Thus, provided are methods of treating cystic fibrosis in a mammalian subject by contacting a cell of the subject with a polynucleotide, primary construct or mmRNA having a translatable region that encodes a functional CFTR polypeptide, under conditions such that an effective amount of the CTFR polypeptide is present in the cell. Preferred target cells are epithelial, endothelial and mesothelial cells, such as the lung, and methods of administration are determined in view of the target tissue; i.e., for lung delivery, the RNA molecules are formulated for administration by inhalation.

[0764] In another embodiment, the present invention provides a method for treating hyperlipidemia in a subject, by introducing into a cell population of the subject with a modified mRNA molecule encoding Sortilin, a protein recently characterized by genomic studies, thereby ameliorating the hyperlipidemia in a subject. The SORT1 gene encodes a trans-Golgi network (TGN) transmembrane protein called Sortilin. Genetic studies have shown that one of five individuals has a single nucleotide polymorphism, rs12740374, in the 1p13 locus of the SORT1 gene that predisposes them to having low levels of low-density lipoprotein (LDL) and very-low-density lipoprotein (VLDL). Each copy of the minor allele, present in about 30% of people, alters LDL cholesterol by 8 mg/dL, while two copies of the minor allele, present in about 5% of the population, lowers LDL cholesterol 16 mg/dL. Carriers of the minor allele have also been shown to have a 40% decreased risk of myocardial infarction. Functional in vivo studies in mice describes that overexpression of SORT1 in mouse liver tissue led to significantly lower LDL-cholesterol levels, as much as 80% lower, and that silencing SORT1 increased LDL cholesterol approximately 200% (Musunuru K et al. From noncoding variant to phenotype via SORT1 at the 1p13 cholesterol locus. Nature 2010; 466:714-721).

[0765] In another embodiment, the present invention provides a method for treating hematopoietic disorders, cardiovascular disease, oncology, diabetes, cystic fibrosis, neurological diseases, inborn errors of metabolism, skin and systemic disorders, and blindness. The identity of molecular targets to treat these specific diseases has been described (Templeton ed., Gene and Cell Therapy: Therapeutic Mechanisms and Strategies, 3^{rd} Edition, Bota Raton, FL: CRC Press; herein incorporated by reference in its entirety).

[0766] Provided herein, are methods to prevent infection and/or sepsis in a subject at risk of developing infection and/or sepsis, the method comprising administering to a subject in need of such prevention a composition comprising a polynucleotide, primary construct or mmRNA precursor encoding an anti-microbial polypeptide (e.g., an anti-bacterial polypeptide), or a partially or fully processed form thereof in an amount sufficient to prevent infection and/or sepsis. In certain embodiments, the subject at risk of developing infection and/or sepsis may be a cancer patient. In certain embodiments, the cancer patient may have undergone a conditioning regimen. In some embodiments, the conditioning regiment may include, but is not limited to, chemotherapy, radiation therapy, or both. As a non-limiting example, a polynucleotide, primary construct or mmRNA can encode Protein C, its zymogen or prepro-protein, the activated form of Protein C (APC) or variants of Protein C which are known in the art. The polynucleotides, primary constructs or mmRNA may be chemically modified and delivered to cells. Non-limiting examples of polypeptides which may be encoded within the chemically modified mRNAs of the present invention include those taught in U.S. Pat. Nos. 7,226,999; 7,498,305; 6,630,138 each of which is incorporated herein by reference in its entirety. These patents teach Protein C like molecules, variants and derivatives, any of which may be encoded within the chemically modified molecules of the present invention.

[0767] Further provided herein, are methods to treat infection and/or sepsis in a subject, the method comprising administering to a subject in need of such treatment a composition comprising a polynucleotide, primary construct or mmRNA precursor encoding an anti-microbial polypeptide (e.g., an anti-bacterial polypeptide), e.g., an anti-microbial polypeptide described herein, or a partially or fully processed form thereof in an amount sufficient to treat an infection and/or sepsis. In certain embodiments, the subject in need of treatment is a cancer patient. In certain embodiments, the cancer patient has undergone a conditioning regimen. In some embodiments, the conditioning regiment may include, but is not limited to, chemotherapy, radiation therapy, or both.

[0768] In certain embodiments, the subject may exhibits acute or chronic microbial infections (e.g., bacterial infections). In certain embodiments, the subject may have received or may be receiving a therapy. In certain embodiments, the therapy may include, but is not limited to, radiotherapy, chemotherapy, steroids, ultraviolet radiation, or a combination thereof. In certain embodiments, the patient may suffer from a microvascular disorder. In some embodiments, the microvascular disorder may be diabetes. In certain embodiments, the patient may have a wound. In some embodiments, the wound may be an ulcer. In a specific embodiment, the wound may be a diabetic foot ulcer. In certain embodiments, the subject may have one or more burn wounds. In certain embodiments, the administration may be local or systemic. In certain embodiments, the administration may be subcutaneous. In certain embodiments, the administration may be intravenous. In certain embodiments, the administration may be oral. In certain embodiments, the administration may be topical. In certain embodiments, the administration may be by inhalation. In certain embodiments, the administration may be rectal. In certain embodiments, the administration may be vaginal.

[0769] Other aspects of the present disclosure relate to transplantation of cells containing polynucleotide, primary construct, or mmRNA to a mammalian subject. Administration of cells to mammalian subjects is known to those of ordinary skill in the art, and include, but is not limited to, local implantation (e.g., topical or subcutaneous administration), organ delivery or systemic injection (e.g., intravenous injection or inhalation), and the formulation of cells in pharmaceutically acceptable carrier. Such compositions containing polynucleotide, primary construct, or mmRNA can be formulated for administration intramuscularly, transarterially, intraperitoneally, intravenously, intranasally, subcutaneously, endoscopically, transdermally, or intrathecally. In some embodiments, the composition may be formulated for extended release.

[0770] The subject to whom the therapeutic agent may be administered suffers from or may be at risk of developing a disease, disorder, or deleterious condition. Provided are methods of identifying, diagnosing, and classifying subjects on these bases, which may include clinical diagnosis, biomarker levels, genome-wide association studies (GWAS), and other methods known in the art.

### Wound Management

[0771] The polynucleotides, primary constructs or mmRNA of the present invention may be used for wound treatment, e.g. of wounds exhibiting delayed healing. Provided herein are methods comprising the administration of polynucleotide, primary construct or mmRNA in order to manage the treatment of wounds. The methods herein may further comprise steps carried out either prior to, concurrent with or post administration of the polynucleotide, primary construct or mmRNA. For example, the wound bed may need to be cleaned and prepared in order to facilitate wound healing and hopefully obtain closure of the wound. Several strategies may be used in order to promote wound healing and achieve wound closure including, but not limited to: (i) debridement, optionally repeated, sharp debridement (surgical removal of dead or infected tissue from a wound), optionally including chemical debriding agents, such as enzymes, to remove necrotic tissue; (ii) wound dressings to provide the wound with a moist, warm environment and to promote tissue repair and healing.

[0772] Examples of materials that are used in formulating wound dressings include, but are not limited to: hydrogels (e.g., AQUASORB®; DUODERM®), hydrocolloids (e.g., AQUACEL®; COMFEEL®), foams (e.g., LYOFOAM®; SPYROSORB®), and alginates (e.g., ALGISITE®; CURASORB®); (iii) additional growth factors to stimulate cell division and proliferation and to promote wound healing e.g. becaplermin (REGRANEX GEL®), a human recombinant platelet-derived growth factor that is approved by the FDA for the treatment of neuropathic foot ulcers; (iv) soft-tissue wound coverage, a skin graft may be necessary to obtain coverage of clean, non-healing wounds. Examples of skin grafts that may be used for soft-tissue coverage include, but are not limited to: autologous skin grafts, cadaveric skin graft, bioengineered skin substitutes (e.g., APLIGRAF®; DERMAGRAFT®).

[0773] In certain embodiments, the polynucleotide, primary construct or mmRNA of the present invention may further include hydrogels (e.g., AQUASORB®; DUODERM®), hydrocolloids (e.g., AQUACEL®; COMFEEL®), foams (e.g., LYOFOAM®; SPYROSORB®), and/or alginates (e.g., ALGISITE®; CURASORB®). In certain embodiments, the polynucleotide, primary construct or mmRNA of the present invention may be used with skin grafts including, but not limited to, autologous skin grafts, cadaveric skin graft, or bioengineered skin substitutes (e.g., APLIGRAF®; DERMAGRAFT®). In some embodiments, the polynucleotide, primary construct or mmRNA may be applied with would dressing formulations and/or skin grafts or they may be applied separately but methods such as, but not limited to, soaking or spraying.

[0774] In some embodiments, compositions for wound management may comprise a polynucleotide, primary construct or mmRNA encoding for an anti-microbial polypeptide (e.g., an anti-bacterial polypeptide) and/or an anti-viral polypeptide. A precursor or a partially or fully processed form of the anti-microbial polypeptide may be encoded. The composition may be formulated for administration using a bandage (e.g., an adhesive bandage). The anti-microbial polypeptide and/or the anti-viral polypeptide may be intermixed with the dressing compositions or may be applied separately, e.g., by soaking or spraying.

### Production of Antibodies

[0775] In one embodiment of the invention, the polynucleotides, primary constructs or mmRNA may encode antibodies and fragments of such antibodies. These may be produced by any one of the methods described herein. The antibodies may be of any of the different subclasses or isotypes of immunoglobulin such as, but not limited to, IgA, IgG, or IgM, or any of the other subclasses. Exemplary antibody molecules and fragments that may be prepared according to the invention include, but are not limited to, immunoglobulin molecules, substantially intact immunoglobulin molecules and those portions of an immunoglobulin molecule that may contain the paratope. Such portion of antibodies that contain the paratope include, but are not limited to Fab, Fab′, F(ab′)₂, F(v) and those portions known in the art.

[0776] The polynucleotides of the invention may encode variant antibody polypeptides which may have a certain identity with a reference polypeptide sequence, or have a similar or dissimilar binding characteristic with the reference polypeptide sequence.

[0777] Antibodies obtained by the methods of the present invention may be chimeric antibodies comprising non-human antibody-derived variable region(s) sequences, derived from the immunized animals, and human antibody-derived constant region(s) sequences. In addition, they can also be humanized antibodies comprising complementary determining regions (CDRs) of non-human antibodies derived from the immunized animals and the framework regions (FRs) and constant regions derived from human antibodies. In another embodiment, the methods provided herein may be useful for enhancing antibody protein product yield in a cell culture process.

### Managing Infection

[0778] In one embodiment, provided are methods for treating or preventing a microbial infection (e.g., a bacterial infection) and/or a disease, disorder, or condition associated with a microbial or viral infection, or a symptom thereof, in a subject, by administering a polynucleotide, primary construct or mmRNA encoding an anti-microbial polypeptide. Said administration may be in combination with an anti-microbial agent (e.g., an anti-bacterial agent), e.g., an anti-microbial polypeptide or a small molecule anti-microbial compound described herein. The anti-microbial agents include, but are not limited to, anti-bacterial agents, anti-viral agents, anti-fungal agents, anti-protozoal agents, anti-parasitic agents, and anti-prion agents.

[0779] The agents can be administered simultaneously, for example in a combined unit dose (e.g., providing simultaneous delivery of both agents). The agents can also be administered at a specified time interval, such as, but not limited to, an interval of minutes, hours, days or weeks. Generally, the agents may be concurrently bioavailable, e.g., detectable, in the subject. In some embodiments, the agents may be administered essentially simultaneously, for example two unit dosages administered at the same time, or a combined unit dosage of the two agents. In other embodiments, the agents may be delivered in separate unit dosages. The agents may be administered in any order, or as one or more preparations that includes two or more agents. In a preferred embodiment, at least one administration of one of the agents, e.g., the first agent, may be made within minutes, one, two, three, or four hours, or even within one or two days of the other agent, e.g., the second agent. In some embodiments, combinations can achieve synergistic results, e.g., greater than additive results, e.g., at least 25, 50, 75, 100, 200, 300, 400, or 500% greater than additive results.

Conditions Associated with Bacterial Infection

[0780] Diseases, disorders, or conditions which may be associated with bacterial infections include, but are not limited to one or more of the following: abscesses, actinomycosis, acute prostatitis, Aeromonas hydrophila, annual ryegrass toxicity, anthrax, bacillary peliosis, bacteremia, bacterial gastroenteritis, bacterial meningitis, bacterial pneumonia, bacterial vaginosis, bacterium-related cutaneous conditions, bartonellosis, BCG-oma, botryomycosis, botulism, Brazilian purpuric fever, Brodie abscess, brucellosis, Buruli ulcer, campylobacteriosis, caries, Carrion's disease, cat scratch disease, cellulitis, chlamydia infection, cholera, chronic bacterial prostatitis, chronic recurrent multifocal osteomyelitis, clostridial necrotizing enteritis, combined periodontic-endodontic lesions, contagious bovine pleuropneumonia, diphtheria, diphtheritic stomatitis, ehrlichiosis, erysipelas, piglottitis, erysipelas, Fitz-Hugh-Curtis syndrome, flea-borne spotted fever, foot rot (infectious pododermatitis), Garre's sclerosing osteomyelitis, Gonorrhea, Granuloma inguinale, human granulocytic anaplasmosis, human monocytotropic ehrlichiosis, hundred days' cough, impetigo, late congenital syphilitic oculopathy, legionellosis, Lemierre's syndrome, leprosy (Hansen's Disease), leptospirosis, listeriosis, Lyme disease, lymphadenitis, melioidosis, meningococcal disease, meningococcal septicaemia, methicillin-resistant Staphylococcus aureus (MRSA) infection, Mycobacterium avium-intracellulare (MAI), mycoplasma pneumonia, necrotizing fasciitis, nocardiosis, noma (cancrum oris or gangrenous stomatitis), omphalitis, orbital cellulitis, osteomyelitis, overwhelming post-splenectomy infection (OPSI), ovine brucellosis, pasteurellosis, periorbital cellulitis, pertussis (whooping cough), plague, pneumococcal pneumonia, Pott disease, proctitis, pseudomonas infection, psittacosis, pyaemia, pyomyositis, Q fever, relapsing fever (typhinia), rheumatic fever, Rocky Mountain spotted fever (RMSF), rickettsiosis, salmonellosis, scarlet fever, sepsis, serratia infection, shigellosis, southern tick-associated rash illness, staphylococcal scalded skin syndrome, streptococcal pharyngitis, swimming pool granuloma, swine brucellosis, syphilis, syphilitic aortitis, tetanus, toxic shock syndrome (TSS), trachoma, trench fever, tropical ulcer, tuberculosis, tularemia, typhoid fever, typhus, urogenital tuberculosis, urinary tract infections, vancomycin-resistant Staphylococcus aureus infection, Waterhouse-Friderichsen syndrome, pseudotuberculosis (Yersinia) disease, and yersiniosis. Other diseases, disorders, and/or conditions associated with bacterial infections can include, for example, Alzheimer's disease, anorexia nervosa, asthma, atherosclerosis, attention deficit hyperactivity disorder, autism, autoimmune diseases, bipolar disorder, cancer (e.g., colorectal cancer, gallbladder cancer, lung cancer, pancreatic cancer, and stomach cancer), chronic fatigue syndrome, chronic obstructive pulmonary disease, Crohn's disease, coronary heart disease, dementia, depression, Guillain-Barré syndrome, metabolic syndrome, multiple sclerosis, myocardial infarction, obesity, obsessive-compulsive disorder, panic disorder, psoriasis, rheumatoid arthritis, sarcoidosis, schizophrenia, stroke, thromboangiitis obliterans (Buerger's disease), and Tourette syndrome.

### Bacterial Pathogens

[0781] The bacterium described herein can be a Gram-positive bacterium or a Gram-negative bacterium. Bacterial pathogens include, but are not limited to, Acinetobacter baumannii, Bacillus anthracis, Bacillus subtilis, Bordetella pertussis, Borrelia burgdorferi, Brucella abortus, Brucella canis, Brucella melitensis, Brucella suis, Campylobacter jejuni, Chlamydia pneumoniae, Chlamydia trachomatis, Chlamydophila psittaci, Clostridium botulinum, Clostridium difficile, Clostridium perfringens, Clostridium tetani, coagulase Negative Staphylococcus, Corynebacterium diphtheria, Enterococcus faecalis, Enterococcus faecium, Escherichia coli, enterotoxigenic Escherichia coli (ETEC), enteropathogenic E. coli, E. coli O157:H7, Enterobacter sp., Francisella tularensis, Haemophilus influenzae, Helicobacter pylori, Klebsiella pneumoniae, Legionella pneumophila, Leptospira interrogans, Listeria monocytogenes, Moraxella catarralis, Mycobacterium leprae, Mycobacterium tuberculosis, Mycoplasma pneumoniae, Neisseria gonorrhoeae, Neisseria meningitides, Preteus mirabilis, Proteus sps., Pseudomonas aeruginosa, Rickettsia rickettsii, Salmonella typhi, Salmonella typhimurium, Serratia marcesens, Shigella flexneri, Shigella sonnei, Staphylococcus aureus, Staphylococcus epidermidis, Staphylococcus saprophyticus, Streptococcus agalactiae, Streptococcus mutans, Streptococcus pneumoniae, Streptococcus pyogenes, Treponema pallidum, Vibrio cholerae, and Yersinia pestis. Bacterial pathogens may also include bacteria that cause resistant bacterial infections, for example, clindamycin-resistant Clostridium difficile, fluoroquinolon-resistant Clostridium difficile, methicillin-resistant Staphylococcus aureus (MRSA), multidrug-resistant Enterococcus faecalis, multidrug-resistant Enterococcus faecium, multidrug-resistance Pseudomonas aeruginosa, multidrug-resistant Acinetobacter baumannii, and vancomycin-resistant Staphylococcus aureus (VRSA).

### Antibiotic Combinations

[0782] In one embodiment, the modified mRNA of the present invention may be administered in conjunction with one or more antibiotics. These include, but are not limited to Aknilox, Ambisome, Amoxycillin, Ampicillin, Augmentin, Avelox, Azithromycin, Bactroban, Betadine, Betnovate, Blephamide, Cefaclor, Cefadroxil, Cefdinir, Cefepime, Cefix, Cefixime, Cefoxitin, Cefpodoxime, Cefprozil, Cefuroxime, Cefzil, Cephalexin, Cephazolin, Ceptaz, Chloramphenicol, Chlorhexidine, Chloromycetin, Chlorsig, Ciprofloxacin, Clarithromycin, Clindagel, Clindamycin, Clindatech, Cloxacillin, Colistin, Co-trimoxazole, Demeclocycline, Diclocil, Dicloxacillin, Doxycycline, Duricef, Erythromycin, Flamazine, Floxin, Framycetin, Fucidin, Furadantin, Fusidic, Gatifloxacin, Gemifloxacin, Gemifloxacin, Ilosone, Iodine, Levaquin, Levofloxacin, Lomefloxacin, Maxaquin, Mefoxin, Meronem, Minocycline, Moxifloxacin, Myambutol, Mycostatin, Neosporin, Netromycin, Nitrofurantoin, Norfloxacin, Norilet, Ofloxacin, Omnicef, Ospamox, Oxytetracycline, Paraxin, Penicillin, Pneumovax, Polyfax, Povidone, Rifadin, Rifampin, Rifaximin, Rifinah, Rimactane, Rocephin, Roxithromycin, Seromycin, Soframycin, Sparfloxacin, Staphlex, Targocid, Tetracycline, Tetradox, Tetralysal, tobramycin, Tobramycin, Trecator, Tygacil, Vancocin, Velosef, Vibramycin, Xifaxan, Zagam, Zitrotek, Zoderm, Zymar, and Zyvox.

### Antibacterial Agents

[0783] Exemplary anti-bacterial agents include, but are not limited to, aminoglycosides (e.g., amikacin (AMIKIN®), gentamicin (GARAMYCIN®), kanamycin (KANTREX®), neomycin (MYCIFRADIN®), netilmicin (NETROMYCIN®), tobramycin (NEBCIN®), Paromomycin (HUMATIN®)), ansamycins (e.g., geldanamycin, herbimycin), carbacephem (e.g., loracarbef (LORABID®), Carbapenems (e.g., ertapenem (INVANZ®), doripenem (DORIBAX®), imipenem/cilastatin (PRIMAXIN®), meropenem (MERREM®), cephalosporins (first generation) (e.g., cefadroxil (DURICEF®), cefazolin (ANCEF®), cefalotin or cefalothin (KEFLIN®), cefalexin (KEFLEX®), cephalosporins (second generation) (e.g., cefaclor (CECLOR®), cefamandole (MANDOL®), cefoxitin (MEFOXIN®), cefprozil (CEFZIL®), cefuroxime (CEFTIN®, ZINNAT®)), cephalosporins (third generation) (e.g., cefixime (SUPRAX®), cefdinir (OMNICEF®, CEFDIEL®), cefditoren (SPECTRACEF®), cefoperazone (CEFOBID®), cefotaxime (CLAFORAN®), cefpodoxime (VANTIN®), ceftazidime (FORTAZ®), ceftibuten (CEDAX®), ceftizoxime (CEFIZOX®), ceftriaxone (ROCEPHIN®)), cephalosporins (fourth generation) (e.g., cefepime (MAXIPIME®)), cephalosporins (fifth generation) (e.g., ceftobiprole (ZEFTERA®)), glycopeptides (e.g., teicoplanin (TARGOCID®), vancomycin (VANCOCIN®), telavancin (VIBATIV®)), lincosamides (e.g., clindamycin (CLEOCIN®), lincomycin (LINCOCIN®)), lipopeptide (e.g., daptomycin (CUBICIN®)), macrolides (e.g., azithromycin (ZITHROMAX®, SUMAMED®, ZITROCIN®), clarithromycin (BIAXIN®), dirithromycin (DYNABAC®), erythromycin (ERYTHOCIN®, ERYTHROPED®), roxithromycin, troleandomycin (TAO®), telithromycin (KETEK®), spectinomycin (TROBICIN®)), monobactams (e.g., aztreonam (AZACTAM®)), nitrofurans (e.g., furazolidone (FUROXONE®), nitrofurantoin (MACRODANTIN®, MACROBID®)), penicillins (e.g., amoxicillin (NOVAMOX®, AMOXIL®), ampicillin (PRINCIPEN®), azlocillin, carbenicillin (GEOCILLIN®), cloxacillin (TEGOPEN®), dicloxacillin (DYNAPEN®), flucloxacillin (FLOXAPEN®), mezlocillin (MEZLIN®), methicillin (STAPHCILLIN®), nafcillin (UNIPEN®), oxacillin (PROSTAPHLIN®), penicillin G (PENTIDS®), penicillin V (PEN-VEE-K®), piperacillin (PIPRACIL®), temocillin (NEGABAN®), ticarcillin (TICAR®)), penicillin combinations (e.g., amoxicillin/clavulanate (AUGMENTIN®), ampicillin/sulbactam (UNASYN®), piperacillin/tazobactam (ZOSYN®), ticarcillin/clavulanate (TIMENTIN®)), polypeptides (e.g., bacitracin, colistin (COLY-MYCIN-S®), polymyxin B, quinolones (e.g., ciprofloxacin (CIPRO®, CIPROXIN®, CIPROBAY®), enoxacin (PENETREX®), gatifloxacin (TEQUIN®), levofloxacin (LEVAQUIN®), lomefloxacin (MAXAQUIN®), moxifloxacin (AVELOX®), nalidixic acid (NEGGRAM®), norfloxacin (NOROXIN®), ofloxacin (FLOXIN®, OCUFLOX®), trovafloxacin (TROVAN®), grepafloxacin (RAXAR®), sparfloxacin (ZAGAM®), temafloxacin (OMNIFLOX®)), sulfonamides (e.g., mafenide (SULFAMYLON®), sulfonamidochrysoidine (PRONTOSIL®), sulfacetamide (SULAMYD®, BLEPH-10®), sulfadiazine (MICRO-SULFON®), silver sulfadiazine (SILVADENE®), sulfamethizole (THIOSULFIL FORTE®), sulfamethoxazole (GANTANOL®), sulfanilimide, sulfasalazine (AZULFIDINE®), sulfisoxazole (GANTRISIN®), trimethoprim (PROLOPRIM®), TRIMPEX®), trimethoprim-sulfamethoxazole (co-trimoxazole) (TMP-SMX) (BACTRIM®, SEPTRA®)), tetracyclines (e.g., demeclocycline (DECLOMYCIN®), doxycycline (VIBRAMYCIN®), minocycline (MINOCIN®), oxytetracycline (TERRAMYCIN®), tetracycline (SUMYCIN®, ACHROMYCIN® V, STECLIN®)), drugs against mycobacteria (e.g., clofazimine (LAMPRENE®), dapsone (AVLOSULFON®), capreomycin (CAPASTAT®), cycloserine (SEROMYCIN®), ethambutol (MYAMBUTOL®), ethionamide (TRECATOR®), isoniazid (I.N.H.®), pyrazinamide (ALDINAMIDE®), rifampin (RIFADIN®, RIMACTANE®), rifabutin (MYCOBUTIN®), rifapentine (PRIFTIN®), streptomycin), and others (e.g., arsphenamine (SALVARSAN®), chloramphenicol (CHLOROMYCETIN®), fosfomycin (MONUROL®), fusidic acid (FUCIDIN®), linezolid (ZYVOX®), metronidazole (FLAGYL®), mupirocin (BACTROBAN®), platensimycin, quinupristin/dalfopristin (SYNERCID®), rifaximin (XIFAXAN®), thiamphenicol, tigecycline (TIGACYL®), tinidazole (TINDAMAX®, FASIGYN®)).

Conditions Associated with Viral Infection

[0784] In another embodiment, provided are methods for treating or preventing a viral infection and/or a disease, disorder, or condition associated with a viral infection, or a symptom thereof, in a subject, by administering a polynucleotide, primary construct or mmRNA encoding an anti-viral polypeptide, e.g., an anti-viral polypeptide described herein in combination with an anti-viral agent, e.g., an anti-viral polypeptide or a small molecule anti-viral agent described herein.

[0785] Diseases, disorders, or conditions associated with viral infections include, but are not limited to, acute febrile pharyngitis, pharyngoconjunctival fever, epidemic keratoconjunctivitis, infantile gastroenteritis, Coxsackie infections, infectious mononucleosis, Burkitt lymphoma, acute hepatitis, chronic hepatitis, hepatic cirrhosis, hepatocellular carcinoma, primary HSV-1 infection (e.g., gingivostomatitis in children, tonsillitis and pharyngitis in adults, keratoconjunctivitis), latent HSV-1 infection (e.g., herpes labialis and cold sores), primary HSV-2 infection, latent HSV-2 infection, aseptic meningitis, infectious mononucleosis, Cytomegalic inclusion disease, Kaposi sarcoma, multicentric Castleman disease, primary effusion lymphoma, AIDS, influenza, Reye syndrome, measles, postinfectious encephalomyelitis, Mumps, hyperplastic epithelial lesions (e.g., common, flat, plantar and anogenital warts, laryngeal papillomas, epidermodysplasia verruciformis), cervical carcinoma, squamous cell carcinomas, croup, pneumonia, bronchiolitis, common cold, Poliomyelitis, Rabies, bronchiolitis, pneumonia, influenza-like syndrome, severe bronchiolitis with pneumonia, German measles, congenital rubella, Varicella, and herpes zoster.

### Viral Pathogens

[0786] Viral pathogens include, but are not limited to, adenovirus, coxsackievirus, dengue virus, encephalitis virus, Epstein-Barr virus, hepatitis A virus, hepatitis B virus, hepatitis C virus, herpes simplex virus type 1, herpes simplex virus type 2, cytomegalovirus, human herpesvirus type 8, human immunodeficiency virus, influenza virus, measles virus, mumps virus, human papillomavirus, parainfluenza virus, poliovirus, rabies virus, respiratory syncytial virus, rubella virus, varicella-zoster virus, West Nile virus, and yellow fever virus. Viral pathogens may also include viruses that cause resistant viral infections.

### Antiviral Agents

[0787] Exemplary anti-viral agents include, but are not limited to, abacavir (ZIAGEN®), abacavir/lamivudine/zidovudine (Trizivir®), aciclovir or acyclovir (CYCLOVIR®, HERPEX®, ACIVIR®, ACIVIRAX®, ZOVIRAX®, ZOVIR®), adefovir (Preveon®, Hepsera®), amantadine (SYMMETREL®), amprenavir (AGENERASE®), ampligen, arbidol, atazanavir (REYATAZ®), boceprevir, cidofovir, darunavir (PREZISTA®), delavirdine (RESCRIPTOR®), didanosine (VIDEX®), docosanol (ABREVA®), edoxudine, efavirenz (SUSTIVA®, STOCRIN®), emtricitabine (EMTRIVA®), emtricitabine/tenofovir/efavirenz (ATRIPLA®), enfuvirtide (FUZEON®), entecavir (BARACLUDE®, ENTAVIR®), famciclovir (FAMVIR®), fomivirsen (VITRAVENE®), fosamprenavir (LEXIVA®, TELZIR®), foscarnet (FOSCAVIR®), fosfonet, ganciclovir (CYTOVENE®, CYMEVENE®, VITRASERT®), GS 9137 (ELVITEGRAVIR®), imiquimod (ALDARA®, ZYCLARA®, BESELNA®), indinavir (CRIXIVAN®), inosine, inosine pranobex (IMUNOVIR®), interferon type I, interferon type II, interferon type III, kutapressin (NEXAVIR®), lamivudine (ZEFFIX®, HEPTOVIR®, EPIVIR®), lamivudine/zidovudine (COMBIVIR®), lopinavir, loviride, maraviroc (SELZENTRY®, CELSENTRI®), methisazone, MK-2048, moroxydine, nelfinavir (VIRACEPT®), nevirapine (VIRAMUNE®), oseltamivir (TAMIFLU®), peginterferon alfa-2a (PEGASYS®), penciclovir (DENAVIR®), peramivir, pleconaril, podophyllotoxin (CONDYLOX®), raltegravir (ISENTRESS®), ribavirin (COPEGUs®, REBETOL®, RIBASPHERE®, VILONA® AND VIRAZOLE®), rimantadine (FLUMADINE®), ritonavir (NORVIR®), pyramidine, saquinavir (INVIRASE®, FORTOVASE®), stavudine, tea tree oil (melaleuca oil), tenofovir (VIREAD®), tenofovir/emtricitabine (TRUVADA®), tipranavir (APTIVUS®), trifluridine (VIROPTIC®), tromantadine (VIRU-MERZ®), valaciclovir (VALTREX®), valganciclovir (VALCYTE®), vicriviroc, vidarabine, viramidine, zalcitabine, zanamivir (RELENZA®), and zidovudine (azidothymidine (AZT), RETROVIR®, RETROVIS®).

Conditions Associated with Fungal Infections

[0788] Diseases, disorders, or conditions associated with fungal infections include, but are not limited to, aspergilloses, blastomycosis, candidasis, coccidioidomycosis, cryptococcosis, histoplasmosis, mycetomas, paracoccidioidomycosis, and tinea pedis. Furthermore, persons with immuno-deficiencies are particularly susceptible to disease by fungal genera such as Aspergillus, Candida, Cryptoccocus, Histoplasma, and Pneumocystis. Other fungi can attack eyes, nails, hair, and especially skin, the so-called dermatophytic fungi and keratinophilic fungi, and cause a variety of conditions, of which ringworms such as athlete's foot are common. Fungal spores are also a major cause of allergies, and a wide range of fungi from different taxonomic groups can evoke allergic reactions in some people.

### Fungal Pathogens

[0789] Fungal pathogens include, but are not limited to, Ascomycota (e.g., Fusarium oxysporum, Pneumocystis jirovecii, Aspergillus spp., Coccidioides immitis/posadasii, Candida albicans), Basidiomycota (e.g., Filobasidiella neoformans, Trichosporon), Microsporidia (e.g., Encephalitozoon cuniculi, Enterocytozoon bieneusi), and Mucoromycotina (e.g., Mucor circinelloides, Rhizopus oryzae, Lichtheimia corymbifera).

### Anti-Fungal Agents

[0790] Exemplary anti-fungal agents include, but are not limited to, polyene antifungals (e.g., natamycin, rimocidin, filipin, nystatin, amphotericin B, candicin, hamycin), imidazole antifungals (e.g., miconazole (MICATIN®, DAKTARIN®), ketoconazole (NIZORAL®, FUNGORAL®, SEBIZOLE®), clotrimazole (LOTRIMIN®, LOTRIMIN® AF, CANESTEN®), econazole, omoconazole, bifonazole, butoconazole, fenticonazole, isoconazole, oxiconazole, sertaconazole (ERTACZO®), sulconazole, tioconazole), triazole antifungals (e.g., albaconazole fluconazole, itraconazole, isavuconazole, ravuconazole, posaconazole, voriconazole, terconazole), thiazole antifungals (e.g., abafungin), allylamines (e.g., terbinafine (LAMISIL®), naftifine (NAFTIN®), butenafine (LOTRIMIN® Ultra)), echinocandins (e.g., anidulafungin, caspofungin, micafungin), and others (e.g., polygodial, benzoic acid, ciclopirox, tolnaftate (TINACTIN®, DESENEX®, AFTATE®), undecylenic acid, flucytosine or 5-fluorocytosine, griseofulvin, haloprogin, sodium bicarbonate, allicin).

Conditions Associated with Protozoal Infection

[0791] Diseases, disorders, or conditions associated with protozoal infections include, but are not limited to, amoebiasis, giardiasis, trichomoniasis, African Sleeping Sickness, American Sleeping Sickness, leishmaniasis (Kala-Azar), balantidiasis, toxoplasmosis, malaria, Acanthamoeba keratitis, and babesiosis.

### Protozoan Pathogens

[0792] Protozoal pathogens include, but are not limited to, Entamoeba histolytica, Giardia lambila, Trichomonas vaginalis, Trypanosoma brucei, T. cruzi, Leishmania donovani, Balantidium coli, Toxoplasma gondii, Plasmodium spp., and Babesia microti.

### Anti-Protozoan Agents

[0793] Exemplary anti-protozoal agents include, but are not limited to, eflornithine, furazolidone (FUROXONE®, DEPENDAL-M®), melarsoprol, metronidazole (FLAGYL®), ornidazole, paromomycin sulfate (HUMATIN®), pentamidine, pyrimethamine (DARAPRIM®), and tinidazole (TINDAMAX®, FASIGYN®).

Conditions Associated with Parasitic Infection

[0794] Diseases, disorders, or conditions associated with parasitic infections include, but are not limited to, Acanthamoeba keratitis, amoebiasis, ascariasis, babesiosis, balantidiasis, baylisascariasis, chagas disease, clonorchiasis, cochliomyia, cryptosporidiosis, diphyllobothriasis, dracunculiasis, echinococcosis, elephantiasis, enterobiasis, fascioliasis, fasciolopsiasis, filariasis, giardiasis, gnathostomiasis, hymenolepiasis, isosporiasis, katayama fever, leishmaniasis, lyme disease, malaria, metagonimiasis, myiasis, onchocerciasis, pediculosis, scabies, schistosomiasis, sleeping sickness, strongyloidiasis, taeniasis, toxocariasis, toxoplasmosis, trichinosis, and trichuriasis.

### Parasitic Pathogens

[0795] Parasitic pathogens include, but are not limited to, Acanthamoeba, Anisakis, Ascaris lumbricoides, botfly, Balantidium coli, bedbug, Cestoda, chiggers, Cochliomyia hominivorax, Entamoeba histolytica, Fasciola hepatica, Giardia lamblia, hookworm, Leishmania, Linguatula serrata, liver fluke, Loa loa, Paragonimus, pinworm, Plasmodium falciparum, Schistosoma, Strongyloides stercoralis, mite, tapeworm, Toxoplasma gondii, Trypanosoma, whipworm, Wuchereria bancrofti.

### Anti-Parasitic Agents

[0796] Exemplary anti-parasitic agents include, but are not limited to, antinematodes (e.g., mebendazole, pyrantel pamoate, thiabendazole, diethylcarbamazine, ivermectin), anticestodes (e.g., niclosamide, praziquantel, albendazole), antitrematodes (e.g., praziquantel), antiamoebics (e.g., rifampin, amphotericin B), and antiprotozoals (e.g., melarsoprol, eflornithine, metronidazole, tinidazole).

Conditions Associated with Prion Infection

[0797] Diseases, disorders, or conditions associated with prion infections include, but are not limited to Creutzfeldt-Jakob disease (CJD), iatrogenic Creutzfeldt-Jakob disease (iCJD), variant Creutzfeldt-Jakob disease (vCJD), familial Creutzfeldt-Jakob disease (fCJD), sporadic Creutzfeldt-Jakob disease (sCJD), Gerstmann-Sträussler-Scheinker syndrome (GSS), fatal familial insomnia (FFI), Kuru, Scrapie, bovine spongiform encephalopathy (BSE), mad cow disease, transmissible mink encephalopathy (TME), chronic wasting disease (CWD), feline spongiform encephalopathy (FSE), exotic ungulate encephalopathy (EUE), and spongiform encephalopathy.

### Anti-Prion Agents

[0798] Exemplary anti-prion agents include, but are not limited to, flupirtine, pentosan polysuphate, quinacrine, and tetracyclic compounds.

### Modulation of the Immune Response

### Avoidance of the Immune Response

[0799] As described herein, a useful feature of the polynucleotides, primary constructs or mmRNA of the invention is the capacity to reduce, evade or avoid the innate immune response of a cell. In one aspect, provided herein are polynucleotides, primary constructs or mmRNA encoding a polypeptide of interest which when delivered to cells, results in a reduced immune response from the host as compared to the response triggered by a reference compound, e.g. an unmodified polynucleotide corresponding to a polynucleotide, primary construct or mmRNA of the invention, or a different polynucleotide, primary construct or mmRNA of the invention. As used herein, a “reference compound” is any molecule or substance which when administered to a mammal, results in an innate immune response having a known degree, level or amount of immune stimmulation. A reference compound need not be a nucleic acid molecule and it need not be any of the polynucleotides, primary constructs or mmRNA of the invention. Hence, the measure of a polynucleotides, primary constructs or mmRNA avoidance, evasion or failure to trigger an immune response can be expressed in terms relative to any compound or substance which is known to trigger such a response.

[0800] The term “innate immune response” includes a cellular response to exogenous single stranded nucleic acids, generally of viral or bacterial origin, which involves the induction of cytokine expression and release, particularly the interferons, and cell death. As used herein, the innate immune response or interferon response operates at the single cell level causing cytokine expression, cytokine release, global inhibition of protein synthesis, global destruction of cellular RNA, upregulation of major histocompatibility molecules, and/or induction of apoptotic death, induction of gene transcription of genes involved in apoptosis, anti-growth, and innate and adaptive immune cell activation. Some of the genes induced by type I IFNs include PKR, ADAR (adenosine deaminase acting on RNA), OAS (2′,5′-oligoadenylate synthetase), RNase L, and Mx proteins. PKR and ADAR lead to inhibition of translation initiation and RNA editing, respectively. OAS is a dsRNA-dependent synthetase that activates the endoribonuclease RNase L to degrade SSRNA.

[0801] In some embodiments, the innate immune response comprises expression of a Type I or Type II interferon, and the expression of the Type I or Type II interferon is not increased more than two-fold compared to a reference from a cell which has not been contacted with a polynucleotide, primary construct or mmRNA of the invention.

[0802] In some embodiments, the innate immune response comprises expression of one or more IFN signature genes and where the expression of the one of more IFN signature genes is not increased more than three-fold compared to a reference from a cell which has not been contacted with the polynucleotide, primary construct or mmRNA of the invention.

[0803] While in some circumstances, it might be advantageous to eliminate the innate immune response in a cell, the invention provides polynucleotides, primary constructs and mmRNA that upon administration result in a substantially reduced (significantly less) the immune response, including interferon signaling, without entirely eliminating such a response.

[0804] In some embodiments, the immune response is lower by 10%, 20%, 30%, 40%, 50%, 60%, 70%, 80%, 90%, 95%, 99%, 99.9%, or greater than 99.9% as compared to the immune response induced by a reference compound. The immune response itself may be measured by determining the expression or activity level of Type 1 interferons or the expression of interferon-regulated genes such as the toll-like receptors (e.g., TLR7 and TLR8). Reduction of innate immune response can also be measured by measuring the level of decreased cell death following one or more administrations to a cell population; e.g., cell death is 10%, 25%, 50%, 75%, 85%, 90%, 95%, or over 95% less than the cell death frequency observed with a reference compound. Moreover, cell death may affect fewer than 50%, 40%, 30%, 20%, 10%, 5%, 1%, 0.1%, 0.01% or fewer than 0.01% of cells contacted with the polynucleotide, primary construct or mmRNA.

[0805] In another embodiment, the polynucleotide, primary construct or mmRNA of the present invention is significantly less immunogenic than an unmodified in vitro-synthesized RNA molecule polynucleotide, or primary construct with the same sequence or a reference compound. As used herein, “significantly less immunogenic” refers to a detectable decrease in immunogenicity. In another embodiment, the term refers to a fold decrease in immunogenicity. In another embodiment, the term refers to a decrease such that an effective amount of the polynucleotide, primary construct or mmRNA can be administered without triggering a detectable immune response. In another embodiment, the term refers to a decrease such that the polynucleotide, primary construct or mmRNA can be repeatedly administered without eliciting an immune response sufficient to detectably reduce expression of the recombinant protein. In another embodiment, the decrease is such that the polynucleotide, primary construct or mmRNA can be repeatedly administered without eliciting an immune response sufficient to eliminate detectable expression of the recombinant protein.

[0806] In another embodiment, the polynucleotide, primary construct or mmRNA is 2-fold less immunogenic than its unmodified counterpart or reference compound. In another embodiment, immunogenicity is reduced by a 3-fold factor. In another embodiment, immunogenicity is reduced by a 5-fold factor. In another embodiment, immunogenicity is reduced by a 7-fold factor. In another embodiment, immunogenicity is reduced by a 10-fold factor. In another embodiment, immunogenicity is reduced by a 15-fold factor. In another embodiment, immunogenicity is reduced by a fold factor. In another embodiment, immunogenicity is reduced by a 50-fold factor. In another embodiment, immunogenicity is reduced by a 100-fold factor. In another embodiment, immunogenicity is reduced by a 200-fold factor. In another embodiment, immunogenicity is reduced by a 500-fold factor. In another embodiment, immunogenicity is reduced by a 1000-fold factor. In another embodiment, immunogenicity is reduced by a 2000-fold factor. In another embodiment, immunogenicity is reduced by another fold difference.

[0807] Methods of determining immunogenicity are well known in the art, and include, e.g. measuring secretion of cytokines (e.g. IL-12, IFNalpha, TNF-alpha, RANTES, MIP-1alpha or beta, IL-6, IFN-beta, or IL-8), measuring expression of DC activation markers (e.g. CD83, HLA-DR, CD80 and CD86), or measuring ability to act as an adjuvant for an adaptive immune response.

[0808] The polynucleotide, primary construct or mmRNA of the invention, including the combination of modifications taught herein may have superior properties making them more suitable as therapeutic modalities.

[0809] It has been determined that the “all or none” model in the art is sorely insufficient to describe the biological phenomena associated with the therapeutic utility of modified mRNA. The present inventors have determined that to improve protein production, one may consider the nature of the modification, or combination of modifications, the percent modification and survey more than one cytokine or metric to determine the efficacy and risk profile of a particular modified mRNA.

[0810] In one aspect of the invention, methods of determining the effectiveness of a modified mRNA as compared to unmodified involves the measure and analysis of one or more cytokines whose expression is triggered by the administration of the exogenous nucleic acid of the invention. These values are compared to administration of an unmodified nucleic acid or to a standard metric such as cytokine response, PolyIC, R-848 or other standard known in the art.

[0811] One example of a standard metric developed herein is the measure of the ratio of the level or amount of encoded polypeptide (protein) produced in the cell, tissue or organism to the level or amount of one or more (or a panel) of cytokines whose expression is triggered in the cell, tissue or organism as a result of administration or contact with the modified nucleic acid. Such ratios are referred to herein as the Protein: Cytokine Ratio or “PC” Ratio. The higher the PC ratio, the more efficacious the modified nucleic acid (polynucleotide encoding the protein measured). Preferred PC Ratios, by cytokine, of the present invention may be greater than 1, greater than 10, greater than 100, greater than 1000, greater than 10,000 or more. Modified nucleic acids having higher PC Ratios than a modified nucleic acid of a different or unmodified construct are preferred.

[0812] The PC ratio may be further qualified by the percent modification present in the polynucleotide. For example, normalized to a 100% modified nucleic acid, the protein production as a function of cytokine (or risk) or cytokine profile can be determined.

[0813] In one embodiment, the present invention provides a method for determining, across chemistries, cytokines or percent modification, the relative efficacy of any particular modified the polynucleotide, primary construct or mmRNA by comparing the PC Ratio of the modified nucleic acid (polynucleotide, primary construct or mmRNA).

[0814] mmRNA containing varying levels of nucleobase substitutions could be produced that maintain increased protein production and decreased immunostimulatory potential. The relative percentage of any modified nucleotide to its naturally occurring nucleotide counterpart can be varied during the IVT reaction (for instance, 100, 50, 25, 10, 5, 2.5, 1, 0.1, 0.01% 5 methyl cytidine usage versus cytidine; 100, 50, 25, 10, 5, 2.5, 1, 0.1, 0.01% pseudouridine or N1-methyl-pseudouridine usage versus uridine). mmRNA can also be made that utilize different ratios using 2 or more different nucleotides to the same base (for instance, different ratios of pseudouridine and N1-methyl-pseudouridine). mmRNA can also be made with mixed ratios at more than 1 “base” position, such as ratios of 5 methyl cytidine/cytidine and pseudouridine/N1-methyl-pseudouridine/uridine at the same time. Use of modified mRNA with altered ratios of modified nucleotides can be beneficial in reducing potential exposure to chemically modified nucleotides. Lastly, positional introduction of modified nucleotides into the mmRNA which modulate either protein production or immunostimulatory potential or both is also possible. The ability of such mmRNA to demonstrate these improved properties can be assessed in vitro (using assays such as the PBMC assay described herein), and can also be assessed in vivo through measurement of both mmRNA-encoded protein production and mediators of innate immune recognition such as cytokines.

[0815] In another embodiment, the relative immunogenicity of the polynucleotide, primary construct or mmRNA and its unmodified counterpart are determined by determining the quantity of the polynucleotide, primary construct or mmRNA required to elicit one of the above responses to the same degree as a given quantity of the unmodified nucleotide or reference compound. For example, if twice as much polynucleotide, primary construct or mmRNA is required to elicit the same response, than the polynucleotide, primary construct or mmRNA is two-fold less immunogenic than the unmodified nucleotide or the reference compound.

[0816] In another embodiment, the relative immunogenicity of the polynucleotide, primary construct or mmRNA and its unmodified counterpart are determined by determining the quantity of cytokine (e.g. IL-12, IFNalpha, TNF-alpha, RANTES, MIP-1alpha or beta, IL-6, IFN-beta, or IL-8) secreted in response to administration of the polynucleotide, primary construct or mmRNA, relative to the same quantity of the unmodified nucleotide or reference compound. For example, if one-half as much cytokine is secreted, than the polynucleotide, primary construct or mmRNA is two-fold less immunogenic than the unmodified nucleotide. In another embodiment, background levels of stimulation are subtracted before calculating the immunogenicity in the above methods.

[0817] Provided herein are also methods for performing the titration, reduction or elimination of the immune response in a cell or a population of cells. In some embodiments, the cell is contacted with varied doses of the same polynucleotides, primary constructs or mmRNA and dose response is evaluated. In some embodiments, a cell is contacted with a number of different polynucleotides, primary constructs or mmRNA at the same or different doses to determine the optimal composition for producing the desired effect. Regarding the immune response, the desired effect may be to avoid, evade or reduce the immune response of the cell. The desired effect may also be to alter the efficiency of protein production.

[0818] The polynucleotides, primary constructs and/or mmRNA of the present invention may be used to reduce the immune response using the method described in International Publication No. WO2013003475, herein incorporated by reference in its entirety.

### Activation of the Immune Response: Vaccines

[0819] Additionally, certain modified nucleosides, or combinations thereof, when introduced into the polynucleotides, primary constructs or mmRNA of the invention will activate the innate immune response. Such activating molecules are useful as adjuvants when combined with polypeptides and/or other vaccines. In certain embodiments, the activating molecules contain a translatable region which encodes for a polypeptide sequence useful as a vaccine, thus providing the ability to be a self-adjuvant.

[0820] In one embodiment, the polynucleotides, primary constructs and/or mmRNA of the invention may encode an immunogen. The delivery of the polynucleotides, primary constructs and/or mmRNA encoding an immunogen may activate the immune response. As a non-limiting example, the polynucleotides, primary constructs and/or mmRNA encoding an immunogen may be delivered to cells to trigger multiple innate response pathways (see International Pub. No. WO2012006377; herein incorporated by reference in its entirety). As another non-limiting example, the polynucleotides, primary constructs and mmRNA of the present invention encoding an immunogen may be delivered to a vertebrate in a dose amount large enough to be immunogenic to the vertebrate (see International Pub. No. WO2012006372 and WO2012006369; each of which is herein incorporated by reference in their entirety).

[0821] The polynucleotides, primary constructs or mmRNA of invention may encode a polypeptide sequence for a vaccine and may further comprise an inhibitor. The inhibitor may impair antigen presentation and/or inhibit various pathways known in the art. As a non-limiting example, the polynucleotides, primary constructs or mmRNA of the invention may be used for a vaccine in combination with an inhibitor which can impair antigen presentation (see International Pub. No. WO2012089225 and WO2012089338; each of which is herein incorporated by reference in their entirety).

[0822] In one embodiment, the polynucleotides, primary constructs or mmRNA of the invention may be self-replicating RNA. Self-replicating RNA molecules can enhance efficiency of RNA delivery and expression of the enclosed gene product. In one embodiment, the polynucleotides, primary constructs or mmRNA may comprise at least one modification described herein and/or known in the art. In one embodiment, the self-replicating RNA can be designed so that the self-replicating RNA does not induce production of infectious viral particles. As a non-limiting example the self-replicating RNA may be designed by the methods described in US Pub. No. US20110300205 and International Pub. No. WO2011005799, each of which is herein incorporated by reference in their entirety.

[0823] In one embodiment, the self-replicating polynucleotides, primary constructs or mmRNA of the invention may encode a protein which may raise the immune response. As a non-limiting example, the polynucleotides, primary constructs or mmRNA may be self-replicating mRNA may encode at least one antigen (see US Pub. No. US20110300205 and International Pub. Nos. WO2011005799, WO2013006838 and WO2013006842; each of which is herein incorporated by reference in their entirety).

[0824] In one embodiment, the self-replicating polynucleotides, primary constructs or mmRNA of the invention may be formulated using methods described herein or known in the art. As a non-limiting example, the self-replicating RNA may be formulated for delivery by the methods described in Geall et al (Nonviral delivery of self-amplifying RNA vaccines, PNAS 2012; PMID: 22908294).

[0825] In one embodiment, the polynucleotides, primary constructs or mmRNA of the present invention may encode amphipathic and/or immunogenic amphipathic peptides.

[0826] In on embodiment, a formulation of the polynucleotides, primary constructs or mmRNA of the present invention may further comprise an amphipathic and/or immunogenic amphipathic peptide. As a non-limiting example, the polynucleotides, primary constructs or mmRNA comprising an amphipathic and/or immunogenic amphipathic peptide may be formulated as described in US. Pub. No. US20110250237 and International Pub. Nos. WO2010009277 and WO2010009065; each of which is herein incorporated by reference in their entirety.

[0827] In one embodiment, the polynucleotides, primary constructs or mmRNA of the present invention may be immunostimulatory. As a non-limiting example, the polynucleotides, primary constructs or mmRNA may encode all or a part of a positive-sense or a negative-sense stranded RNA virus genome (see International Pub No. WO2012092569 and US Pub No. US20120177701, each of which is herein incorporated by reference in their entirety). In another non-limiting example, the immunostimulatory polynucleotides, primary constructs or mmRNA of the present invention may be formulated with an excipient for administration as described herein and/or known in the art (see International Pub No. WO2012068295 and US Pub No. US20120213812, each of which is herein incorporated by reference in their entirety).

[0828] In one embodiment, the response of the vaccine formulated by the methods described herein may be enhanced by the addition of various compounds to induce the therapeutic effect. As a non-limiting example, the vaccine formulation may include a MHC II binding peptide or a peptide having a similar sequence to a MHC II binding peptide (see International Pub Nos. WO2012027365, WO2011031298 and US Pub No. US20120070493, US20110110965, each of which is herein incorporated by reference in their entirety). As another example, the vaccine formulations may comprise modified nicotinic compounds which may generate an antibody response to nicotine residue in a subject (see International Pub No. WO2012061717 and US Pub No. US20120114677, each of which is herein incorporated by reference in their entirety).

### Naturally Occurring Mutants

[0829] In another embodiment, the polynucleotides, primary construct and/or mmRNA can be utilized to express variants of naturally occurring proteins that have an improved disease modifying activity, including increased biological activity, improved patient outcomes, or a protective function, etc. Many such modifier genes have been described in mammals (Nadeau, Current Opinion in Genetics & Development 2003 13:290-295; Hamilton and Yu, PLOS Genet. 2012; 8: e1002644; Corder et al., Nature Genetics 1994 7:180-184; all herein incorporated by reference in their entireties). Examples in humans include Apo E2 protein, Apo A-I variant proteins (Apo A-I Milano, Apo A-I Paris), hyperactive Factor IX protein (Factor IX Padua Arg338Lys), transthyretin mutants (TTR Thr119Met). Expression of ApoE2 (cys112, cys158) has been shown to confer protection relative to other ApoE isoforms (ApoF3 (cys112, arg158), and ApoE4 (arg112, arg158)) by reducing susceptibility to Alzheimer's disease and possibly other conditions such as cardiovascular disease (Corder et al., Nature Genetics 1994 7:180-184; Seripa et al., Rejuvenation Res. 2011 14:491-500; Liu et al. Nat Rev Neurol. 2013 9:106-118; all herein incorporated by reference in their entireties). Expression of Apo A-I variants has been associated with reduced cholesterol (deGoma and Rader, 2011 Nature Rev Cardiol 8:266-271; Nissen et al., 2003 JAMA 290:2292-2300; all herein incorporated by reference in its entirety). The amino acid sequence of ApoA-I in certain populations has been changed to cysteine in Apo A-I Milano (Arg 173 changed to Cys) and in Apo A-I Paris (Arg 151 changed to Cys). Factor IX mutation at position R338L (FIX Padua) results in a Factor IX protein that has ˜10-fold increased activity (Simioni et al., N Engl J Med. 2009 361:1671-1675; Finn et al., Blood. 2012 120:4521-4523; Cantore et al., Blood. 2012 120:4517-20; all herein incorporated by reference in their entireties). Mutation of transthyretin at positions 104 or 119 (Arg104 His, Thr119Met) has been shown to provide protection to patients also harboring the disease causing Val30Met mutations (Saraiva, Hum Mutat. 2001 17:493-503; DATA BASE ON TRANSTHYRETIN MUTATIONS www.ibmc.up.pt/mjsaraiva/ttrmut.html; all herein incorporated by reference in its entirety). Differences in clinical presentation and severity of symptoms among Portuguese and Japanese Met 30 patients carrying respectively the Met 119 and the His104 mutations are observed with a clear protective effect exerted by the non pathogenic mutant (Coelho et al. 1996 Neuromuscular Disorders (Suppl) 6: S20; Terazaki et al. 1999. Biochem Biophys Res Commun 264:365-370; all herein incorporated by reference in its entirety), which confer more stability to the molecule. A modified mRNA encoding these protective TTR alleles can be expressed in TTR amyloidosis patients, thereby reducing the effect of the pathogenic mutant TTR protein.

### Major Groove Interacting Partners

[0830] As described herein, the phrase “major groove interacting partner” refers to RNA recognition receptors that detect and respond to RNA ligands through interactions, e.g. binding, with the major groove face of a nucleotide or nucleic acid. As such, RNA ligands comprising modified nucleotides or nucleic acids such as the polynucleotide, primary construct or mmRNA as described herein decrease interactions with major groove binding partners, and therefore decrease an innate immune response.

[0831] Example major groove interacting, e.g. binding, partners include, but are not limited to the following nucleases and helicases. Within membranes, TLRs (Toll-like Receptors) 3, 7, and 8 can respond to single- and double-stranded RNAs. Within the cytoplasm, members of the superfamily 2 class of DEX (D/H) helicases and ATPases can sense RNAs to initiate antiviral responses. These helicases include the RIG-I (retinoic acid-inducible gene I) and MDA5 (melanoma differentiation-associated gene 5). Other examples include laboratory of genetics and physiology 2 (LGP2), HIN-200 domain containing proteins, or Helicase-domain containing proteins.

### Targeting of Pathogenic Organisms or Diseased Cells

[0832] Provided herein are methods for targeting pathogenic microorganisms, such as bacteria, yeast, protozoa, helminthes and the like, or diseased cells such as cancer cells using polynucleotides, primary constructs or mmRNA that encode cytostatic or cytotoxic polypeptides. Preferably the mRNA introduced contains modified nucleosides or other nucleic acid sequence modifications that are translated exclusively, or preferentially, in the target pathogenic organism, to reduce possible off-target effects of the therapeutic. Such methods are useful for removing pathogenic organisms or killing diseased cells found in any biological material, including blood, semen, eggs, and transplant materials including embryos, tissues, and organs.

### Bioprocessing

[0833] The methods provided herein may be useful for enhancing protein product yield in a cell culture process. In a cell culture containing a plurality of host cells, introduction of a polynucleotide, primary construct or mmRNA described herein results in increased protein production efficiency relative to a corresponding unmodified nucleic acid. Such increased protein production efficiency can be demonstrated, e.g., by showing increased cell transfection, increased protein translation from the polynucleotide, primary construct or mmRNA, decreased nucleic acid degradation, and/or reduced innate immune response of the host cell. Protein production can be measured by enzyme-linked immunosorbent assay (ELISA), and protein activity can be measured by various functional assays known in the art. The protein production may be generated in a continuous or a batch-fed mammalian process.

[0834] Additionally, it is useful to optimize the expression of a specific polypeptide in a cell line or collection of cell lines of potential interest, particularly a polypeptide of interest such as a protein variant of a reference protein having a known activity. In one embodiment, provided is a method of optimizing expression of a polypeptide of interest in a target cell, by providing a plurality of target cell types, and independently contacting with each of the plurality of target cell types a polynucleotide, primary construct or mmRNA encoding a polypeptide of interest. The cells may be transfected with two or more polynucleotide, primary construct or mmRNA simultaneously or sequentially.

[0835] In certain embodiments, multiple rounds of the methods described herein may be used to obtain cells with increased expression of one or more nucleic acids or proteins of interest. For example, cells may be transfected with one or more polynucleotide, primary construct or mmRNA that encode a nucleic acid or protein of interest. The cells may be isolated according to methods described herein before being subjected to further rounds of transfections with one or more other nucleic acids which encode a nucleic acid or protein of interest before being isolated again. This method may be useful for generating cells with increased expression of a complex of proteins, nucleic acids or proteins in the same or related biological pathway, nucleic acids or proteins that act upstream or downstream of each other, nucleic acids or proteins that have a modulating, activating or repressing function to each other, nucleic acids or proteins that are dependent on each other for function or activity, or nucleic acids or proteins that share homology.

[0836] Additionally, culture conditions may be altered to increase protein production efficiency. Subsequently, the presence and/or level of the polypeptide of interest in the plurality of target cell types is detected and/or quantitated, allowing for the optimization of a polypeptide's expression by selection of an efficient target cell and cell culture conditions relating thereto. Such methods are particularly useful when the polypeptide contains one or more post-translational modifications or has substantial tertiary structure, situations which often complicate efficient protein production.

[0837] In one embodiment, the cells used in the methods of the present invention may be cultured. The cells may be cultured in suspension or as adherent cultures. The cells may be cultured in a varied of vessels including, but not limited to, bioreactors, cell bags, wave bags, culture plates, flasks and other vessels well known to those of ordinary skill in the art. Cells may be cultured in IMDM (Invitrogen, Catalog number 12440-53) or any other suitable media including, but not limited to, chemically defined media formulations. The ambient conditions which may be suitable for cell culture, such as temperature and atmospheric composition, are well known to those skilled in the art. The methods of the invention may be used with any cell that is suitable for use in protein production.

[0838] The invention provides for the repeated introduction (e.g., transfection) of modified nucleic acids into a target cell population, e.g., in vitro, ex vivo, in situ, or in vivo. For example, contacting the same cell population may be repeated one or more times (such as two, three, four, five or more than five times). In some embodiments, the step of contacting the cell population with the polynucleotides, primary constructs or mmRNA is repeated a number of times sufficient such that a predetermined efficiency of protein translation in the cell population is achieved. Given the often reduced cytotoxicity of the target cell population provided by the nucleic acid modifications, repeated transfections are achievable in a diverse array of cell types and within a variety of tissues, as provided herein.

[0839] In one embodiment, the bioprocessing methods of the present invention may be used to produce antibodies or functional fragments thereof. The functional fragments may comprise a Fab, Fab′, F(ab′)₂, an Fv domain, an scFv, or a diabody. They may be variable in any region including the complement determining region (CDR). In one embodiment, there is complete diversity in the CDR3 region. In another embodiment, the antibody is substantially conserved except in the CDR3 region.

[0840] Antibodies may be made which bind or associate with any biomolecule, whether human, pathogenic or non-human in origin. The pathogen may be present in a non-human mammal, a clinical specimen or from a commercial product such as a cosmetic or pharmaceutical material. They may also bind to any specimen or sample including clinical specimens or tissue samples from any organism.

[0841] In some embodiments, the contacting step is repeated multiple times at a frequency selected from the group consisting of: 6 hour, 12 hour, 24 hour, 36 hour, 48 hour, 72 hour, 84 hour, 96 hour, and 108 hour and at concentrations of less than 20 nM, less than 50 nM, less than 80 nM or less than 100 nM. Compositions may also be administered at less than 1 mM, less than 5 mM, less than 10 mM, less than 100 mM or less than 500 mM.

[0842] In some embodiments, the polynucleotides, primary constructs or mmRNA are added at an amount of 50 molecules per cell, 100 molecules/cell, 200 molecules/cell, 300 molecules/cell, 400 molecules/cell, 500 molecules/cell, 600 molecules/cell, 700 molecules/cell, 800 molecules/cell, 900 molecules/cell, 1000 molecules/cell, 2000 molecules/cell, or 5000 molecules/cell.

[0843] In other embodiments, the polynucleotides, primary constructs or mmRNA are added at a concentration selected from the group consisting of: 0.01 fmol/106 cells, 0.1 fmol/106 cells, 0.5 fmol/106 cells, 0.75 fmol/106 cells, 1 fmol/106 cells, 2 fmol/106 cells, 5 fmol/106 cells, 10 fmol/106 cells, 20 fmol/106 cells, 30 fmol/106 cells, 40 fmol/106 cells, 50 fmol/106 cells, 60 fmol/106 cells, 100 fmol/106 cells, 200 fmol/106 cells, 300 fmol/106 cells, 400 fmol/106 cells, 500 fmol/106 cells, 700 fmol/106 cells, 800 fmol/106 cells, 900 fmol/106 cells, and 1 pmol/106 cells.

[0844] In some embodiments, the production of a biological product upon is detected by monitoring one or more measurable bioprocess parameters, such as a parameter selected from the group consisting of: cell density, pH, oxygen levels, glucose levels, lactic acid levels, temperature, and protein production. Protein production can be measured as specific productivity (SP) (the concentration of a product, such as a heterologously expressed polypeptide, in solution) and can be expressed as mg/L or g/L; in the alternative, specific productivity can be expressed as pg/cell/day. An increase in SP can refer to an absolute or relative increase in the concentration of a product produced under two defined set of conditions (e.g., when compared with controls not treated with modified mRNA(s)).

### Cells

[0845] In one embodiment, the cells are selected from the group consisting of mammalian cells, bacterial cells, plant, microbial, algal and fungal cells. In some embodiments, the cells are mammalian cells, such as, but not limited to, human, mouse, rat, goat, horse, rabbit, hamster or cow cells. In a further embodiment, the cells may be from an established cell line, including, but not limited to, HeLa, NSO, SP2/0, KEK 293T, Vero, Caco, Caco-2, MDCK, COS-1, COS-7, K562, Jurkat, CHO-K1, DG44, CHOK1SV, CHO—S, Huvec, CV-1, Huh-7, NIH3T3, HEK293, 293, A549, HepG2, IMR-90, MCF-7, U-20S, Per.C6, SF9, SF21 or Chinese Hamster Ovary (CHO) cells.

[0846] In certain embodiments, the cells are fungal cells, such as, but not limited to, Chrysosporium cells, Aspergillus cells, Trichoderma cells, Dictyostelium cells, Candida cells, Saccharomyces cells, Schizosaccharomyces cells, and Penicillium cells.

[0847] In certain embodiments, the cells are bacterial cells such as, but not limited to, E. coli, B. subtilis, or BL21 cells. Primary and secondary cells to be transfected by the methods of the invention can be obtained from a variety of tissues and include, but are not limited to, all cell types which can be maintained in culture. For examples, primary and secondary cells which can be transfected by the methods of the invention include, but are not limited to, fibroblasts, keratinocytes, epithelial cells (e.g., mammary epithelial cells, intestinal epithelial cells), endothelial cells, glial cells, neural cells, formed elements of the blood (e.g., lymphocytes, bone marrow cells), muscle cells and precursors of these somatic cell types. Primary cells may also be obtained from a donor of the same species or from another species (e.g., mouse, rat, rabbit, cat, dog, pig, cow, bird, sheep, goat, horse).

### Purification and Isolation

[0848] Those of ordinary skill in the art should be able to make a determination of the methods to use to purify or isolate of a protein of interest from cultured cells. Generally, this is done through a capture method using affinity binding or non-affinity purification. If the protein of interest is not secreted by the cultured cells, then a lysis of the cultured cells should be performed prior to purification or isolation. One may use unclarified cell culture fluid containing the protein of interest along with cell culture media components as well as cell culture additives, such as anti-foam compounds and other nutrients and supplements, cells, cellular debris, host cell proteins, DNA, viruses and the like in the present invention. The process may be conducted in the bioreactor itself. The fluid may either be preconditioned to a desired stimulus such as pH, temperature or other stimulus characteristic or the fluid can be conditioned upon the addition of polymer(s) or the polymer(s) can be added to a carrier liquid that is properly conditioned to the required parameter for the stimulus condition required for that polymer to be solubilized in the fluid. The polymer may be allowed to circulate thoroughly with the fluid and then the stimulus may be applied (change in pH, temperature, salt concentration, etc) and the desired protein and polymer(s) precipitate can out of the solution. The polymer and the desired protein(s) can be separated from the rest of the fluid and optionally washed one or more times to remove any trapped or loosely bound contaminants. The desired protein may then be recovered from the polymer(s) by, for example, elution and the like. Preferably, the elution may be done under a set of conditions such that the polymer remains in its precipitated form and retains any impurities to it during the selected elution of the desired protein. The polymer and protein as well as any impurities may be solubilized in a new fluid such as water or a buffered solution and the protein may be recovered by a means such as affinity, ion exchanged, hydrophobic, or some other type of chromatography that has a preference and selectivity for the protein over that of the polymer or impurities. The eluted protein may then be recovered and may be subjected to additional processing steps, either batch like steps or continuous flow through steps if appropriate.

[0849] In another embodiment, it may be useful to optimize the expression of a specific polypeptide in a cell line or collection of cell lines of potential interest, particularly a polypeptide of interest such as a protein variant of a reference protein having a known activity. In one embodiment, provided is a method of optimizing expression of a polypeptide of interest in a target cell, by providing a plurality of target cell types, and independently contacting with each of the plurality of target cell types a modified mRNA encoding a polypeptide. Additionally, culture conditions may be altered to increase protein production efficiency. Subsequently, the presence and/or level of the polypeptide of interest in the plurality of target cell types is detected and/or quantitated, allowing for the optimization of a polypeptide of interest's expression by selection of an efficient target cell and cell culture conditions relating thereto. Such methods may be useful when the polypeptide of interest contains one or more post-translational modifications or has substantial tertiary structure, which often complicate efficient protein production.

### Protein Recovery

[0850] The protein of interest may be preferably recovered from the culture medium as a secreted polypeptide, or it can be recovered from host cell lysates if expressed without a secretory signal. It may be necessary to purify the protein of interest from other recombinant proteins and host cell proteins in a way that substantially homogenous preparations of the protein of interest are obtained. The cells and/or particulate cell debris may be removed from the culture medium or lysate. The product of interest may then be purified from contaminant soluble proteins, polypeptides and nucleic acids by, for example, fractionation on immunoaffinity or ion-exchange columns, ethanol precipitation, reverse phase HPLC (RP-HPLC), SEPHADEX® chromatography, chromatography on silica or on a cation exchange resin such as DEAE. Methods of purifying a protein heterologous expressed by a host cell are well known in the art.

[0851] Methods and compositions described herein may be used to produce proteins which are capable of attenuating or blocking the endogenous agonist biological response and/or antagonizing a receptor or signaling molecule in a mammalian subject. For example, IL-12 and IL-23 receptor signaling may be enhanced in chronic autoimmune disorders such as multiple sclerosis and inflammatory diseases such as rheumatoid arthritis, psoriasis, lupus erythematosus, ankylosing spondylitis and Chron's disease (Kikly K, Liu L, Na S, Sedgwich J D (2006) Cur. Opin. Immunol. 18 (6): 670-5). In another embodiment, a nucleic acid encodes an antagonist for chemokine receptors. Chemokine receptors CXCR-4 and CCR-5 are required for HIV entry into host cells (Arenzana-Seisdedos F et al, (1996) Nature. October 3; 383 (6599): 400).

### Gene Silencing

[0852] The polynucleotides, primary constructs and mmRNA described herein are useful to silence (i.e., prevent or substantially reduce) expression of one or more target genes in a cell population. A polynucleotide, primary construct or mmRNA encoding a polypeptide of interest capable of directing sequence-specific histone H3 methylation is introduced into the cells in the population under conditions such that the polypeptide is translated and reduces gene transcription of a target gene via histone H3 methylation and subsequent heterochromatin formation. In some embodiments, the silencing mechanism is performed on a cell population present in a mammalian subject. By way of non-limiting example, a useful target gene is a mutated Janus Kinase-2 family member, wherein the mammalian subject expresses the mutant target gene suffers from a myeloproliferative disease resulting from aberrant kinase activity.

[0853] Co-administration of polynucleotides, primary constructs and mmRNA and RNAi agents are also provided herein.

### Modulation of Biological Pathways

[0854] The rapid translation polynucleotides, primary constructs and mmRNA introduced into cells provides a desirable mechanism of modulating target biological pathways. Such modulation includes antagonism or agonism of a given pathway. In one embodiment, a method is provided for antagonizing a biological pathway in a cell by contacting the cell with an effective amount of a composition comprising a polynucleotide, primary construct or mmRNA encoding a polypeptide of interest, under conditions such that the polynucleotides, primary constructs and mmRNA is localized into the cell and the polypeptide is capable of being translated in the cell from the polynucleotides, primary constructs and mmRNA, wherein the polypeptide inhibits the activity of a polypeptide functional in the biological pathway. Exemplary biological pathways are those defective in an autoimmune or inflammatory disorder such as multiple sclerosis, rheumatoid arthritis, psoriasis, lupus erythematosus, ankylosing spondylitis colitis, or Crohn's disease; in particular, antagonism of the IL-12 and IL-23 signaling pathways are of particular utility. (See Kikly K, Liu L, Na S, Sedgwick J D (2006) Curr. Opin. Immunol. 18 (6): 670-5).

[0855] Further, provided are polynucleotide, primary construct or mmRNA encoding an antagonist for chemokine receptors; chemokine receptors CXCR-4 and CCR-5 are required for, e.g., HIV entry into host cells (Arenzana-Seisdedos F et al, (1996) Nature. October 3; 383 (6599): 400).

[0856] Alternatively, provided are methods of agonizing a biological pathway in a cell by contacting the cell with an effective amount of a polynucleotide, primary construct or mmRNA encoding a recombinant polypeptide under conditions such that the nucleic acid is localized into the cell and the recombinant polypeptide is capable of being translated in the cell from the nucleic acid, and the recombinant polypeptide induces the activity of a polypeptide functional in the biological pathway. Exemplary agonized biological pathways include pathways that modulate cell fate determination. Such agonization is reversible or, alternatively, irreversible.

### Expression of Ligand or Receptor on Cell Surface

[0857] In some aspects and embodiments of the aspects described herein, the polynucleotides, primary constructs or mmRNA described herein can be used to express a ligand or ligand receptor on the surface of a cell (e.g., a homing moiety). A ligand or ligand receptor moiety attached to a cell surface can permit the cell to have a desired biological interaction with a tissue or an agent in vivo. A ligand can be an antibody, an antibody fragment, an aptamer, a peptide, a vitamin, a carbohydrate, a protein or polypeptide, a receptor, e.g., cell-surface receptor, an adhesion molecule, a glycoprotein, a sugar residue, a therapeutic agent, a drug, a glycosaminoglycan, or any combination thereof. For example, a ligand can be an antibody that recognizes a cancer-cell specific antigen, rendering the cell capable of preferentially interacting with tumor cells to permit tumor-specific localization of a modified cell. A ligand can confer the ability of a cell composition to accumulate in a tissue to be treated, since a preferred ligand may be capable of interacting with a target molecule on the external face of a tissue to be treated. Ligands having limited cross-reactivity to other tissues are generally preferred.

[0858] In some cases, a ligand can act as a homing moiety which permits the cell to target to a specific tissue or interact with a specific ligand. Such homing moieties can include, but are not limited to, any member of a specific binding pair, antibodies, monoclonal antibodies, or derivatives or analogs thereof, including without limitation: Fv fragments, single chain Fv (scFv) fragments, Fab′ fragments, F(ab′)2 fragments, single domain antibodies, camelized antibodies and antibody fragments, humanized antibodies and antibody fragments, and multivalent versions of the foregoing; multivalent binding reagents including without limitation: monospecific or bispecific antibodies, such as disulfide stabilized Fv fragments, scFv tandems ((SCFV)2 fragments), diabodies, tribodies or tetrabodies, which typically are covalently linked or otherwise stabilized (i.e., leucine zipper or helix stabilized) scFv fragments; and other homing moieties include for example, aptamers, receptors, and fusion proteins.

[0859] In some embodiments, the homing moiety may be a surface-bound antibody, which can permit tuning of cell targeting specificity. This is especially useful since highly specific antibodies can be raised against an epitope of interest for the desired targeting site. In one embodiment, multiple antibodies are expressed on the surface of a cell, and each antibody can have a different specificity for a desired target. Such approaches can increase the avidity and specificity of homing interactions.

[0860] A skilled artisan can select any homing moiety based on the desired localization or function of the cell, for example an estrogen receptor ligand, such as tamoxifen, can target cells to estrogen-dependent breast cancer cells that have an increased number of estrogen receptors on the cell surface. Other non-limiting examples of ligand/receptor interactions include CCRI (e.g., for treatment of inflamed joint tissues or brain in rheumatoid arthritis, and/or multiple sclerosis), CCR7, CCR8 (e.g., targeting to lymph node tissue), CCR6, CCR9, CCR10 (e.g., to target to intestinal tissue), CCR4, CCR10 (e.g., for targeting to skin), CXCR4 (e.g., for general enhanced transmigration), HCELL (e.g., for treatment of inflammation and inflammatory disorders, bone marrow), Alpha4beta7 (e.g., for intestinal mucosa targeting), VLA-4/VCAM-1 (e.g., targeting to endothelium). In general, any receptor involved in targeting (e.g., cancer metastasis) can be harnessed for use in the methods and compositions described herein.

### Modulation of Cell Lineage

[0861] Provided are methods of inducing an alteration in cell fate in a target mammalian cell. The target mammalian cell may be a precursor cell and the alteration may involve driving differentiation into a lineage, or blocking such differentiation. Alternatively, the target mammalian cell may be a differentiated cell, and the cell fate alteration includes driving de-differentiation into a pluripotent precursor cell, or blocking such de-differentiation, such as the dedifferentiation of cancer cells into cancer stem cells. In situations where a change in cell fate is desired, effective amounts of mRNAs encoding a cell fate inductive polypeptide is introduced into a target cell under conditions such that an alteration in cell fate is induced. In some embodiments, the modified mRNAs are useful to reprogram a subpopulation of cells from a first phenotype to a second phenotype. Such a reprogramming may be temporary or permanent.

[0862] Optionally, the reprogramming induces a target cell to adopt an intermediate phenotype.

[0863] Additionally, the methods of the present invention are particularly useful to generate induced pluripotent stem cells (iPS cells) because of the high efficiency of transfection, the ability to re-transfect cells, and the tenability of the amount of recombinant polypeptides produced in the target cells. Further, the use of iPS cells generated using the methods described herein is expected to have a reduced incidence of teratoma formation.

[0864] Also provided are methods of reducing cellular differentiation in a target cell population. For example, a target cell population containing one or more precursor cell types is contacted with a composition having an effective amount of a polynucleotides, primary constructs and mmRNA encoding a polypeptide, under conditions such that the polypeptide is translated and reduces the differentiation of the precursor cell. In non-limiting embodiments, the target cell population contains injured tissue in a mammalian subject or tissue affected by a surgical procedure. The precursor cell is, e.g., a stromal precursor cell, a neural precursor cell, or a mesenchymal precursor cell.

[0865] In a specific embodiment, provided are polynucleotide, primary construct or mmRNA that encode one or more differentiation factors Gata4, Mef2c and Tbx4. These mRNA-generated factors are introduced into fibroblasts and drive the reprogramming into cardiomyocytes. Such a reprogramming can be performed in vivo, by contacting an mRNA-containing patch or other material to damaged cardiac tissue to facilitate cardiac regeneration. Such a process promotes cardiomyocyte genesis as opposed to fibrosis.

### Mediation of Cell Death

[0866] In one embodiment, polynucleotides, primary constructs or mmRNA compositions can be used to induce apoptosis in a cell (e.g., a cancer cell) by increasing the expression of a death receptor, a death receptor ligand or a combination thereof. This method can be used to induce cell death in any desired cell and has particular usefulness in the treatment of cancer where cells escape natural apoptotic signals.

[0867] Apoptosis can be induced by multiple independent signaling pathways that converge upon a final effector mechanism consisting of multiple interactions between several “death receptors” and their ligands, which belong to the tumor necrosis factor (TNF) receptor/ligand superfamily. The best-characterized death receptors are CD95 (“Fas”), TNFRI (p55), death receptor 3 (DR3 or Apo3/TRAMO), DR4 and DR5 (apo2-TRAIL-R2). The final effector mechanism of apoptosis may be the activation of a series of proteinases designated as caspases. The activation of these caspases results in the cleavage of a series of vital cellular proteins and cell death. The molecular mechanism of death receptors/ligands-induced apoptosis is well known in the art. For example, Fas/FasL-mediated apoptosis is induced by binding of three FasL molecules which induces trimerization of Fas receptor via C-terminus death domains (DDs), which in turn recruits an adapter protein FADD (Fas-associated protein with death domain) and Caspase-8. The oligomerization of this trimolecular complex, Fas/FAIDD/caspase-8, results in proteolytic cleavage of proenzyme caspase-8 into active caspase-8 that, in turn, initiates the apoptosis process by activating other downstream caspases through proteolysis, including caspase-3. Death ligands in general are apoptotic when formed into trimers or higher order of structures. As monomers, they may serve as antiapoptotic agents by competing with the trimers for binding to the death receptors.

[0868] In one embodiment, the polynucleotides, primary constructs or mmRNA composition encodes for a death receptor (e.g., Fas, TRAIL, TRAMO, TNFR, TLR etc). Cells made to express a death receptor by transfection of polynucleotides, primary constructs and mmRNA become susceptible to death induced by the ligand that activates that receptor. Similarly, cells made to express a death ligand, e.g., on their surface, will induce death of cells with the receptor when the transfected cell contacts the target cell. In another embodiment, the polynucleotides, primary constructs and mmRNA composition encodes for a death receptor ligand (e.g., FasL, TNF, etc). In another embodiment, the polynucleotides, primary constructs and mmRNA composition encodes a caspase (e.g., caspase 3, caspase 8, caspase 9 etc). Where cancer cells often exhibit a failure to properly differentiate to a non-proliferative or controlled proliferative form, in another embodiment, the synthetic, polynucleotides, primary constructs and mmRNA composition encodes for both a death receptor and its appropriate activating ligand. In another embodiment, the synthetic, polynucleotides, primary constructs and mmRNA composition encodes for a differentiation factor that when expressed in the cancer cell, such as a cancer stem cell, will induce the cell to differentiate to a non-pathogenic or nonself-renewing phenotype (e.g., reduced cell growth rate, reduced cell division etc) or to induce the cell to enter a dormant cell phase (e.g., G₀ resting phase).

[0869] One of skill in the art will appreciate that the use of apoptosis-inducing techniques may require that the polynucleotides, primary constructs or mmRNA are appropriately targeted to e.g., tumor cells to prevent unwanted wide-spread cell death. Thus, one can use a delivery mechanism (e.g., attached ligand or antibody, targeted liposome etc) that recognizes a cancer antigen such that the polynucleotides, primary constructs or mmRNA are expressed only in cancer cells.

### Cosmetic Applications

[0870] In one embodiment, the polynucleotides, primary constructs and/or mmRNA may be used in the treatment, amelioration or prophylaxis of cosmetic conditions. Such conditions include acne, rosacea, scarring, wrinkles, eczema, shingles, psoriasis, age spots, birth marks, dry skin, calluses, rash (e.g., diaper, heat), scabies, hives, warts, insect bites, vitiligo, dandruff, freckles, and general signs of aging.

### VI. Kits and Devices

### Kits

[0871] The invention provides a variety of kits for conveniently and/or effectively carrying out methods of the present invention. Typically kits will comprise sufficient amounts and/or numbers of components to allow a user to perform multiple treatments of a subject(s) and/or to perform multiple experiments.

[0872] In one aspect, the present invention provides kits comprising the molecules (polynucleotides, primary constructs or mmRNA) of the invention. In one embodiment, the kit comprises one or more functional antibodies or function fragments thereof.

[0873] Said kits can be for protein production, comprising a first polynucleotide, primary construct or mmRNA comprising a translatable region. The kit may further comprise packaging and instructions and/or a delivery agent to form a formulation composition. The delivery agent may comprise a saline, a buffered solution, a lipidoid or any delivery agent disclosed herein.

[0874] In one embodiment, the buffer solution may include sodium chloride, calcium chloride, phosphate and/or EDTA. In another embodiment, the buffer solution may include, but is not limited to, saline, saline with 2 mM calcium, 5% sucrose, 5% sucrose with 2 mM calcium, 5% Mannitol, 5% Mannitol with 2 mM calcium, Ringer's lactate, sodium chloride, sodium chloride with 2 mM calcium and mannose (See e.g., U.S. Pub. No. 20120258046; herein incorporated by reference in its entirety). In a further embodiment, the buffer solutions may be precipitated or it may be lyophilized. The amount of each component may be varied to enable consistent, reproducible higher concentration saline or simple buffer formulations. The components may also be varied in order to increase the stability of modified RNA in the buffer solution over a period of time and/or under a variety of conditions. In one aspect, the present invention provides kits for protein production, comprising: a polynucleotide, primary construct or mmRNA comprising a translatable region, provided in an amount effective to produce a desired amount of a protein encoded by the translatable region when introduced into a target cell; a second polynucleotide comprising an inhibitory nucleic acid, provided in an amount effective to substantially inhibit the innate immune response of the cell; and packaging and instructions.

[0875] In one aspect, the present invention provides kits for protein production, comprising a polynucleotide, primary construct or mmRNA comprising a translatable region, wherein the polynucleotide exhibits reduced degradation by a cellular nuclease, and packaging and instructions.

[0876] In one aspect, the present invention provides kits for protein production, comprising a polynucleotide, primary construct or mmRNA comprising a translatable region, wherein the polynucleotide exhibits reduced degradation by a cellular nuclease, and a mammalian cell suitable for translation of the translatable region of the first nucleic acid.

[0877] In one embodiment, the levels of Protein C may be measured by immunoassay. The assay may be purchased and is available from any number of suppliers including BioMerieux, Inc. (Durham, NC), Abbott Laboratories (Abbott Park, Ill.), Siemens Medical Solutions USA, Inc. (Malvern, PA), BIOPORTO® Diagnostics A/S (Gentofte, Denmark), USCN® Life Science Inc. (Houston, TX) or Roche Diagnostic Corporation (Indianapolis, IN). In this embodiment, the assay may be used to assess levels of Protein C or its activated form or a variant delivered as or in response to administration of a modified mRNA molecule.

### Devices

[0878] The present invention provides for devices which may incorporate polynucleotides, primary constructs or mmRNA that encode polypeptides of interest. These devices contain in a stable formulation the reagents to synthesize a polynucleotide in a formulation available to be immediately delivered to a subject in need thereof, such as a human patient. Non-limiting examples of such a polypeptide of interest include a growth factor and/or angiogenesis stimulator for wound healing, a peptide antibiotic to facilitate infection control, and an antigen to rapidly stimulate an immune response to a newly identified virus.

[0879] Devices may also be used in conjunction with the present invention. In one embodiment, a device is used to assess levels of a protein which has been administered in the form of a modified mRNA. The device may comprise a blood, urine or other biofluidic test. It may be as large as to include an automated central lab platform or a small decentralized bench top device. It may be point of care or a handheld device. In this embodiment, for example, Protein C or APC may be quatitated before, during or after treatment with a modified mRNA encoding Protein C (its zymogen), APC or any variants thereof. Protein C, also known as autoprothrombin IIA and blood coagulation factor XIV is a zymogen, or precursor, of a serine protease which plays an important role in the regulation of blood coagulation and generation of fibrinolytic activity in vivo. It is synthesized in the liver as a single-chain polypeptide but undergoes posttranslational processing to give rise to a two-chain intermediate. The intermediate form of Protein C is converted via thrombin-mediated cleavage of a 12-residue peptide from the amino-terminus of the heavy chain to of the molecule to the active form, known as “activated protein C” (APC). The device may be useful in drug discovery efforts as a companion diagnostic test associated with Protein C, or APC treatment such as for sepsis or severe sepsis. In early studies it was suggested that APC had the ability to reduce mortality in severe sepsis. Following this line of work, clinical studies lead to the FDA approval of one compound, activated drotrecogin alfa (recombinant protein C). However, in late 2011, the drug was withdrawn from sale in all markets following results of the PROWESS-SHOCK study, which showed the study did not meet the primary endpoint of a statistically significant reduction in 28-day all-cause mortality in patients with septic shock. The present invention provides modified mRNA molecules which may be used in the diagnosis and treatment of sepsis, severe sepsis and septicemia which overcome prior issues or problems associated with increasing protein expression efficiencies in mammals.

[0880] In some embodiments the device is self-contained, and is optionally capable of wireless remote access to obtain instructions for synthesis and/or analysis of the generated polynucleotide, primary construct or mmRNA. The device is capable of mobile synthesis of at least one polynucleotide, primary construct or mmRNA and preferably an unlimited number of different polynucleotides, primary constructs or mmRNA. In certain embodiments, the device is capable of being transported by one or a small number of individuals. In other embodiments, the device is scaled to fit on a benchtop or desk. In other embodiments, the device is scaled to fit into a suitcase, backpack or similarly sized object. In another embodiment, the device may be a point of care or handheld device. In further embodiments, the device is scaled to fit into a vehicle, such as a car, truck or ambulance, or a military vehicle such as a tank or personnel carrier. The information necessary to generate a modified mRNA encoding polypeptide of interest is present within a computer readable medium present in the device.

[0881] In one embodiment, a device may be used to assess levels of a protein which has been administered in the form of a polynucleotide, primary construct or mmRNA. The device may comprise a blood, urine or other biofluidic test.

[0882] In some embodiments, the device is capable of communication (e.g., wireless communication) with a database of nucleic acid and polypeptide sequences. The device contains at least one sample block for insertion of one or more sample vessels. Such sample vessels are capable of accepting in liquid or other form any number of materials such as template DNA, nucleotides, enzymes, buffers, and other reagents. The sample vessels are also capable of being heated and cooled by contact with the sample block. The sample block is generally in communication with a device base with one or more electronic control units for the at least one sample block. The sample block preferably contains a heating module, such heating molecule capable of heating and/or cooling the sample vessels and contents thereof to temperatures between about −20 C and above +100 C. The device base is in communication with a voltage supply such as a battery or external voltage supply. The device also contains means for storing and distributing the materials for RNA synthesis.

[0883] Optionally, the sample block contains a module for separating the synthesized nucleic acids. Alternatively, the device contains a separation module operably linked to the sample block. Preferably the device contains a means for analysis of the synthesized nucleic acid. Such analysis includes sequence identity (demonstrated such as by hybridization), absence of non-desired sequences, measurement of integrity of synthesized mRNA (such has by microfluidic viscometry combined with spectrophotometry), and concentration and/or potency of modified RNA (such as by spectrophotometry).

[0884] In certain embodiments, the device is combined with a means for detection of pathogens present in a biological material obtained from a subject, e.g., the IBIS PLEX-ID system (Abbott, Abbott Park, Ill.) for microbial identification.

[0885] Suitable devices for use in delivering intradermal pharmaceutical compositions described herein include short needle devices such as those described in U.S. Pat. Nos. 4,886,499; 5,190,521; 5,328,483; 5,527,288; 4,270,537; 5,015,235; 5,141,496; and 5,417,662; each of which is herein incorporated by reference in their entirety. Intradermal compositions may be administered by devices which limit the effective penetration length of a needle into the skin, such as those described in PCT publication WO 99/34850 (herein incorporated by reference in its entirety) and functional equivalents thereof. Jet injection devices which deliver liquid compositions to the dermis via a liquid jet injector and/or via a needle which pierces the stratum corneum and produces a jet which reaches the dermis are suitable. Jet injection devices are described, for example, in U.S. Pat. Nos. 5,480,381; 5,599,302; 5,334,144; 5,993,412; 5,649,912; 5,569,189; 5,704,911; 5,383,851; 5,893,397; 5,466,220; 5,339,163; 5,312,335; 5,503,627; 5,064,413; 5,520,639; 4,596,556; 4,790,824; 4,941,880; 4,940,460; and PCT publications WO 97/37705 and WO 97/13537; each of which are herein incorporated by reference in their entirety. Ballistic powder/particle delivery devices which use compressed gas to accelerate vaccine in powder form through the outer layers of the skin to the dermis are suitable. Alternatively or additionally, conventional syringes may be used in the classical mantoux method of intradermal administration.

[0886] In some embodiments, the device may be a pump or comprise a catheter for administration of compounds or compositions of the invention across the blood brain barrier. Such devices include but are not limited to a pressurized olfactory delivery device, iontophoresis devices, multi-layered microfluidic devices, and the like. Such devices may be portable or stationary. They may be implantable or externally tethered to the body or combinations thereof.

[0887] Devices for administration may be employed to deliver the polynucleotides, primary constructs or mmRNA of the present invention according to single, multi- or split-dosing regimens taught herein. Such devices are described below.

[0888] Method and devices known in the art for multi-administration to cells, organs and tissues are contemplated for use in conjunction with the methods and compositions disclosed herein as embodiments of the present invention. These include, for example, those methods and devices having multiple needles, hybrid devices employing for example lumens or catheters as well as devices utilizing heat, electric current or radiation driven mechanisms.

[0889] According to the present invention, these multi-administration devices may be utilized to deliver the single, multi- or split doses contemplated herein.

[0890] A method for delivering therapeutic agents to a solid tissue has been described by Bahrami et al. and is taught for example in US Patent Publication 20110230839, the contents of which are incorporated herein by reference in their entirety. According to Bahrami, an array of needles is incorporated into a device which delivers a substantially equal amount of fluid at any location in said solid tissue along each needle's length.

[0891] A device for delivery of biological material across the biological tissue has been described by Kodgule et al. and is taught for example in US Patent Publication 20110172610, the contents of which are incorporated herein by reference in their entirety. According to Kodgule, multiple hollow micro-needles made of one or more metals and having outer diameters from about 200 microns to about 350 microns and lengths of at least 100 microns are incorporated into the device which delivers peptides, proteins, carbohydrates, nucleic acid molecules, lipids and other pharmaceutically active ingredients or combinations thereof.

[0892] A delivery probe for delivering a therapeutic agent to a tissue has been described by Gunday et al. and is taught for example in US Patent Publication 20110270184, the contents of each of which are incorporated herein by reference in their entirety. According to Gunday, multiple needles are incorporated into the device which moves the attached capsules between an activated position and an inactivated position to force the agent out of the capsules through the needles.

[0893] A multiple-injection medical apparatus has been described by Assaf and is taught for example in US Patent Publication 20110218497, the contents of which are incorporated herein by reference in their entirety. According to Assaf, multiple needles are incorporated into the device which has a chamber connected to one or more of said needles and a means for continuously refilling the chamber with the medical fluid after each injection.

[0894] In one embodiment, the polynucleotide, primary construct, or mmRNA is administered subcutaneously or intramuscularly via at least 3 needles to three different, optionally adjacent, sites simultaneously, or within a 60 minutes period (e.g., administration to 4, 5, 6, 7, 8, 9, or 10 sites simultaneously or within a 60 minute period). The split doses can be administered simultaneously to adjacent tissue using the devices described in U.S. Patent Publication Nos. 20110230839 and 20110218497, each of which is incorporated herein by reference in their entirety.

[0895] An at least partially implantable system for injecting a substance into a patient's body, in particular a penis erection stimulation system has been described by Forsell and is taught for example in US Patent Publication 20110196198, the contents of which are incorporated herein by reference in their entirety. According to Forsell, multiple needles are incorporated into the device which is implanted along with one or more housings adjacent the patient's left and right corpora cavernosa. A reservoir and a pump are also implanted to supply drugs through the needles.

[0896] A method for the transdermal delivery of a therapeutic effective amount of iron has been described by Berenson and is taught for example in US Patent Publication 20100130910, the contents of which are incorporated herein by reference in their entirety. According to Berenson, multiple needles may be used to create multiple micro channels in stratum corneum to enhance transdermal delivery of the ionic iron on an iontophoretic patch.

[0897] A method for delivery of biological material across the biological tissue has been described by Kodgule et al and is taught for example in US Patent Publication 20110196308, the contents of which are incorporated herein by reference in their entirety. According to Kodgule, multiple biodegradable microneedles containing a therapeutic active ingredient are incorporated in a device which delivers proteins, carbohydrates, nucleic acid molecules, lipids and other pharmaceutically active ingredients or combinations thereof.

[0898] A transdermal patch comprising a botulinum toxin composition has been described by Donovan and is taught for example in US Patent Publication 20080220020, the contents of which are incorporated herein by reference in their entirety. According to Donovan, multiple needles are incorporated into the patch which delivers botulinum toxin under stratum corneum through said needles which project through the stratum corneum of the skin without rupturing a blood vessel.

[0899] A small, disposable drug reservoir, or patch pump, which can hold approximately 0.2 to 15 mL of liquid formulations can be placed on the skin and deliver the formulation continuously subcutaneously using a small bore needed (e.g., 26 to 34 gauge). As non-limiting examples, the patch pump may be 50 mm by 76 mm by 20 mm spring loaded having a 30 to 34 gauge needle (BD™ Microinfuser, Franklin Lakes NJ), 41 mm by 62 mm by 17 mm with a 2 mL reservoir used for drug delivery such as insulin (OMNIPOD®, Insulet Corporation Bedford, MA), or 43-60 mm diameter, 10 mm thick with a 0.5 to 10 mL reservoir (PATCHPUMP®, SteadyMed Therapeutics, San Francisco, CA). Further, the patch pump may be battery powered and/or rechargeable.

[0900] A cryoprobe for administration of an active agent to a location of cryogenic treatment has been described by Toubia and is taught for example in US Patent Publication 20080140061, the contents of which are incorporated herein by reference in their entirety. According to Toubia, multiple needles are incorporated into the probe which receives the active agent into a chamber and administers the agent to the tissue.

[0901] A method for treating or preventing inflammation or promoting healthy joints has been described by Stock et al and is taught for example in US Patent Publication 20090155186, the contents of which are incorporated herein by reference in their entirety. According to Stock, multiple needles are incorporated in a device which administers compositions containing signal transduction modulator compounds.

[0902] A multi-site injection system has been described by Kimmell et al. and is taught for example in US Patent Publication 20100256594, the contents of which are incorporated herein by reference in their entirety. According to Kimmell, multiple needles are incorporated into a device which delivers a medication into a stratum corneum through the needles.

[0903] A method for delivering interferons to the intradermal compartment has been described by Dekker et al. and is taught for example in US Patent Publication 20050181033, the contents of which are incorporated herein by reference in their entirety. According to Dekker, multiple needles having an outlet with an exposed height between 0 and 1 mm are incorporated into a device which improves pharmacokinetics and bioavailability by delivering the substance at a depth between 0.3 mm and 2 mm.

[0904] A method for delivering genes, enzymes and biological agents to tissue cells has described by Desai and is taught for example in US Patent Publication 20030073908, the contents of which are incorporated herein by reference in their entirety. According to Desai, multiple needles are incorporated into a device which is inserted into a body and delivers a medication fluid through said needles.

[0905] A method for treating cardiac arrhythmias with fibroblast cells has been described by Lee et al and is taught for example in US Patent Publication 20040005295, the contents of which are incorporated herein by reference in their entirety. According to Lee, multiple needles are incorporated into the device which delivers fibroblast cells into the local region of the tissue.

[0906] A method using a magnetically controlled pump for treating a brain tumor has been described by Shachar et al. and is taught for example in U.S. Pat. No. 7,799,012 (method) and U.S. Pat. No. 7,799,016 (device), the contents of which are incorporated herein by reference in their entirety. According Shachar, multiple needles were incorporated into the pump which pushes a medicating agent through the needles at a controlled rate.

[0907] Methods of treating functional disorders of the bladder in mammalian females have been described by Versi et al. and are taught for example in U.S. Pat. No. 8,029,496, the contents of which are incorporated herein by reference in their entirety. According to Versi, an array of micro-needles is incorporated into a device which delivers a therapeutic agent through the needles directly into the trigone of the bladder.

[0908] A micro-needle transdermal transport device has been described by Angel et al and is taught for example in U.S. Pat. No. 7,364,568, the contents of which are incorporated herein by reference in their entirety. According to Angel, multiple needles are incorporated into the device which transports a substance into a body surface through the needles which are inserted into the surface from different directions. The micro-needle transdermal transport device may be a solid micro-needle system or a hollow micro-needle system. As a non-limiting example, the solid micro-needle system may have up to a 0.5 mg capacity, with 300-1500 solid micro-needles per cm² about 150-700 μm tall coated with a drug. The micro-needles penetrate the stratum corneum and remain in the skin for short duration (e.g., 20 seconds to 15 minutes). In another example, the hollow micro-needle system has up to a 3 mL capacity to deliver liquid formulations using 15-20 microneedles per cm² being approximately 950 μm tall. The micro-needles penetrate the skin to allow the liquid formulations to flow from the device into the skin. The hollow micro-needle system may be worn from 1 to 30 minutes depending on the formulation volume and viscosity.

[0909] A device for subcutaneous infusion has been described by Dalton et al and is taught for example in U.S. Pat. No. 7,150,726, the contents of which are incorporated herein by reference in their entirety. According to Dalton, multiple needles are incorporated into the device which delivers fluid through the needles into a subcutaneous tissue.

[0910] A device and a method for intradermal delivery of vaccines and gene therapeutic agents through microcannula have been described by Mikszta et al. and are taught for example in U.S. Pat. No. 7,473,247, the contents of which are incorporated herein by reference in their entirety. According to Mitszta, at least one hollow micro-needle is incorporated into the device which delivers the vaccines to the subject's skin to a depth of between 0.025 mm and 2 mm.

[0911] A method of delivering insulin has been described by Pettis et al and is taught for example in U.S. Pat. No. 7,722,595, the contents of which are incorporated herein by reference in their entirety. According to Pettis, two needles are incorporated into a device wherein both needles insert essentially simultaneously into the skin with the first at a depth of less than 2.5 mm to deliver insulin to intradermal compartment and the second at a depth of greater than 2.5 mm and less than 5.0 mm to deliver insulin to subcutaneous compartment.

[0912] Cutaneous injection delivery under suction has been described by Kochamba et al. and is taught for example in U.S. Pat. No. 6,896,666, the contents of which are incorporated herein by reference in their entirety. According to Kochamba, multiple needles in relative adjacency with each other are incorporated into a device which injects a fluid below the cutaneous layer.

[0913] A device for withdrawing or delivering a substance through the skin has been described by Down et al and is taught for example in U.S. Pat. No. 6,607,513, the contents of which are incorporated herein by reference in their entirety. According to Down, multiple skin penetrating members which are incorporated into the device have lengths of about 100 microns to about 2000 microns and are about 30 to 50 gauge.

[0914] A device for delivering a substance to the skin has been described by Palmer et al and is taught for example in U.S. Pat. No. 6,537,242, the contents of which are incorporated herein by reference in their entirety. According to Palmer, an array of micro-needles is incorporated into the device which uses a stretching assembly to enhance the contact of the needles with the skin and provides a more uniform delivery of the substance.

[0915] A perfusion device for localized drug delivery has been described by Zamoyski and is taught for example in U.S. Pat. No. 6,468,247, the contents of which are incorporated herein by reference in their entirety. According to Zamoyski, multiple hypodermic needles are incorporated into the device which injects the contents of the hypodermics into a tissue as said hypodermics are being retracted.

[0916] A method for enhanced transport of drugs and biological molecules across tissue by improving the interaction between micro-needles and human skin has been described by Prausnitz et al. and is taught for example in U.S. Pat. No. 6,743,211, the contents of which are incorporated herein by reference in their entirety. According to Prausnitz, multiple micro-needles are incorporated into a device which is able to present a more rigid and less deformable surface to which the micro-needles are applied.

[0917] A device for intraorgan administration of medicinal agents has been described by Ting et al and is taught for example in U.S. Pat. No. 6,077,251, the contents of which are incorporated herein by reference in their entirety. According to Ting, multiple needles having side openings for enhanced administration are incorporated into a device which by extending and retracting said needles from and into the needle chamber forces a medicinal agent from a reservoir into said needles and injects said medicinal agent into a target organ.

[0918] A multiple needle holder and a subcutaneous multiple channel infusion port has been described by Brown and is taught for example in U.S. Pat. No. 4,695,273, the contents of which are incorporated herein by reference in their entirety. According to Brown, multiple needles on the needle holder are inserted through the septum of the infusion port and communicate with isolated chambers in said infusion port.

[0919] A dual hypodermic syringe has been described by Horn and is taught for example in U.S. Pat. No. 3,552,394, the contents of which are incorporated herein by reference in their entirety. According to Horn, two needles incorporated into the device are spaced apart less than 68 mm and may be of different styles and lengths, thus enabling injections to be made to different depths.

[0920] A syringe with multiple needles and multiple fluid compartments has been described by Hershberg and is taught for example in U.S. Pat. No. 3,572,336, the contents of which are incorporated herein by reference in their entirety. According to Hershberg, multiple needles are incorporated into the syringe which has multiple fluid compartments and is capable of simultaneously administering incompatible drugs which are not able to be mixed for one injection.

[0921] A surgical instrument for intradermal injection of fluids has been described by Eliscu et al. and is taught for example in U.S. Pat. No. 2,588,623, the contents of which are incorporated herein by reference in their entirety. According to Eliscu, multiple needles are incorporated into the instrument which injects fluids intradermally with a wider disperse.

[0922] An apparatus for simultaneous delivery of a substance to multiple breast milk ducts has been described by Hung and is taught for example in EP 1818017, the contents of which are incorporated herein by reference in their entirety. According to Hung, multiple lumens are incorporated into the device which inserts though the orifices of the ductal networks and delivers a fluid to the ductal networks.

[0923] A catheter for introduction of medications to the tissue of a heart or other organs has been described by Tkebuchava and is taught for example in WO2006138109, the contents of which are incorporated herein by reference in their entirety. According to Tkebuchava, two curved needles are incorporated which enter the organ wall in a flattened trajectory.

[0924] Devices for delivering medical agents have been described by Mckay et al. and are taught for example in WO2006118804, the content of which are incorporated herein by reference in their entirety. According to Mckay, multiple needles with multiple orifices on each needle are incorporated into the devices to facilitate regional delivery to a tissue, such as the interior disc space of a spinal disc.

[0925] A method for directly delivering an immunomodulatory substance into an intradermal space within a mammalian skin has been described by Pettis and is taught for example in WO2004020014, the contents of which are incorporated herein by reference in their entirety. According to Pettis, multiple needles are incorporated into a device which delivers the substance through the needles to a depth between 0.3 mm and 2 mm.

[0926] Methods and devices for administration of substances into at least two compartments in skin for systemic absorption and improved pharmacokinetics have been described by Pettis et al. and are taught for example in WO2003094995, the contents of which are incorporated herein by reference in their entirety. According to Pettis, multiple needles having lengths between about 300 μm and about 5 mm are incorporated into a device which delivers to intradermal and subcutaneous tissue compartments simultaneously.

[0927] A drug delivery device with needles and a roller has been described by Zimmerman et al. and is taught for example in WO2012006259, the contents of which are incorporated herein by reference in their entirety. According to Zimmerman, multiple hollow needles positioned in a roller are incorporated into the device which delivers the content in a reservoir through the needles as the roller rotates.

[0928] A drug delivery device such as a stent is known in the art and is taught for example in U.S. Pat. No. 8,333,799, U.S. Pub. Nos. US20060020329, US20040172127 and US20100161032; the contents of each of which are herein incorporated by reference in their entirety. Formulations of the polynucleotides, primary constructs, mmRNA described herein may be delivered using stents. Additionally, stents used herein may be able to deliver multiple polynucleotides, primary constructs and/or mmRNA and/or formulations at the same or varied rates of delivery. Non-limiting examples of manufacturers of stents include CORDIS® (Miami, FL) (CYPHER®), Boston Scientific Corporation (Natick, MA) (TAXUS®), Medtronic (Minneapolis, MN) (ENDEAVOUR®) and Abbott (Abbott Park, IL) (XIENCE V®).

Methods and Devices Utilizing Catheters and/or Lumens

[0929] Methods and devices using catheters and lumens may be employed to administer the mmRNA of the present invention on a single, multi- or split dosing schedule. Such methods and devices are described below.

[0930] A catheter-based delivery of skeletal myoblasts to the myocardium of damaged hearts has been described by Jacoby et al and is taught for example in US Patent Publication 20060263338, the contents of which are incorporated herein by reference in their entirety. According to Jacoby, multiple needles are incorporated into the device at least part of which is inserted into a blood vessel and delivers the cell composition through the needles into the localized region of the subject's heart.

[0931] An apparatus for treating asthma using neurotoxin has been described by Deem et al and is taught for example in US Patent Publication 20060225742, the contents of which are incorporated herein by reference in their entirety. According to Deem, multiple needles are incorporated into the device which delivers neurotoxin through the needles into the bronchial tissue.

[0932] A method for administering multiple-component therapies has been described by Nayak and is taught for example in U.S. Pat. No. 7,699,803, the contents of which are incorporated herein by reference in their entirety. According to Nayak, multiple injection cannulas may be incorporated into a device wherein depth slots may be included for controlling the depth at which the therapeutic substance is delivered within the tissue.

[0933] A surgical device for ablating a channel and delivering at least one therapeutic agent into a desired region of the tissue has been described by Mcintyre et al and is taught for example in U.S. Pat. No. 8,012,096, the contents of which are incorporated herein by reference in their entirety. According to McIntyre, multiple needles are incorporated into the device which dispenses a therapeutic agent into a region of tissue surrounding the channel and is particularly well suited for transmyocardial revascularization operations.

[0934] Methods of treating functional disorders of the bladder in mammalian females have been described by Versi et al and are taught for example in U.S. Pat. No. 8,029,496, the contents of which are incorporated herein by reference in their entirety. According to Versi, an array of micro-needles is incorporated into a device which delivers a therapeutic agent through the needles directly into the trigone of the bladder.

[0935] A device and a method for delivering fluid into a flexible biological barrier have been described by Yeshurun et al. and are taught for example in U.S. Pat. No. 7,998,119 (device) and U.S. Pat. No. 8,007,466 (method), the contents of which are incorporated herein by reference in their entirety. According to Yeshurun, the micro-needles on the device penetrate and extend into the flexible biological barrier and fluid is injected through the bore of the hollow micro-needles.

[0936] A method for epicardially injecting a substance into an area of tissue of a heart having an epicardial surface and disposed within a torso has been described by Bonner et al and is taught for example in U.S. Pat. No. 7,628,780, the contents of which are incorporated herein by reference in their entirety. According to Bonner, the devices have elongate shafts and distal injection heads for driving needles into tissue and injecting medical agents into the tissue through the needles.

[0937] A device for sealing a puncture has been described by Nielsen et al and is taught for example in U.S. Pat. No. 7,972,358, the contents of which are incorporated herein by reference in their entirety. According to Nielsen, multiple needles are incorporated into the device which delivers a closure agent into the tissue surrounding the puncture tract.

[0938] A method for myogenesis and angiogenesis has been described by Chiu et al. and is taught for example in U.S. Pat. No. 6,551,338, the contents of which are incorporated herein by reference in their entirety. According to Chiu, 5 to 15 needles having a maximum diameter of at least 1.25 mm and a length effective to provide a puncture depth of 6 to 20 mm are incorporated into a device which inserts into proximity with a myocardium and supplies an exogeneous angiogenic or myogenic factor to said myocardium through the conduits which are in at least some of said needles.

[0939] A method for the treatment of prostate tissue has been described by Bolmsj et al. and is taught for example in U.S. Pat. No. 6,524,270, the contents of which are incorporated herein by reference in their entirety. According to Bolmsj, a device comprising a catheter which is inserted through the urethra has at least one hollow tip extendible into the surrounding prostate tissue. An astringent and analgesic medicine is administered through said tip into said prostate tissue.

[0940] A method for infusing fluids to an intraosseous site has been described by Findlay et al. and is taught for example in U.S. Pat. No. 6,761,726, the contents of which are incorporated herein by reference in their entirety. According to Findlay, multiple needles are incorporated into a device which is capable of penetrating a hard shell of material covered by a layer of soft material and delivers a fluid at a predetermined distance below said hard shell of material.

[0941] A device for injecting medications into a vessel wall has been described by Vigil et al. and is taught for example in U.S. Pat. No. 5,713,863, the contents of which are incorporated herein by reference in their entirety. According to Vigil, multiple injectors are mounted on each of the flexible tubes in the device which introduces a medication fluid through a multi-lumen catheter, into said flexible tubes and out of said injectors for infusion into the vessel wall.

[0942] A catheter for delivering therapeutic and/or diagnostic agents to the tissue surrounding a bodily passageway has been described by Faxon et al. and is taught for example in U.S. Pat. No. 5,464,395, the contents of which are incorporated herein by reference in their entirety. According to Faxon, at least one needle cannula is incorporated into the catheter which delivers the desired agents to the tissue through said needles which project outboard of the catheter.

[0943] Balloon catheters for delivering therapeutic agents have been described by Orr and are taught for example in WO2010024871, the contents of which are incorporated herein by reference in their entirety. According to Orr, multiple needles are incorporated into the devices which deliver the therapeutic agents to different depths within the tissue. In another aspect, drug-eluting balloons may be used to deliver the formulations described herein. The drug-eluting balloons may be used in target lesion applications such as, but are not limited to, in-stent restenosis, treating lesion in tortuous vessels, bifurcation lesions, femoral/popliteal lesions and below the knee lesions.

[0944] A device for delivering therapeutic agents (e.g., polynucleotides, primary constructs or mmRNA) to tissue disposed about a lumin has been described by Perry et al. and is taught for example in U.S. Pat. Pub. US20100125239, the contents of which are herein incorporated by reference in their entirety. According to Perry, the catheter has a balloon which may be coated with a therapeutic agent by methods known in the art and described in Perry. When the balloon expands, the therapeutic agent will contact the surrounding tissue. The device may additionally have a heat source to change the temperature of the coating on the balloon to release the therapeutic agent to the tissue.

### Methods and Devices Utilizing Electrical Current

[0945] Methods and devices utilizing electric current may be employed to deliver the mmRNA of the present invention according to the single, multi- or split dosing regimens taught herein. Such methods and devices are described below.

[0946] An electro collagen induction therapy device has been described by Marquez and is taught for example in US Patent Publication 20090137945, the contents of which are incorporated herein by reference in their entirety. According to Marquez, multiple needles are incorporated into the device which repeatedly pierce the skin and draw in the skin a portion of the substance which is applied to the skin first.

[0947] An electrokinetic system has been described by Etheredge et al. and is taught for example in US Patent Publication 20070185432, the contents of which are incorporated herein by reference in their entirety. According to Etheredge, micro-needles are incorporated into a device which drives by an electrical current the medication through the needles into the targeted treatment site.

[0948] An iontophoresis device has been described by Matsumura et al. and is taught for example in U.S. Pat. No. 7,437,189, the contents of which are incorporated herein by reference in their entirety. According to Matsumura, multiple needles are incorporated into the device which is capable of delivering ionizable drug into a living body at higher speed or with higher efficiency.

[0949] Intradermal delivery of biologically active agents by needle-free injection and electroporation has been described by Hoffmann et al and is taught for example in U.S. Pat. No. 7,171,264, the contents of which are incorporated herein by reference in their entirety. According to Hoffmann, one or more needle-free injectors are incorporated into an electroporation device and the combination of needle-free injection and electroporation is sufficient to introduce the agent into cells in skin, muscle or mucosa.

[0950] A method for electropermeabilization-mediated intracellular delivery has been described by Lundkvist et al. and is taught for example in U.S. Pat. No. 6,625,486, the contents of which are incorporated herein by reference in their entirety. According to Lundkvist, a pair of needle electrodes is incorporated into a catheter. Said catheter is positioned into a body lumen followed by extending said needle electrodes to penetrate into the tissue surrounding said lumen. Then the device introduces an agent through at least one of said needle electrodes and applies electric field by said pair of needle electrodes to allow said agent pass through the cell membranes into the cells at the treatment site.

[0951] A delivery system for transdermal immunization has been described by Levin et al. and is taught for example in WO2006003659, the contents of which are incorporated herein by reference in their entirety. According to Levin, multiple electrodes are incorporated into the device which applies electrical energy between the electrodes to generate micro channels in the skin to facilitate transdermal delivery.

[0952] A method for delivering RF energy into skin has been described by Schomacker and is taught for example in WO2011163264, the contents of which are incorporated herein by reference in their entirety. According to Schomacker, multiple needles are incorporated into a device which applies vacuum to draw skin into contact with a plate so that needles insert into skin through the holes on the plate and deliver RF energy.

### VII. Definitions

[0953] At various places in the present specification, substituents of compounds of the present disclosure are disclosed in groups or in ranges. It is specifically intended that the present disclosure include each and every individual subcombination of the members of such groups and ranges. For example, the term “C₁₋₆ alkyl” is specifically intended to individually disclose methyl, ethyl, C₃ alkyl, C₄ alkyl, C₅ alkyl, and C₆ alkyl.

[0954] About: As used herein, the term “about” means+/−10% of the recited value.

[0955] Administered in combination: As used herein, the term “administered in combination” or “combined administration” means that two or more agents are administered to a subject at the same time or within an interval such that there may be an overlap of an effect of each agent on the patient. In some embodiments, they are administered within about 60, 30, 15, 10, 5, or 1 minute of one another. In some embodiments, the administrations of the agents are spaced sufficiently closely together such that a combinatorial (e.g., a synergistic) effect is achieved.

[0956] Animal: As used herein, the term “animal” refers to any member of the animal kingdom. In some embodiments, “animal” refers to humans at any stage of development. In some embodiments, “animal” refers to non-human animals at any stage of development. In certain embodiments, the non-human animal is a mammal (e.g., a rodent, a mouse, a rat, a rabbit, a monkey, a dog, a cat, a sheep, cattle, a primate, or a pig). In some embodiments, animals include, but are not limited to, mammals, birds, reptiles, amphibians, fish, and worms. In some embodiments, the animal is a transgenic animal, genetically-engineered animal, or a clone.

[0957] Antigens of interest or desired antigens: As used herein, the terms “antigens of interest” or “desired antigens” include those proteins and other biomolecules provided herein that are immunospecifically bound by the antibodies and fragments, mutants, variants, and alterations thereof described herein. Examples of antigens of interest include, but are not limited to, insulin, insulin-like growth factor, hGH, tPA, cytokines, such as interleukins (IL), e.g., IL-1, IL-2, IL-3, IL-4, IL-5, IL-6, IL-7, IL-8, IL-9, IL-10, IL-11, IL-12, IL-13, IL-14, IL-15, IL-16, IL-17, IL-18, interferon (IFN) alpha, IFN beta, IFN gamma, IFN omega or IFN tau, tumor necrosis factor (TNF), such as TNF alpha and TNF beta, TNF gamma, TRAIL; G-CSF, GM-CSF, M-CSF, MCP-1 and VEGF.

[0958] Approximately: As used herein, the term “approximately” or “about,” as applied to one or more values of interest, refers to a value that is similar to a stated reference value. In certain embodiments, the term “approximately” or “about” refers to a range of values that fall within 25%, 20%, 19%, 18%, 17%, 16%, 15%, 14%, 13%, 12%, 11%, 10%, 9%, 8%, 7%, 6%, 5%, 4%, 3%, 2%, 1%, or less in either direction (greater than or less than) of the stated reference value unless otherwise stated or otherwise evident from the context (except where such number would exceed 100% of a possible value).

[0959] Associated with: As used herein, the terms “associated with,” “conjugated,” “linked,” “attached,” and “tethered,” when used with respect to two or more moieties, means that the moieties are physically associated or connected with one another, either directly or via one or more additional moieties that serves as a linking agent, to form a structure that is sufficiently stable so that the moieties remain physically associated under the conditions in which the structure is used, e.g., physiological conditions. An “association” need not be strictly through direct covalent chemical bonding. It may also suggest ionic or hydrogen bonding or a hybridization based connectivity sufficiently stable such that the “associated” entities remain physically associated.

[0960] Bifunctional: As used herein, the term “bifunctional” refers to any substance, molecule or moiety which is capable of or maintains at least two functions. The functions may effect the same outcome or a different outcome. The structure that produces the function may be the same or different. For example, bifunctional modified RNAs of the present invention may encode a cytotoxic peptide (a first function) while those nucleosides which comprise the encoding RNA are, in and of themselves, cytotoxic (second function). In this example, delivery of the bifunctional modified RNA to a cancer cell would produce not only a peptide or protein molecule which may ameliorate or treat the cancer but would also deliver a cytotoxic payload of nucleosides to the cell should degradation, instead of translation of the modified RNA, occur.

[0961] Biocompatible: As used herein, the term “biocompatible” means compatible with living cells, tissues, organs or systems posing little to no risk of injury, toxicity or rejection by the immune system.

[0962] Biodegradable: As used herein, the term “biodegradable” means capable of being broken down into innocuous products by the action of living things.

[0963] Biologically active: As used herein, the phrase “biologically active” refers to a characteristic of any substance that has activity in a biological system and/or organism. For instance, a substance that, when administered to an organism, has a biological effect on that organism, is considered to be biologically active. In particular embodiments, a polynucleotide, primary construct or mmRNA of the present invention may be considered biologically active if even a portion of the polynucleotide, primary construct or mmRNA is biologically active or mimics an activity considered biologically relevant.

[0964] Chemical terms: The following provides the definition of various chemical terms from “acyl” to “thiol.”

[0965] The term “acyl,” as used herein, represents a hydrogen or an alkyl group (e.g., a haloalkyl group), as defined herein, that is attached to the parent molecular group through a carbonyl group, as defined herein, and is exemplified by formyl (i.e., a carboxyaldehyde group), acetyl, propionyl, butanoyl and the like. Exemplary unsubstituted acyl groups include from 1 to 7, from 1 to 11, or from 1 to 21 carbons. In some embodiments, the alkyl group is further substituted with 1, 2, 3, or 4 substituents as described herein.

[0966] The term “acylamino,” as used herein, represents an acyl group, as defined herein, attached to the parent molecular group though an amino group, as defined herein (i.e., —N(R^{N1})—C(O)—R, where R is H or an optionally substituted C₁₋₆, C₁₋₁₀, or C₁₋₂₀ alkyl group and R^{N1} is as defined herein). Exemplary unsubstituted acylamino groups include from 1 to 41 carbons (e.g., from 1 to 7, from 1 to 13, from 1 to 21, from 2 to 7, from 2 to 13, from 2 to 21, or from 2 to 41 carbons). In some embodiments, the alkyl group is further substituted with 1, 2, 3, or 4 substituents as described herein, and/or the amino group is —NH₂ or —NHR^{N1}, wherein R^{N1} is, independently, OH, NO₂, NH₂, NR^{N2}₂, SO₂OR^{N2}, SO₂R^{N2}, SOR^{N2}, alkyl, or aryl, and each R^{N2} can be H, alkyl, or aryl.

[0967] The term “acyloxy,” as used herein, represents an acyl group, as defined herein, attached to the parent molecular group though an oxygen atom (i.e., —O—C(O)—R, where R is H or an optionally substituted C₁₋₆, C₁₋₁₀, or C₁₋₂₀ alkyl group). Exemplary unsubstituted acyloxy groups include from 1 to 21 carbons (e.g., from 1 to 7 or from 1 to 11 carbons). In some embodiments, the alkyl group is further substituted with 1, 2, 3, or 4 substituents as described herein, and/or the amino group is —NH₂ or —NHR^{N1}, wherein R^{N1} is, independently, OH, NO₂, NH₂, NR^{N2}₂, SO₂OR^{N2}, SO₂R^{N2}, SOR^{N2}, alkyl, or aryl, and each R^{N2} can be H, alkyl, or aryl.

[0968] The term “alkaryl,” as used herein, represents an aryl group, as defined herein, attached to the parent molecular group through an alkylene group, as defined herein. Exemplary unsubstituted alkaryl groups are from 7 to 30 carbons (e.g., from 7 to 16 or from 7 to 20 carbons, such as C₁₋₆ alk-C₆₋₁₀ aryl, C₁₋₁₀ alk-C₆₋₁₀ aryl, or C₁₋₂₀ alk-C₆₋₁₀ aryl). In some embodiments, the alkylene and the aryl each can be further substituted with 1, 2, 3, or 4 substituent groups as defined herein for the respective groups. Other groups preceded by the prefix “alk-” are defined in the same manner, where “alk” refers to a C₁₋₆ alkylene, unless otherwise noted, and the attached chemical structure is as defined herein.

[0969] The term “alkcycloalkyl” represents a cycloalkyl group, as defined herein, attached to the parent molecular group through an alkylene group, as defined herein (e.g., an alkylene group of from 1 to 4, from 1 to 6, from 1 to 10, or form 1 to 20 carbons). In some embodiments, the alkylene and the cycloalkyl each can be further substituted with 1, 2, 3, or 4 substituent groups as defined herein for the respective group.

[0970] The term “alkenyl,” as used herein, represents monovalent straight or branched chain groups of, unless otherwise specified, from 2 to 20 carbons (e.g., from 2 to 6 or from 2 to 10 carbons) containing one or more carbon-carbon double bonds and is exemplified by ethenyl, 1-propenyl, 2-propenyl, 2-methyl-1-propenyl, 1-butenyl, 2-butenyl, and the like. Alkenyls include both cis and trans isomers. Alkenyl groups may be optionally substituted with 1, 2, 3, or 4 substituent groups that are selected, independently, from amino, aryl, cycloalkyl, or heterocyclyl (e.g., heteroaryl), as defined herein, or any of the exemplary alkyl substituent groups described herein.

[0971] The term “alkenyloxy” represents a chemical substituent of formula —OR, where R is a C₂₋₂₀ alkenyl group (e.g., C₂₋₆ or C₂₋₁₀ alkenyl), unless otherwise specified. Exemplary alkenyloxy groups include ethenyloxy, propenyloxy, and the like. In some embodiments, the alkenyl group can be further substituted with 1, 2, 3, or 4 substituent groups as defined herein (e.g., a hydroxy group).

[0972] The term “alkheteroaryl” refers to a heteroaryl group, as defined herein, attached to the parent molecular group through an alkylene group, as defined herein. Exemplary unsubstituted alkheteroaryl groups are from 2 to 32 carbons (e.g., from 2 to 22, from 2 to 18, from 2 to 17, from 2 to 16, from 3 to 15, from 2 to 14, from 2 to 13, or from 2 to 12 carbons, such as C₁₋₆ alk-C₁₋₁₂ heteroaryl, C₁₋₁₀ alk-C₁₋₁₂ heteroaryl, or C₁₋₂₀ alk-C₁₋₁₂ heteroaryl). In some embodiments, the alkylene and the heteroaryl each can be further substituted with 1, 2, 3, or 4 substituent groups as defined herein for the respective group. Alkheteroaryl groups are a subset of alkheterocyclyl groups.

[0973] The term “alkheterocyclyl” represents a heterocyclyl group, as defined herein, attached to the parent molecular group through an alkylene group, as defined herein. Exemplary unsubstituted alkheterocyclyl groups are from 2 to 32 carbons (e.g., from 2 to 22, from 2 to 18, from 2 to 17, from 2 to 16, from 3 to 15, from 2 to 14, from 2 to 13, or from 2 to 12 carbons, such as C₁₋₆ alk-C₁₋₁₂ heterocyclyl, C₁₋₁₀ alk-C₁₋₁₂ heterocyclyl, or C₁₋₂₀ alk-C₁₋₁₂ heterocyclyl). In some embodiments, the alkylene and the heterocyclyl each can be further substituted with 1, 2, 3, or 4 substituent groups as defined herein for the respective group.

[0974] The term “alkoxy” represents a chemical substituent of formula —OR, where R is a C₁₋₂₀ alkyl group (e.g., C₁₋₆ or C₁₋₁₀ alkyl), unless otherwise specified. Exemplary alkoxy groups include methoxy, ethoxy, propoxy (e.g., n-propoxy and isopropoxy), t-butoxy, and the like. In some embodiments, the alkyl group can be further substituted with 1, 2, 3, or 4 substituent groups as defined herein (e.g., hydroxy or alkoxy).

[0975] The term “alkoxyalkoxy” represents an alkoxy group that is substituted with an alkoxy group. Exemplary unsubstituted alkoxyalkoxy groups include between 2 to 40 carbons (e.g., from 2 to 12 or from 2 to 20 carbons, such as C₁₋₆ alkoxy-C₁₋₆ alkoxy, C₁₋₁₀ alkoxy-C₁₋₁₀ alkoxy, or C₁₋₂₀ alkoxy-C₁₋₂₀ alkoxy). In some embodiments, the each alkoxy group can be further substituted with 1, 2, 3, or 4 substituent groups as defined herein.

[0976] The term “alkoxyalkyl” represents an alkyl group that is substituted with an alkoxy group. Exemplary unsubstituted alkoxyalkyl groups include between 2 to 40 carbons (e.g., from 2 to 12 or from 2 to 20 carbons, such as C₁₋₆ alkoxy-C₁₋₆ alkyl, C₁₋₁₀ alkoxy-C₁₋₁₀ alkyl, or C₁₋₂₀ alkoxy-C₁₋₂₀ alkyl). In some embodiments, the alkyl and the alkoxy each can be further substituted with 1, 2, 3, or 4 substituent groups as defined herein for the respective group.

[0977] The term “alkoxycarbonyl,” as used herein, represents an alkoxy, as defined herein, attached to the parent molecular group through a carbonyl atom (e.g., —C(O)—OR, where R is H or an optionally substituted C₁₋₆, C₁₋₁₀, or C₁₋₂₀ alkyl group). Exemplary unsubstituted alkoxycarbonyl include from 1 to 21 carbons (e.g., from 1 to 11 or from 1 to 7 carbons). In some embodiments, the alkoxy group is further substituted with 1, 2, 3, or 4 substituents as described herein.

[0978] The term “alkoxycarbonylalkoxy,” as used herein, represents an alkoxy group, as defined herein, that is substituted with an alkoxycarbonyl group, as defined herein (e.g., —O-alkyl-C(O)—OR, where R is an optionally substituted C₁₋₆, C₁₋₁₀, or C₁₋₂₀ alkyl group). Exemplary unsubstituted alkoxycarbonylalkoxy include from 3 to 41 carbons (e.g., from 3 to 10, from 3 to 13, from 3 to 17, from 3 to 21, or from 3 to 31 carbons, such as C₁₋₆ alkoxycarbonyl-C₁₋₆ alkoxy, C₁₋₁₀ alkoxycarbonyl-C₁₋₁₀ alkoxy, or C₁₋₂₀ alkoxycarbonyl-C₁₋₂₀ alkoxy). In some embodiments, each alkoxy group is further independently substituted with 1, 2, 3, or 4 substituents, as described herein (e.g., a hydroxy group).

[0979] The term “alkoxycarbonylalkyl,” as used herein, represents an alkyl group, as defined herein, that is substituted with an alkoxycarbonyl group, as defined herein (e.g., -alkyl-C(O)—OR, where R is an optionally substituted C₁₋₂₀, C₁₋₁₀, or C₁₋₆ alkyl group). Exemplary unsubstituted alkoxycarbonylalkyl include from 3 to 41 carbons (e.g., from 3 to 10, from 3 to 13, from 3 to 17, from 3 to 21, or from 3 to 31 carbons, such as C₁₋₆ alkoxycarbonyl-C₁₋₆ alkyl, C₁₋₁₀ alkoxycarbonyl-C₁₋₁₀ alkyl, or C₁₋₂₀ alkoxycarbonyl-C₁₋₂₀ alkyl). In some embodiments, each alkyl and alkoxy group is further independently substituted with 1, 2, 3, or 4 substituents as described herein (e.g., a hydroxy group).

[0980] The term “alkyl,” as used herein, is inclusive of both straight chain and branched chain saturated groups from 1 to 20 carbons (e.g., from 1 to 10 or from 1 to 6), unless otherwise specified. Alkyl groups are exemplified by methyl, ethyl, n- and iso-propyl, n-, sec-, iso- and tert-butyl, neopentyl, and the like, and may be optionally substituted with one, two, three, or, in the case of alkyl groups of two carbons or more, four substituents independently selected from the group consisting of: (1) C₁₋₆ alkoxy; (2) C₁₋₆ alkylsulfinyl; (3) amino, as defined herein (e.g., unsubstituted amino (i.e., —NH₂) or a substituted amino (i.e., —N(R^{N1})₂, where R^{N1} is as defined for amino); (4) C₆₋₁₀ aryl-C₁₋₆ alkoxy; (5) azido; (6) halo; (7) (C₂₋₉ heterocyclyl)oxy; (8) hydroxy; (9) nitro; (10) oxo (e.g., carboxyaldehyde or acyl); (11) C₁₋₇ spirocyclyl; (12) thioalkoxy; (13) thiol; (14) —CO₂R^{A′}, where R^{A′} is selected from the group consisting of (a) C₁₋₂₀ alkyl (e.g., C₁₋₆ alkyl), (b) C₂₋₂₀ alkenyl (e.g., C₂₋₆ alkenyl), (c) C₆₋₁₀ aryl, (d) hydrogen, (e) C₁₋₆ alk-C₆₋₁₀ aryl, (f) amino-C₁₋₂₀ alkyl, (g) polyethylene glycol of —(CH₂)ₛ₂(OCH₂CH₂)ₛ₁(CH₂)ₛ₃OR′, wherein s1 is an integer from 1 to 10 (e.g., from 1 to 6 or from 1 to 4), each of s2 and s3, independently, is an integer from 0 to 10 (e.g., from 0 to 4, from 0 to 6, from 1 to 4, from 1 to 6, or from 1 to 10), and R′ is H or C₁₋₂₀ alkyl, and (h) amino-polyethylene glycol of —NR^{N1}(CH₂)ₛ₂(CH₂CH₂O)ₛ₁(CH₂)ₛ₃NR^{N1}, wherein s1 is an integer from 1 to 10 (e.g., from 1 to 6 or from 1 to 4), each of s2 and s3, independently, is an integer from 0 to 10 (e.g., from 0 to 4, from 0 to 6, from 1 to 4, from 1 to 6, or from 1 to 10), and each R^{N1} is, independently, hydrogen or optionally substituted C₁₋₆ alkyl; (15) —C(O)NR^{B′}R^{C′}, where each of R^{B′} and R^{C′} is, independently, selected from the group consisting of (a) hydrogen, (b) C₁₋₆ alkyl, (c) C₆₋₁₀ aryl, and (d) C₁₋₆ alk-C₆₋₁₀ aryl; (16) —SO₂R^{D′}, where R^{D′} is selected from the group consisting of (a) C₁₋₆ alkyl, (b) C₆₋₁₀ aryl, (c) C₁₋₆ alk-C₆₋₁₀ aryl, and (d) hydroxy; (17) —SO₂NR^{E′}R^{F′}, where each of R^{E′} and R^{F′} is, independently, selected from the group consisting of (a) hydrogen, (b) C₁₋₆ alkyl, (c) C₆₋₁₀ aryl and (d) C₁₋₆ alk-C₆₋₁₀ aryl; (18) —C(O)R^{G′}, where R^{G′} is selected from the group consisting of (a) C₁₋₂₀ alkyl (e.g., C₁₋₆ alkyl), (b) C₂₋₂₀ alkenyl (e.g., C₂₋₆ alkenyl), (c) C₆₋₁₀ aryl, (d) hydrogen, (e) C₁₋₆ alk-C₆₋₁₀ aryl, (f) amino-C₁₋₂₀ alkyl, (g) polyethylene glycol of —(CH₂)ₛ₂(OCH₂CH₂)ₛ₁(CH₂)ₛ₃OR′, wherein s1 is an integer from 1 to 10 (e.g., from 1 to 6 or from 1 to 4), each of s2 and s3, independently, is an integer from 0 to 10 (e.g., from 0 to 4, from 0 to 6, from 1 to 4, from 1 to 6, or from 1 to 10), and R′ is H or C₁₋₂₀ alkyl, and (h) amino-polyethylene glycol of —NR^{N1}(CH₂)ₛ₂(CH₂CH₂O)ₛ₁(CH₂)ₛ₃NR^{N1}, wherein s1 is an integer from 1 to 10 (e.g., from 1 to 6 or from 1 to 4), each of s2 and s3, independently, is an integer from 0 to 10 (e.g., from 0 to 4, from 0 to 6, from 1 to 4, from 1 to 6, or from 1 to 10), and each R^{N1} is, independently, hydrogen or optionally substituted C₁₋₆ alkyl; (19) —NR^{H′}C(O)R^{I′}, wherein R^{H′} is selected from the group consisting of (a1) hydrogen and (b1) C₁₋₆ alkyl, and R^{I′} is selected from the group consisting of (a2) C₁₋₂₀ alkyl (e.g., C₁₋₆ alkyl), (b2) C₂₋₂₀ alkenyl (e.g., C₂₋₆ alkenyl), (c2) C₆₋₁₀ aryl, (d2) hydrogen, (e2) C₁₋₆ alk-C₆₋₁₀ aryl, (f2) amino-C₁₋₂₀ alkyl, (g2) polyethylene glycol of —(CH₂)ₛ₂(OCH₂CH₂)ₛ₁(CH₂)ₛ₃OR′, wherein s1 is an integer from 1 to 10 (e.g., from 1 to 6 or from 1 to 4), each of s2 and s3, independently, is an integer from 0 to 10 (e.g., from 0 to 4, from 0 to 6, from 1 to 4, from 1 to 6, or from 1 to 10), and R′ is H or C₁₋₂₀ alkyl, and (h2) amino-polyethylene glycol of —NR^{N1}(CH₂)ₛ₂(CH₂CH₂O)ₛ₁(CH₂)ₛ₃NR^{N1}, wherein s1 is an integer from 1 to 10 (e.g., from 1 to 6 or from 1 to 4), each of s2 and s3, independently, is an integer from 0 to 10 (e.g., from 0 to 4, from 0 to 6, from 1 to 4, from 1 to 6, or from 1 to 10), and each R^{N1} is, independently, hydrogen or optionally substituted C₁₋₆ alkyl; (20) —NR^{J′}C(O)OR^{K′}, wherein R^{J′} is selected from the group consisting of (a1) hydrogen and (b1) C₁₋₆ alkyl, and R^{K′} is selected from the group consisting of (a2) C₁₋₂₀ alkyl (e.g., C₁₋₆ alkyl), (b2) C₂₋₂₀ alkenyl (e.g., C₂₋₆ alkenyl), (c2) C₆₋₁₀ aryl, (d2) hydrogen, (e2) C₁₋₆ alk-C₆₋₁₀ aryl, (f2) amino-C₁₋₂₀ alkyl, (g2) polyethylene glycol of —(CH₂)ₛ₂(OCH₂CH₂)ₛ₁(CH₂)ₛ₃OR′, wherein s1 is an integer from 1 to 10 (e.g., from 1 to 6 or from 1 to 4), each of s2 and s3, independently, is an integer from 0 to 10 (e.g., from 0 to 4, from 0 to 6, from 1 to 4, from 1 to 6, or from 1 to 10), and R′ is H or C₁₋₂₀ alkyl, and (h2) amino-polyethylene glycol of —NR^{N1}(CH₂)ₛ₂(CH₂CH₂O)ₛ₁(CH₂)ₛ₃NR^{N1}, wherein s1 is an integer from 1 to 10 (e.g., from 1 to 6 or from 1 to 4), each of s2 and s3, independently, is an integer from 0 to 10 (e.g., from 0 to 4, from 0 to 6, from 1 to 4, from 1 to 6, or from 1 to 10), and each R^{N1} is, independently, hydrogen or optionally substituted C₁₋₆ alkyl; and (21) amidine. In some embodiments, each of these groups can be further substituted as described herein. For example, the alkylene group of a C₁-alkaryl can be further substituted with an oxo group to afford the respective aryloyl substituent.

[0981] The term “alkylene” and the prefix “alk-,” as used herein, represent a saturated divalent hydrocarbon group derived from a straight or branched chain saturated hydrocarbon by the removal of two hydrogen atoms, and is exemplified by methylene, ethylene, isopropylene, and the like. The term “C_{x-y} alkylene” and the prefix “C_{x-y} alk-” represent alkylene groups having between x and y carbons. Exemplary values for x are 1, 2, 3, 4, 5, and 6, and exemplary values for y are 2, 3, 4, 5, 6, 7, 8, 9, 10, 12, 14, 16, 18, or 20 (e.g., C₁₋₆, C₁₋₁₀, C₂₋₂₀, C₂₋₆, C₂₋₁₀, or C₂₋₂₀ alkylene). In some embodiments, the alkylene can be further substituted with 1, 2, 3, or 4 substituent groups as defined herein for an alkyl group.

[0982] The term “alkylsulfinyl,” as used herein, represents an alkyl group attached to the parent molecular group through an —S(O)— group. Exemplary unsubstituted alkylsulfinyl groups are from 1 to 6, from 1 to 10, or from 1 to 20 carbons. In some embodiments, the alkyl group can be further substituted with 1, 2, 3, or 4 substituent groups as defined herein.

[0983] The term “alkylsulfinylalkyl,” as used herein, represents an alkyl group, as defined herein, substituted by an alkylsulfinyl group. Exemplary unsubstituted alkylsulfinylalkyl groups are from 2 to 12, from 2 to 20, or from 2 to 40 carbons. In some embodiments, each alkyl group can be further substituted with 1, 2, 3, or 4 substituent groups as defined herein.

[0984] The term “alkynyl,” as used herein, represents monovalent straight or branched chain groups from 2 to 20 carbon atoms (e.g., from 2 to 4, from 2 to 6, or from 2 to 10 carbons) containing a carbon-carbon triple bond and is exemplified by ethynyl, 1-propynyl, and the like. Alkynyl groups may be optionally substituted with 1, 2, 3, or 4 substituent groups that are selected, independently, from aryl, cycloalkyl, or heterocyclyl (e.g., heteroaryl), as defined herein, or any of the exemplary alkyl substituent groups described herein.

[0985] The term “alkynyloxy” represents a chemical substituent of formula —OR, where R is a C₂₋₂₀ alkynyl group (e.g., C₂₋₆ or C₂₋₁₀ alkynyl), unless otherwise specified. Exemplary alkynyloxy groups include ethynyloxy, propynyloxy, and the like. In some embodiments, the alkynyl group can be further substituted with 1, 2, 3, or 4 substituent groups as defined herein (e.g., a hydroxy group).

[0986] The term “amidine,” as used herein, represents a —C(═NH)NH₂ group.

[0987] The term “amino,” as used herein, represents —N(R^{N1})₂, wherein each R^{N1} is, independently, H, OH, NO₂, N(R^{N2})₂, SO₂OR^{N2}, SO₂R^{N2}, SOR^{N2}, an N-protecting group, alkyl, alkenyl, alkynyl, alkoxy, aryl, alkaryl, cycloalkyl, alkcycloalkyl, carboxyalkyl, sulfoalkyl, heterocyclyl (e.g., heteroaryl), or alkheterocyclyl (e.g., alkheteroaryl), wherein each of these recited R^{N1} groups can be optionally substituted, as defined herein for each group; or two R^{N1} combine to form a heterocyclyl or an N-protecting group, and wherein each R^{N2} is, independently, H, alkyl, or aryl. The amino groups of the invention can be an unsubstituted amino (i.e., —NH₂) or a substituted amino (i.e., —N(R^{N1})₂). In a preferred embodiment, amino is —NH₂ or —NHR^{N1}, wherein R^{N1} is, independently, OH, NO₂, NH₂, NR^{N2}₂, SO₂OR^{N2}, SO₂R^{N2}, SOR^{N2}, alkyl, carboxyalkyl, sulfoalkyl, or aryl, and each R^{N2} can be H, C₁₋₂₀ alkyl (e.g., C₁₋₆ alkyl), or C₆₋₁₀ aryl.

[0988] The term “amino acid,” as described herein, refers to a molecule having a side chain, an amino group, and an acid group (e.g., a carboxy group of —CO₂H or a sulfo group of —SO₃H), wherein the amino acid is attached to the parent molecular group by the side chain, amino group, or acid group (e.g., the side chain). In some embodiments, the amino acid is attached to the parent molecular group by a carbonyl group, where the side chain or amino group is attached to the carbonyl group. Exemplary side chains include an optionally substituted alkyl, aryl, heterocyclyl, alkaryl, alkheterocyclyl, aminoalkyl, carbamoylalkyl, and carboxyalkyl. Exemplary amino acids include alanine, arginine, asparagine, aspartic acid, cysteine, glutamic acid, glutamine, glycine, histidine, hydroxynorvaline, isoleucine, leucine, lysine, methionine, norvaline, ornithine, phenylalanine, proline, pyrrolysine, selenocysteine, serine, taurine, threonine, tryptophan, tyrosine, and valine. Amino acid groups may be optionally substituted with one, two, three, or, in the case of amino acid groups of two carbons or more, four substituents independently selected from the group consisting of: (1) C₁₋₆ alkoxy; (2) C₁₋₆ alkylsulfinyl; (3) amino, as defined herein (e.g., unsubstituted amino (i.e., —NH₂) or a substituted amino (i.e., —N(R^{N1})₂, where R^{N1} is as defined for amino); (4) C₆₋₁₀ aryl-C₁₋₆ alkoxy; (5) azido; (6) halo; (7) (C₂₋₉ heterocyclyl)oxy; (8) hydroxy; (9) nitro; (10) oxo (e.g., carboxyaldehyde or acyl); (11) C₁₋₇ spirocyclyl; (12) thioalkoxy; (13) thiol; (14) —CO₂R^{A′}, where R^{A′} is selected from the group consisting of (a) C₁₋₂₀ alkyl (e.g., C₁₋₆ alkyl), (b) C₂₋₂₀ alkenyl (e.g., C₂₋₆ alkenyl), (c) C₆₋₁₀ aryl, (d) hydrogen, (e) C₁₋₆ alk-C₆₋₁₀ aryl, (f) amino-C₁₋₂₀ alkyl, (g) polyethylene glycol of —(CH₂)ₛ₂(OCH₂CH₂)ₛ₁(CH₂)ₛ₃OR′, wherein s1 is an integer from 1 to 10 (e.g., from 1 to 6 or from 1 to 4), each of s2 and s3, independently, is an integer from 0 to 10 (e.g., from 0 to 4, from 0 to 6, from 1 to 4, from 1 to 6, or from 1 to 10), and R′ is H or C₁₋₂₀ alkyl, and (h) amino-polyethylene glycol of —NR^{N1}(CH₂)ₛ₂(CH₂CH₂O)ₛ₁(CH₂)ₛ₃NR^{N1}, wherein s1 is an integer from 1 to 10 (e.g., from 1 to 6 or from 1 to 4), each of s2 and s3, independently, is an integer from 0 to 10 (e.g., from 0 to 4, from 0 to 6, from 1 to 4, from 1 to 6, or from 1 to 10), and each R^{N1} is, independently, hydrogen or optionally substituted C₁₋₆ alkyl; (15) —C(O)NR^{B′}R^{C′}, where each of R^{B′} and R^{C′} is, independently, selected from the group consisting of (a) hydrogen, (b) C₁₋₆ alkyl, (c) C₆₋₁₀ aryl, and (d) C₁₋₆ alk-C₆₋₁₀ aryl; (16) —SO₂R^{D′}, where R^{D′} is selected from the group consisting of (a) C₁₋₆ alkyl, (b) C₆₋₁₀ aryl, (c) C₁₋₆ alk-C₆₋₁₀ aryl, and (d) hydroxy; (17) —SO₂NR^{E′}R^{F′}, where each of R^{E′} and R^{F′} is, independently, selected from the group consisting of (a) hydrogen, (b) C₁₋₆ alkyl, (c) C₆₋₁₀ aryl and (d) C₁₋₆ alk-C₆₋₁₀ aryl; (18) —C(O)R^{G′}, where R^{G′} is selected from the group consisting of (a) C₁₋₂₀ alkyl (e.g., C₁₋₆ alkyl), (b) C₂₋₂₀ alkenyl (e.g., C₂₋₆ alkenyl), (c) C₆₋₁₀ aryl, (d) hydrogen, (e) C₁₋₆ alk-C₆₋₁₀ aryl, (f) amino-C₁₋₂₀ alkyl, (g) polyethylene glycol of —(CH₂)ₛ₂(OCH₂CH₂)ₛ₁(CH₂)ₛ₃OR′, wherein s1 is an integer from 1 to 10 (e.g., from 1 to 6 or from 1 to 4), each of s2 and s3, independently, is an integer from 0 to 10 (e.g., from 0 to 4, from 0 to 6, from 1 to 4, from 1 to 6, or from 1 to 10), and R′ is H or C₁₋₂₀ alkyl, and (h) amino-polyethylene glycol of —NR^{N1}(CH₂)ₛ₂(CH₂CH₂O)ₛ₁(CH₂)ₛ₃NR^{N1}, wherein s1 is an integer from 1 to 10 (e.g., from 1 to 6 or from 1 to 4), each of s2 and s3, independently, is an integer from 0 to 10 (e.g., from 0 to 4, from 0 to 6, from 1 to 4, from 1 to 6, or from 1 to 10), and each R^{N1} is, independently, hydrogen or optionally substituted C₁₋₆ alkyl; (19) —NR^{H′}C(O)R^{I′}, wherein R^{H′} is selected from the group consisting of (a1) hydrogen and (b1) C₁₋₆ alkyl, and R^{I′} is selected from the group consisting of (a2) C₁₋₂₀ alkyl (e.g., C₁₋₆ alkyl), (b2) C₂₋₂₀ alkenyl (e.g., C₂₋₆ alkenyl), (c2) C₆₋₁₀ aryl, (d2) hydrogen, (e2) C₁₋₆ alk-C₆₋₁₀ aryl, (f2) amino-C₁₋₂₀ alkyl, (g2) polyethylene glycol of —(CH₂)ₛ₂(OCH₂CH₂)ₛ₁(CH₂)ₛ₃OR′, wherein s1 is an integer from 1 to 10 (e.g., from 1 to 6 or from 1 to 4), each of s2 and s3, independently, is an integer from 0 to 10 (e.g., from 0 to 4, from 0 to 6, from 1 to 4, from 1 to 6, or from 1 to 10), and R′ is H or C₁₋₂₀ alkyl, and (h2) amino-polyethylene glycol of —NR^{N1}(CH₂)ₛ₂(CH₂CH₂O)ₛ₁(CH₂)ₛ₃NR^{N1}, wherein s1 is an integer from 1 to 10 (e.g., from 1 to 6 or from 1 to 4), each of s2 and s3, independently, is an integer from 0 to 10 (e.g., from 0 to 4, from 0 to 6, from 1 to 4, from 1 to 6, or from 1 to 10), and each R^{N1} is, independently, hydrogen or optionally substituted C₁₋₆ alkyl; (20) —NR^{J′}C(O)OR^{K′}, wherein R^{J′} is selected from the group consisting of (a1) hydrogen and (b1) C₁₋₆ alkyl, and R^{K′} is selected from the group consisting of (a2) C₁₋₂₀ alkyl (e.g., C₁₋₆ alkyl), (b2) C₂₋₂₀ alkenyl (e.g., C₂₋₆ alkenyl), (c2) C₆₋₁₀ aryl, (d2) hydrogen, (e2) C₁₋₆ alk-C₆₋₁₀ aryl, (f2) amino-C₁₋₂₀ alkyl, (g2) polyethylene glycol of —(CH₂)ₛ₂(OCH₂CH₂)ₛ₁(CH₂)ₛ₃OR′, wherein s1 is an integer from 1 to 10 (e.g., from 1 to 6 or from 1 to 4), each of s2 and s3, independently, is an integer from 0 to 10 (e.g., from 0 to 4, from 0 to 6, from 1 to 4, from 1 to 6, or from 1 to 10), and R′ is H or C₁₋₂₀ alkyl, and (h2) amino-polyethylene glycol of —NR^{N1}(CH₂)ₛ₂(CH₂CH₂O)ₛ₁(CH₂)ₛ₃NR^{N1}, wherein s1 is an integer from 1 to 10 (e.g., from 1 to 6 or from 1 to 4), each of s2 and s3, independently, is an integer from 0 to 10 (e.g., from 0 to 4, from 0 to 6, from 1 to 4, from 1 to 6, or from 1 to 10), and each R^{N1} is, independently, hydrogen or optionally substituted C₁₋₆ alkyl; and (21) amidine. In some embodiments, each of these groups can be further substituted as described herein.

[0989] The term “aminoalkoxy,” as used herein, represents an alkoxy group, as defined herein, substituted by an amino group, as defined herein. The alkyl and amino each can be further substituted with 1, 2, 3, or 4 substituent groups as described herein for the respective group (e.g., CO₂R^{A′}, where R^{A′} is selected from the group consisting of (a) C₁₋₆ alkyl, (b) C₆₋₁₀ aryl, (c) hydrogen, and (d) C₁₋₆ alk-C₆₋₁₀ aryl, e.g., carboxy).

[0990] The term “aminoalkyl,” as used herein, represents an alkyl group, as defined herein, substituted by an amino group, as defined herein. The alkyl and amino each can be further substituted with 1, 2, 3, or 4 substituent groups as described herein for the respective group (e.g., CO₂R^{A′}, where R^{A′} is selected from the group consisting of (a) C₁₋₆ alkyl, (b) C₆₋₁₀ aryl, (c) hydrogen, and (d) C₁₋₆ alk-C₆₋₁₀ aryl, e.g., carboxy).

[0991] The term “aryl,” as used herein, represents a mono-, bicyclic, or multicyclic carbocyclic ring system having one or two aromatic rings and is exemplified by phenyl, naphthyl, 1,2-dihydronaphthyl, 1,2,3,4-tetrahydronaphthyl, anthracenyl, phenanthrenyl, fluorenyl, indanyl, indenyl, and the like, and may be optionally substituted with 1, 2, 3, 4, or 5 substituents independently selected from the group consisting of: (1) C₁₋₇ acyl (e.g., carboxyaldehyde); (2) C₁₋₂₀ alkyl (e.g., C₁₋₆ alkyl, C₁₋₆ alkoxy-C₁₋₆ alkyl, C₁₋₆ alkylsulfinyl-C₁₋₆ alkyl, amino-C₁₋₆ alkyl, azido-C₁₋₆ alkyl, (carboxyaldehyde)-C₁₋₆ alkyl, halo-C₁₋₆ alkyl (e.g., perfluoroalkyl), hydroxy-C₁₋₆ alkyl, nitro-C₁₋₆ alkyl, or C₁₋₆ thioalkoxy-C₁₋₆ alkyl); (3) C₁₋₂₀ alkoxy (e.g., C₁₋₆ alkoxy, such as perfluoroalkoxy); (4) C₁₋₆ alkylsulfinyl; (5) C₆₋₁₀ aryl; (6) amino; (7) C₁₋₆ alk-C₆₋₁₀ aryl; (8) azido; (9) C₃₋₈ cycloalkyl; (10) C₁₋₆ alk-C₃₋₈ cycloalkyl; (11) halo; (12) C₁₋₁₂ heterocyclyl (e.g., C₁₋₁₂ heteroaryl); (13) (C₁₋₁₂ heterocyclyl)oxy; (14) hydroxy; (15) nitro; (16) C₁₋₂₀ thioalkoxy (e.g., C₁₋₆ thioalkoxy); (17) —(CH₂)_{q}CO₂R^{A′}, where q is an integer from zero to four, and R^{A′} is selected from the group consisting of (a) C₁₋₆ alkyl, (b) C₆₋₁₀ aryl, (c) hydrogen, and (d) C₁₋₆ alk-C₆₋₁₀ aryl; (18) —(CH₂)_{q}CONR^{B′}R^{C′}, where q is an integer from zero to four and where R^{B′} and R^{C′} are independently selected from the group consisting of (a) hydrogen, (b) C₁₋₆ alkyl, (c) C₆₋₁₀ aryl, and (d) C₁₋₆ alk-C₆₋₁₀ aryl; (19) —(CH₂)_{q}SO₂R^{D′}, where q is an integer from zero to four and where R^{D′} is selected from the group consisting of (a) alkyl, (b) C₆₋₁₀ aryl, and (c) alk-C₆₋₁₀ aryl; (20) —(CH₂)_{q}SO₂NR^{E′}R^{F′}, where q is an integer from zero to four and where each of R^{E′} and R^{F′} is, independently, selected from the group consisting of (a) hydrogen, (b) C₁₋₆ alkyl, (c) C₆₋₁₀ aryl, and (d) C₁₋₆ alk-C₆₋₁₀ aryl; (21) thiol; (22) C₆₋₁₀ aryloxy; (23) C₃₋₈ cycloalkoxy; (24) C₆₋₁₀ aryl-C₁₋₆ alkoxy; (25) C₁₋₆ alk-C₁₋₁₂ heterocyclyl (e.g., C₁₋₆ alk-C₁₋₁₂ heteroaryl); (26) C₂₋₂₀ alkenyl; and (27) C₂₋₂₀ alkynyl. In some embodiments, each of these groups can be further substituted as described herein. For example, the alkylene group of a C₁-alkaryl or a C₁-alkheterocyclyl can be further substituted with an oxo group to afford the respective aryloyl and (heterocyclyl)oyl substituent group.

[0992] The term “arylalkoxy,” as used herein, represents an alkaryl group, as defined herein, attached to the parent molecular group through an oxygen atom. Exemplary unsubstituted alkoxyalkyl groups include from 7 to 30 carbons (e.g., from 7 to 16 or from 7 to 20 carbons, such as C₆₋₁₀ aryl-C₁₋₆ alkoxy, C₆₋₁₀ aryl-C₁₋₁₀ alkoxy, or C₆₋₁₀ aryl-C₁₋₂₀ alkoxy). In some embodiments, the arylalkoxy group can be substituted with 1, 2, 3, or 4 substituents as defined herein

[0993] The term “aryloxy” represents a chemical substituent of formula —OR′, where R′ is an aryl group of 6 to 18 carbons, unless otherwise specified. In some embodiments, the aryl group can be substituted with 1, 2, 3, or 4 substituents as defined herein.

[0994] The term “aryloyl,” as used herein, represents an aryl group, as defined herein, that is attached to the parent molecular group through a carbonyl group. Exemplary unsubstituted aryloyl groups are of 7 to 11 carbons. In some embodiments, the aryl group can be substituted with 1, 2, 3, or 4 substituents as defined herein.

[0995] The term “azido” represents an —N₃ group, which can also be represented as —N═N═N.

[0996] The term “bicyclic,” as used herein, refer to a structure having two rings, which may be aromatic or non-aromatic. Bicyclic structures include spirocyclyl groups, as defined herein, and two rings that share one or more bridges, where such bridges can include one atom or a chain including two, three, or more atoms. Exemplary bicyclic groups include a bicyclic carbocyclyl group, where the first and second rings are carbocyclyl groups, as defined herein; a bicyclic aryl groups, where the first and second rings are aryl groups, as defined herein; bicyclic heterocyclyl groups, where the first ring is a heterocyclyl group and the second ring is a carbocyclyl (e.g., aryl) or heterocyclyl (e.g., heteroaryl) group; and bicyclic heteroaryl groups, where the first ring is a heteroaryl group and the second ring is a carbocyclyl (e.g., aryl) or heterocyclyl (e.g., heteroaryl) group. In some embodiments, the bicyclic group can be substituted with 1, 2, 3, or 4 substituents as defined herein for cycloalkyl, heterocyclyl, and aryl groups.

[0997] The terms “carbocyclic” and “carbocyclyl,” as used herein, refer to an optionally substituted C₃₋₁₂ monocyclic, bicyclic, or tricyclic structure in which the rings, which may be aromatic or non-aromatic, are formed by carbon atoms. Carbocyclic structures include cycloalkyl, cycloalkenyl, and aryl groups.

[0998] The term “carbamoyl,” as used herein, represents —C(O)—N(R^{N1})₂, where the meaning of each R^{N1} is found in the definition of “amino” provided herein.

[0999] The term “carbamoylalkyl,” as used herein, represents an alkyl group, as defined herein, substituted by a carbamoyl group, as defined herein. The alkyl group can be further substituted with 1, 2, 3, or 4 substituent groups as described herein.

[1000] The term “carbamyl,” as used herein, refers to a carbamate group having the structure —NR^{N1}C(═O)OR or —OC(═O)N(R^{N1})₂, where the meaning of each R^{N1} is found in the definition of “amino” provided herein, and R is alkyl, cycloalkyl, alkcycloalkyl, aryl, alkaryl, heterocyclyl (e.g., heteroaryl), or alkheterocyclyl (e.g., alkheteroaryl), as defined herein.

[1001] The term “carbonyl,” as used herein, represents a C(O) group, which can also be represented as C═O.

[1002] The term “carboxyaldehyde” represents an acyl group having the structure —CHO.

[1003] The term “carboxy,” as used herein, means —CO₂H.

[1004] The term “carboxyalkoxy,” as used herein, represents an alkoxy group, as defined herein, substituted by a carboxy group, as defined herein. The alkoxy group can be further substituted with 1, 2, 3, or 4 substituent groups as described herein for the alkyl group.

[1005] The term “carboxyalkyl,” as used herein, represents an alkyl group, as defined herein, substituted by a carboxy group, as defined herein. The alkyl group can be further substituted with 1, 2, 3, or 4 substituent groups as described herein.

[1006] The term “cyano,” as used herein, represents an —CN group.

[1007] The term “cycloalkoxy” represents a chemical substituent of formula —OR, where R is a C₃₋₈ cycloalkyl group, as defined herein, unless otherwise specified. The cycloalkyl group can be further substituted with 1, 2, 3, or 4 substituent groups as described herein. Exemplary unsubstituted cycloalkoxy groups are from 3 to 8 carbons. In some embodiment, the cycloalkyl group can be further substituted with 1, 2, 3, or 4 substituent groups as described herein.

[1008] The term “cycloalkyl,” as used herein represents a monovalent saturated or unsaturated non-aromatic cyclic hydrocarbon group from three to eight carbons, unless otherwise specified, and is exemplified by cyclopropyl, cyclobutyl, cyclopentyl, cyclohexyl, cycloheptyl, bicyclo[2.2.1.]heptyl, and the like. When the cycloalkyl group includes one carbon-carbon double bond, the cycloalkyl group can be referred to as a “cycloalkenyl” group. Exemplary cycloalkenyl groups include cyclopentenyl, cyclohexenyl, and the like. The cycloalkyl groups of this invention can be optionally substituted with: (1) C₁₋₇ acyl (e.g., carboxyaldehyde); (2) C₁₋₂₀ alkyl (e.g., C₁₋₆ alkyl, C₁₋₆ alkoxy-C₁₋₆ alkyl, C₁₋₆ alkylsulfinyl-C₁₋₆ alkyl, amino-C₁₋₆ alkyl, azido-C₁₋₆ alkyl, (carboxyaldehyde)-C₁₋₆ alkyl, halo-C₁₋₆ alkyl (e.g., perfluoroalkyl), hydroxy-C₁₋₆ alkyl, nitro-C₁₋₆ alkyl, or C₁₋₆ thioalkoxy-C₁₋₆ alkyl); (3) C₁₋₂₀ alkoxy (e.g., C₁₋₆ alkoxy, such as perfluoroalkoxy); (4) C₁₋₆ alkylsulfinyl; (5) C₆₋₁₀ aryl; (6) amino; (7) C₁₋₆ alk-C₆₋₁₀ aryl; (8) azido; (9) C₃₋₈ cycloalkyl; (10) C₁₋₆ alk-C₃₋₈ cycloalkyl; (11) halo; (12) C₁₋₁₂ heterocyclyl (e.g., C₁₋₁₂ heteroaryl); (13) (C₁₋₁₂ heterocyclyl)oxy; (14) hydroxy; (15) nitro; (16) C₁₋₂₀ thioalkoxy (e.g., C₁₋₆ thioalkoxy); (17) —(CH₂)_{q}CO₂R^{A′}, where q is an integer from zero to four, and R^{A′} is selected from the group consisting of (a) C₁₋₆ alkyl, (b) C₆₋₁₀ aryl, (c) hydrogen, and (d) C₁₋₆ alk-C₆₋₁₀ aryl; (18) —(CH₂)_{q}CONR^{B′}R^{C′}, where q is an integer from zero to four and where R^{B′} and R^{C′} are independently selected from the group consisting of (a) hydrogen, (b) C₆₋₁₀ alkyl, (c) C₆₋₁₀ aryl, and (d) C₁₋₆ alk-C₆₋₁₀ aryl; (19) —(CH₂)_{q}SO₂R^{D′}, where q is an integer from zero to four and where R^{D′} is selected from the group consisting of (a) C₆₋₁₀ alkyl, (b) C₆₋₁₀ aryl, and (c) C₁₋₆ alk-C₆₋₁₀ aryl; (20) —(CH₂)_{q}SO₂NR^{E′}R^{F′}, where q is an integer from zero to four and where each of R^{E′} and R^{F′} is, independently, selected from the group consisting of (a) hydrogen, (b) C₆₋₁₀ alkyl, (c) C₆₋₁₀ aryl, and (d) C₁₋₆ alk-C₆₋₁₀ aryl; (21) thiol; (22) C₆₋₁₀ aryloxy; (23) C₃₋₈ cycloalkoxy; (24) C₆₋₁₀ aryl-C₁₋₆ alkoxy; (25) C₁₋₆ alk-C₁₋₁₂ heterocyclyl (e.g., C₁₋₆ alk-C₁₋₁₂ heteroaryl); (26) oxo; (27) C₂₋₂₀ alkenyl; and (28) C₂₋₂₀ alkynyl. In some embodiments, each of these groups can be further substituted as described herein. For example, the alkylene group of a C₁-alkaryl or a C₁-alkheterocyclyl can be further substituted with an oxo group to afford the respective aryloyl and (heterocyclyl)oyl substituent group.

[1009] The term “diastereomer,” as used herein means stereoisomers that are not mirror images of one another and are non-superimposable on one another.

[1010] The term “effective amount” of an agent, as used herein, is that amount sufficient to effect beneficial or desired results, for example, clinical results, and, as such, an “effective amount” depends upon the context in which it is being applied. For example, in the context of administering an agent that treats cancer, an effective amount of an agent is, for example, an amount sufficient to achieve treatment, as defined herein, of cancer, as compared to the response obtained without administration of the agent.

[1011] The term “enantiomer,” as used herein, means each individual optically active form of a compound of the invention, having an optical purity or enantiomeric excess (as determined by methods standard in the art) of at least 80% (i.e., at least 90% of one enantiomer and at most 10% of the other enantiomer), preferably at least 90% and more preferably at least 98%.

[1012] The term “halo,” as used herein, represents a halogen selected from bromine, chlorine, iodine, or fluorine.

[1013] The term “haloalkoxy,” as used herein, represents an alkoxy group, as defined herein, substituted by a halogen group (i.e., F, Cl, Br, or I). A haloalkoxy may be substituted with one, two, three, or, in the case of alkyl groups of two carbons or more, four halogens. Haloalkoxy groups include perfluoroalkoxys (e.g., —OCF₃), —OCHF₂, —OCH₂F, —OCCl₃, —OCH₂CH₂Br, —OCH₂CH(CH₂CH₂Br)CH₃, and —OCHICH₃. In some embodiments, the haloalkoxy group can be further substituted with 1, 2, 3, or 4 substituent groups as described herein for alkyl groups.

[1014] The term “haloalkyl,” as used herein, represents an alkyl group, as defined herein, substituted by a halogen group (i.e., F, Cl, Br, or I). A haloalkyl may be substituted with one, two, three, or, in the case of alkyl groups of two carbons or more, four halogens. Haloalkyl groups include perfluoroalkyls (e.g., —CF₃), —CHF₂, —CH₂F, —CCl₃, —CH₂CH₂Br, —CH₂CH(CH₂CH₂Br)CH₃, and —CHICH₃. In some embodiments, the haloalkyl group can be further substituted with 1, 2, 3, or 4 substituent groups as described herein for alkyl groups.

[1015] The term “heteroalkylene,” as used herein, refers to an alkylene group, as defined herein, in which one or two of the constituent carbon atoms have each been replaced by nitrogen, oxygen, or sulfur. In some embodiments, the heteroalkylene group can be further substituted with 1, 2, 3, or 4 substituent groups as described herein for alkylene groups.

[1016] The term “heteroaryl,” as used herein, represents that subset of heterocyclyls, as defined herein, which are aromatic: i.e., they contain 4n+2 pi electrons within the mono- or multicyclic ring system. Exemplary unsubstituted heteroaryl groups are of 1 to 12 (e.g., 1 to 11, 1 to 10, 1 to 9, 2 to 12, 2 to 11, 2 to 10, or 2 to 9) carbons. In some embodiment, the heteroaryl is substituted with 1, 2, 3, or 4 substituents groups as defined for a heterocyclyl group.

[1017] The term “heterocyclyl,” as used herein represents a 5-, 6- or 7-membered ring, unless otherwise specified, containing one, two, three, or four heteroatoms independently selected from the group consisting of nitrogen, oxygen, and sulfur. The 5-membered ring has zero to two double bonds, and the 6- and 7-membered rings have zero to three double bonds. Exemplary unsubstituted heterocyclyl groups are of 1 to 12 (e.g., 1 to 11, 1 to 10, 1 to 9, 2 to 12, 2 to 11, 2 to 10, or 2 to 9) carbons. The term “heterocyclyl” also represents a heterocyclic compound having a bridged multicyclic structure in which one or more carbons and/or heteroatoms bridges two non-adjacent members of a monocyclic ring, e.g., a quinuclidinyl group. The term “heterocyclyl” includes bicyclic, tricyclic, and tetracyclic groups in which any of the above heterocyclic rings is fused to one, two, or three carbocyclic rings, e.g., an aryl ring, a cyclohexane ring, a cyclohexene ring, a cyclopentane ring, a cyclopentene ring, or another monocyclic heterocyclic ring, such as indolyl, quinolyl, isoquinolyl, tetrahydroquinolyl, benzofuryl, benzothienyl and the like. Examples of fused heterocyclyls include tropanes and 1,2,3,5,8,8a-hexahydroindolizine. Heterocyclics include pyrrolyl, pyrrolinyl, pyrrolidinyl, pyrazolyl, pyrazolinyl, pyrazolidinyl, imidazolyl, imidazolinyl, imidazolidinyl, pyridyl, piperidinyl, homopiperidinyl, pyrazinyl, piperazinyl, pyrimidinyl, pyridazinyl, oxazolyl, oxazolidinyl, isoxazolyl, isoxazolidiniyl, morpholinyl, thiomorpholinyl, thiazolyl, thiazolidinyl, isothiazolyl, isothiazolidinyl, indolyl, indazolyl, quinolyl, isoquinolyl, quinoxalinyl, dihydroquinoxalinyl, quinazolinyl, cinnolinyl, phthalazinyl, benzimidazolyl, benzothiazolyl, benzoxazolyl, benzothiadiazolyl, furyl, thienyl, thiazolidinyl, isothiazolyl, triazolyl, tetrazolyl, oxadiazolyl (e.g., 1,2,3-oxadiazolyl), purinyl, thiadiazolyl (e.g., 1,2,3-thiadiazolyl), tetrahydrofuranyl, dihydrofuranyl, tetrahydrothienyl, dihydrothienyl, dihydroindolyl, dihydroquinolyl, tetrahydroquinolyl, tetrahydroisoquinolyl, dihydroisoquinolyl, pyranyl, dihydropyranyl, dithiazolyl, benzofuranyl, isobenzofuranyl, benzothienyl, and the like, including dihydro and tetrahydro forms thereof, where one or more double bonds are reduced and replaced with hydrogens. Still other exemplary heterocyclyls include: 2,3,4,5-tetrahydro-2-oxo-oxazolyl; 2,3-dihydro-2-oxo-1H-imidazolyl; 2,3,4,5-tetrahydro-5-oxo-1H-pyrazolyl (e.g., 2,3,4,5-tetrahydro-2-phenyl-5-oxo-1H-pyrazolyl); 2,3,4,5-tetrahydro-2,4-dioxo-1H-imidazolyl (e.g., 2,3,4,5-tetrahydro-2,4-dioxo-5-methyl-5-phenyl-1H-imidazolyl); 2,3-dihydro-2-thioxo-1,3,4-oxadiazolyl (e.g., 2,3-dihydro-2-thioxo-5-phenyl-1,3,4-oxadiazolyl); 4,5-dihydro-5-oxo-1H-triazolyl (e.g., 4,5-dihydro-3-methyl-4-amino 5-oxo-1H-triazolyl); 1,2,3,4-tetrahydro-2,4-dioxopyridinyl (e.g., 1,2,3,4-tetrahydro-2,4-dioxo-3,3-diethylpyridinyl); 2,6-dioxo-piperidinyl (e.g., 2,6-dioxo-3-ethyl-3-phenylpiperidinyl); 1,6-dihydro-6-oxopyridiminyl; 1,6-dihydro-4-oxopyrimidinyl (e.g., 2-(methylthio)-1,6-dihydro-4-oxo-5-methylpyrimidin-1-yl); 1,2,3,4-tetrahydro-2,4-dioxopyrimidinyl (e.g., 1,2,3,4-tetrahydro-2,4-dioxo-3-ethylpyrimidinyl); 1,6-dihydro-6-oxo-pyridazinyl (e.g., 1,6-dihydro-6-oxo-3-ethylpyridazinyl); 1,6-dihydro-6-oxo-1,2,4-triazinyl (e.g., 1,6-dihydro-5-isopropyl-6-oxo-1,2,4-triazinyl); 2,3-dihydro-2-oxo-1H-indolyl (e.g., 3,3-dimethyl-2,3-dihydro-2-oxo-1H-indolyl and 2,3-dihydro-2-oxo-3,3′-spiropropane-1H-indol-1-yl); 1,3-dihydro-1-oxo-2H-iso-indolyl; 1,3-dihydro-1,3-dioxo-2H-iso-indolyl; 1H-benzopyrazolyl (e.g., 1-(ethoxycarbonyl)-1H-benzopyrazolyl); 2,3-dihydro-2-oxo-1H-benzimidazolyl (e.g., 3-ethyl-2,3-dihydro-2-oxo-1H-benzimidazolyl); 2,3-dihydro-2-oxo-benzoxazolyl (e.g., 5-chloro-2,3-dihydro-2-oxo-benzoxazolyl); 2,3-dihydro-2-oxo-benzoxazolyl; 2-oxo-2H-benzopyranyl; 1,4-benzodioxanyl; 1,3-benzodioxanyl; 2,3-dihydro-3-oxo,4H-1,3-benzothiazinyl; 3,4-dihydro-4-oxo-3H-quinazolinyl (e.g., 2-methyl-3,4-dihydro-4-oxo-3H-quinazolinyl); 1,2,3,4-tetrahydro-2,4-dioxo-3H-quinazolyl (e.g., 1-ethyl-1,2,3,4-tetrahydro-2,4-dioxo-3H-quinazolyl); 1,2,3,6-tetrahydro-2,6-dioxo-7H-purinyl (e.g., 1,2,3,6-tetrahydro-1,3-dimethyl-2,6-dioxo-7H-purinyl); 1,2,3,6-tetrahydro-2,6-dioxo-1H-purinyl (e.g., 1,2,3,6-tetrahydro-3,7-dimethyl-2,6-dioxo-1H-purinyl); 2-oxobenz[c,d]indolyl; 1,1-dioxo-2H-naphth [1,8-c,d]isothiazolyl; and 1,8-naphthylenedicarboxamido. Additional heterocyclics include 3,3a,4,5,6,6a-hexahydro-pyrrolo [3,4-b]pyrrol-(2H)-yl, and 2,5-diazabicyclo[2.2.1]heptan-2-yl, homopiperazinyl (or diazepanyl), tetrahydropyranyl, dithiazolyl, benzofuranyl, benzothienyl, oxepanyl, thiepanyl, azocanyl, oxecanyl, and thiocanyl. Heterocyclic groups also include groups of the formula

[chemical structure]

where

[1018] E′ is selected from the group consisting of —N- and —CH—; F′ is selected from the group consisting of —N═CH—, —NH—CH₂—, —NH—C(O)—, —NH—, —CH═N—, —CH₂—NH—, —C(O)—NH—, —CH═CH—, —CH₂—, —CH₂CH₂—, —CH₂O—, —OCH₂—, —O—, and —S—; and G′ is selected from the group consisting of —CH— and —N—. Any of the heterocyclyl groups mentioned herein may be optionally substituted with one, two, three, four or five substituents independently selected from the group consisting of: (1) C₁₋₇ acyl (e.g., carboxyaldehyde); (2) C₁₋₂₀ alkyl (e.g., C₁₋₆ alkyl, C₁₋₆ alkoxy-C₁₋₆ alkyl, C₁₋₆ alkylsulfinyl-C₁₋₆ alkyl, amino-C₁₋₆ alkyl, azido-C₁₋₆ alkyl, (carboxyaldehyde)-C₁₋₆ alkyl, halo-C₁₋₆ alkyl (e.g., perfluoroalkyl), hydroxy-C₁₋₆ alkyl, nitro-C₁₋₆ alkyl, or C₁₋₆ thioalkoxy-C₁₋₆ alkyl); (3) C₁₋₂₀ alkoxy (e.g., C₁₋₆ alkoxy, such as perfluoroalkoxy); (4) C₁₋₆ alkylsulfinyl; (5) C₆₋₁₀ aryl; (6) amino; (7) C₁₋₆ alk-C₆₋₁₀ aryl; (8) azido; (9) C₃₋₈ cycloalkyl; (10) C₁₋₆ alk-C₃₋₈ cycloalkyl; (11) halo; (12) C₁₋₁₂ heterocyclyl (e.g., C₂₋₁₂ heteroaryl); (13) (C₁₋₁₂ heterocyclyl)oxy; (14) hydroxy; (15) nitro; (16) C₁₋₂₀ thioalkoxy (e.g., C₁₋₆ thioalkoxy); (17) —(CH₂)_{q}CO₂R^{A′}, where q is an integer from zero to four, and R^{A′} is selected from the group consisting of (a) C₁₋₆ alkyl, (b) C₆₋₁₀ aryl, (c) hydrogen, and (d) C₁₋₆ alk-C₆₋₁₀ aryl; (18) —(CH₂)_{q}CONR^{B′}R^{C′}, where q is an integer from zero to four and where R^{B′} and R^{C′} are independently selected from the group consisting of (a) hydrogen, (b) C₁₋₆ alkyl, (c) C₆₋₁₀ aryl, and (d) C₁₋₆ alk-C₆₋₁₀ aryl; (19) —(CH₂)_{q}SO₂R^{D′}, where q is an integer from zero to four and where R^{D′} is selected from the group consisting of (a) C₁₋₆ alkyl, (b) C₆₋₁₀ aryl, and (c) C₁₋₆ alk-C₆₋₁₀ aryl; (20) —(CH₂)_{q}SO₂NR^{E′}R^{F′}, where q is an integer from zero to four and where each of R^{E′} and R^{F′} is, independently, selected from the group consisting of (a) hydrogen, (b) C₁₋₆ alkyl, (c) C₆₋₁₀ aryl, and (d) C₁₋₆ alk-C₆₋₁₀ aryl; (21) thiol; (22) C₆₋₁₀ aryloxy; (23) C₃₋₈ cycloalkoxy; (24) arylalkoxy; (25) C₁₋₆ alk-C₁₋₁₂ heterocyclyl (e.g., C₁₋₆ alk-C₁₋₁₂ heteroaryl); (26) oxo; (27) (C₁₋₁₂ heterocyclyl) imino; (28) C₂₋₂₀ alkenyl; and (29) C₂₋₂₀ alkynyl. In some embodiments, each of these groups can be further substituted as described herein. For example, the alkylene group of a C₁-alkaryl or a C₁-alkheterocyclyl can be further substituted with an oxo group to afford the respective aryloyl and (heterocyclyl)oyl substituent group.

[1019] The term “(heterocyclyl) imino,” as used herein, represents a heterocyclyl group, as defined herein, attached to the parent molecular group through an imino group. In some embodiments, the heterocyclyl group can be substituted with 1, 2, 3, or 4 substituent groups as defined herein.

[1020] The term “(heterocyclyl)oxy,” as used herein, represents a heterocyclyl group, as defined herein, attached to the parent molecular group through an oxygen atom. In some embodiments, the heterocyclyl group can be substituted with 1, 2, 3, or 4 substituent groups as defined herein.

[1021] The term “(heterocyclyl)oyl,” as used herein, represents a heterocyclyl group, as defined herein, attached to the parent molecular group through a carbonyl group. In some embodiments, the heterocyclyl group can be substituted with 1, 2, 3, or 4 substituent groups as defined herein.

[1022] The term “hydrocarbon,” as used herein, represents a group consisting only of carbon and hydrogen atoms.

[1023] The term “hydroxy,” as used herein, represents an —OH group.

[1024] The term “hydroxyalkenyl,” as used herein, represents an alkenyl group, as defined herein, substituted by one to three hydroxy groups, with the proviso that no more than one hydroxy group may be attached to a single carbon atom of the alkyl group, and is exemplified by dihydroxypropenyl, hydroxyisopentenyl, and the like.

[1025] The term “hydroxyalkyl,” as used herein, represents an alkyl group, as defined herein, substituted by one to three hydroxy groups, with the proviso that no more than one hydroxy group may be attached to a single carbon atom of the alkyl group, and is exemplified by hydroxymethyl, dihydroxypropyl, and the like.

[1026] The term “isomer,” as used herein, means any tautomer, stereoisomer, enantiomer, or diastereomer of any compound of the invention. It is recognized that the compounds of the invention can have one or more chiral centers and/or double bonds and, therefore, exist as stereoisomers, such as double-bond isomers (i.e., geometric E/Z isomers) or diastereomers (e.g., enantiomers (i.e., (+) or (−)) or cis/trans isomers). According to the invention, the chemical structures depicted herein, and therefore the compounds of the invention, encompass all of the corresponding stereoisomers, that is, both the stereomerically pure form (e.g., geometrically pure, enantiomerically pure, or diastereomerically pure) and enantiomeric and stereoisomeric mixtures, e.g., racemates. Enantiomeric and stereoisomeric mixtures of compounds of the invention can typically be resolved into their component enantiomers or stereoisomers by well-known methods, such as chiral-phase gas chromatography, chiral-phase high performance liquid chromatography, crystallizing the compound as a chiral salt complex, or crystallizing the compound in a chiral solvent. Enantiomers and stereoisomers can also be obtained from stereomerically or enantiomerically pure intermediates, reagents, and catalysts by well-known asymmetric synthetic methods.

[1027] The term “N-protected amino,” as used herein, refers to an amino group, as defined herein, to which is attached one or two N-protecting groups, as defined herein.

[1028] The term “N-protecting group,” as used herein, represents those groups intended to protect an amino group against undesirable reactions during synthetic procedures. Commonly used N-protecting groups are disclosed in Greene, “Protective Groups in Organic Synthesis,” 3^{rd} Edition (John Wiley & Sons, New York, 1999), which is incorporated herein by reference. N-protecting groups include acyl, aryloyl, or carbamyl groups such as formyl, acetyl, propionyl, pivaloyl, t-butylacetyl, 2-chloroacetyl, 2-bromoacetyl, trifluoroacetyl, trichloroacetyl, phthalyl, o-nitrophenoxyacetyl, α-chlorobutyryl, benzoyl, 4-chlorobenzoyl, 4-bromobenzoyl, 4-nitrobenzoyl, and chiral auxiliaries such as protected or unprotected D, L or D, L-amino acids such as alanine, leucine, phenylalanine, and the like; sulfonyl-containing groups such as benzenesulfonyl, p-toluenesulfonyl, and the like; carbamate forming groups such as benzyloxycarbonyl, p-chlorobenzyloxycarbonyl, p-methoxybenzyloxycarbonyl, p-nitrobenzyloxycarbonyl, 2-nitrobenzyloxycarbonyl, p-bromobenzyloxycarbonyl, 3,4-dimethoxybenzyloxycarbonyl, 3,5-dimethoxybenzyloxycarbonyl, 2,4-dimethoxybenzyloxycarbonyl, 4-methoxybenzyloxycarbonyl, 2-nitro-4,5-dimethoxybenzyloxycarbonyl, 3,4,5-trimethoxybenzyloxycarbonyl, 1-(p-biphenylyl)-1-methylethoxycarbonyl, α,α-dimethyl-3,5-dimethoxybenzyloxycarbonyl, benzhydryloxy carbonyl, t-butyloxycarbonyl, diisopropylmethoxycarbonyl, isopropyloxycarbonyl, ethoxycarbonyl, methoxycarbonyl, allyloxycarbonyl, 2,2,2,-trichloroethoxycarbonyl, phenoxycarbonyl, 4-nitrophenoxy carbonyl, fluorenyl-9-methoxycarbonyl, cyclopentyloxycarbonyl, adamantyloxycarbonyl, cyclohexyloxycarbonyl, phenylthiocarbonyl, and the like, alkaryl groups such as benzyl, triphenylmethyl, benzyloxymethyl, and the like and silyl groups, such as trimethylsilyl, and the like. Preferred N-protecting groups are formyl, acetyl, benzoyl, pivaloyl, t-butylacetyl, alanyl, phenylsulfonyl, benzyl, t-butyloxycarbonyl (Boc), and benzyloxycarbonyl (Cbz).

[1029] The term “nitro,” as used herein, represents an —NO₂ group.

[1030] The term “oxo” as used herein, represents ═O.

[1031] The term “perfluoroalkyl,” as used herein, represents an alkyl group, as defined herein, where each hydrogen radical bound to the alkyl group has been replaced by a fluoride radical. Perfluoroalkyl groups are exemplified by trifluoromethyl, pentafluoroethyl, and the like.

[1032] The term “perfluoroalkoxy,” as used herein, represents an alkoxy group, as defined herein, where each hydrogen radical bound to the alkoxy group has been replaced by a fluoride radical. Perfluoroalkoxy groups are exemplified by trifluoromethoxy, pentafluoroethoxy, and the like.

[1033] The term “spirocyclyl,” as used herein, represents a C₂₋₇ alkylene diradical, both ends of which are bonded to the same carbon atom of the parent group to form a spirocyclic group, and also a C₁₋₆ heteroalkylene diradical, both ends of which are bonded to the same atom. The heteroalkylene radical forming the spirocyclyl group can containing one, two, three, or four heteroatoms independently selected from the group consisting of nitrogen, oxygen, and sulfur. In some embodiments, the spirocyclyl group includes one to seven carbons, excluding the carbon atom to which the diradical is attached. The spirocyclyl groups of the invention may be optionally substituted with 1, 2, 3, or 4 substituents provided herein as optional substituents for cycloalkyl and/or heterocyclyl groups.

[1034] The term “stereoisomer,” as used herein, refers to all possible different isomeric as well as conformational forms which a compound may possess (e.g., a compound of any formula described herein), in particular all possible stereochemically and conformationally isomeric forms, all diastereomers, enantiomers and/or conformers of the basic molecular structure. Some compounds of the present invention may exist in different tautomeric forms, all of the latter being included within the scope of the present invention.

[1035] The term “sulfoalkyl,” as used herein, represents an alkyl group, as defined herein, substituted by a sulfo group of —SO₃H. In some embodiments, the alkyl group can be further substituted with 1, 2, 3, or 4 substituent groups as described herein.

[1036] The term “sulfonyl,” as used herein, represents an —S(O)₂— group.

[1037] The term “thioalkaryl,” as used herein, represents a chemical substituent of formula —SR, where R is an alkaryl group. In some embodiments, the alkaryl group can be further substituted with 1, 2, 3, or 4 substituent groups as described herein.

[1038] The term “thioalkheterocyclyl,” as used herein, represents a chemical substituent of formula —SR, where R is an alkheterocyclyl group. In some embodiments, the alkheterocyclyl group can be further substituted with 1, 2, 3, or 4 substituent groups as described herein.

[1039] The term “thioalkoxy,” as used herein, represents a chemical substituent of formula —SR, where R is an alkyl group, as defined herein. In some embodiments, the alkyl group can be further substituted with 1, 2, 3, or 4 substituent groups as described herein.

[1040] The term “thiol” represents an —SH group.

[1041] Compound: As used herein, the term “compound,” is meant to include all stereoisomers, geometric isomers, tautomers, and isotopes of the structures depicted.

[1042] The compounds described herein can be asymmetric (e.g., having one or more stereocenters). All stereoisomers, such as enantiomers and diastereomers, are intended unless otherwise indicated. Compounds of the present disclosure that contain asymmetrically substituted carbon atoms can be isolated in optically active or racemic forms. Methods on how to prepare optically active forms from optically active starting materials are known in the art, such as by resolution of racemic mixtures or by stereoselective synthesis. Many geometric isomers of olefins, C═N double bonds, and the like can also be present in the compounds described herein, and all such stable isomers are contemplated in the present disclosure. Cis and trans geometric isomers of the compounds of the present disclosure are described and may be isolated as a mixture of isomers or as separated isomeric forms.

[1043] Compounds of the present disclosure also include tautomeric forms. Tautomeric forms result from the swapping of a single bond with an adjacent double bond and the concomitant migration of a proton. Tautomeric forms include prototropic tautomers which are isomeric protonation states having the same empirical formula and total charge. Examples prototropic tautomers include ketone-enol pairs, amide-imidic acid pairs, lactam-lactim pairs, amide-imidic acid pairs, enamine-imine pairs, and annular forms where a proton can occupy two or more positions of a heterocyclic system, such as, 1H- and 3H-imidazole, 1H-, 2H- and 4H-1,2,4-triazole, 1H- and 2H-isoindole, and 1H- and 2H-pyrazole. Tautomeric forms can be in equilibrium or sterically locked into one form by appropriate substitution.

[1044] Compounds of the present disclosure also include all of the isotopes of the atoms occurring in the intermediate or final compounds. “Isotopes” refers to atoms having the same atomic number but different mass numbers resulting from a different number of neutrons in the nuclei. For example, isotopes of hydrogen include tritium and deuterium.

[1045] The compounds and salts of the present disclosure can be prepared in combination with solvent or water molecules to form solvates and hydrates by routine methods.

[1046] Conserved: As used herein, the term “conserved” refers to nucleotides or amino acid residues of a polynucleotide sequence or polypeptide sequence, respectively, that are those that occur unaltered in the same position of two or more sequences being compared. Nucleotides or amino acids that are relatively conserved are those that are conserved amongst more related sequences than nucleotides or amino acids appearing elsewhere in the sequences.

[1047] In some embodiments, two or more sequences are said to be “completely conserved” if they are 100% identical to one another. In some embodiments, two or more sequences are said to be “highly conserved” if they are at least 70% identical, at least 80% identical, at least 90% identical, or at least 95% identical to one another. In some embodiments, two or more sequences are said to be “highly conserved” if they are about 70% identical, about 80% identical, about 90% identical, about 95%, about 98%, or about 99% identical to one another. In some embodiments, two or more sequences are said to be “conserved” if they are at least 30% identical, at least 40% identical, at least 50% identical, at least 60% identical, at least 70% identical, at least 80% identical, at least 90% identical, or at least 95% identical to one another. In some embodiments, two or more sequences are said to be “conserved” if they are about 30% identical, about 40% identical, about 50% identical, about 60% identical, about 70% identical, about 80% identical, about 90% identical, about 95% identical, about 98% identical, or about 99% identical to one another. Conservation of sequence may apply to the entire length of an oligonucleotide or polypeptide or may apply to a portion, region or feature thereof.

[1048] Controlled Release: As used herein, the term “controlled release” refers to a pharmaceutical composition or compound release profile that conforms to a particular pattern of release to effect a therapeutic outcome.

[1049] Cyclic or Cyclized: As used herein, the term “cyclic” refers to the presence of a continuous loop. Cyclic molecules need not be circular, only joined to form an unbroken chain of subunits. Cyclic molecules such as the engineered RNA or mRNA of the present invention may be single units or multimers or comprise one or more components of a complex or higher order structure.

[1050] Cytostatic: As used herein, “cytostatic” refers to inhibiting, reducing, suppressing the growth, division, or multiplication of a cell (e.g., a mammalian cell (e.g., a human cell)), bacterium, virus, fungus, protozoan, parasite, prion, or a combination thereof.

[1051] Cytotoxic: As used herein, “cytotoxic” refers to killing or causing injurious, toxic, or deadly effect on a cell (e.g., a mammalian cell (e.g., a human cell)), bacterium, virus, fungus, protozoan, parasite, prion, or a combination thereof.

[1052] Delivery: As used herein, “delivery” refers to the act or manner of delivering a compound, substance, entity, moiety, cargo or payload.

[1053] Delivery Agent: As used herein, “delivery agent” refers to any substance which facilitates, at least in part, the in vivo delivery of a polynucleotide, primary construct or mmRNA to targeted cells.

[1054] Destabilized: As used herein, the term “destable,” “destabilize,” or “destabilizing region” means a region or molecule that is less stable than a starting, wild-type or native form of the same region or molecule.

[1055] Detectable label: As used herein, “detectable label” refers to one or more markers, signals, or moieties which are attached, incorporated or associated with another entity that is readily detected by methods known in the art including radiography, fluorescence, chemiluminescence, enzymatic activity, absorbance and the like. Detectable labels include radioisotopes, fluorophores, chromophores, enzymes, dyes, metal ions, ligands such as biotin, avidin, streptavidin and haptens, quantum dots, and the like. Detectable labels may be located at any position in the peptides or proteins disclosed herein. They may be within the amino acids, the peptides, or proteins, or located at the N- or C-termini.

[1056] Digest: As used herein, the term “digest” means to break apart into smaller pieces or components. When referring to polypeptides or proteins, digestion results in the production of peptides.

[1057] Distal: As used herein, the term “distal” means situated away from the center or away from a point or region of interest.

[1058] Dosing regimen: As used herein, a “dosing regimen” is a schedule of administration or physician determined regimen of treatment, prophylaxis, or palliative care.

[1059] Dose splitting factor (DSF)-ratio of PUD of dose split treatment divided by PUD of total daily dose or single unit dose. The value is derived from comparison of dosing regimens groups.

[1060] Encapsulate: As used herein, the term “encapsulate” means to enclose, surround or encase.

[1061] Encoded protein cleavage signal: As used herein, “encoded protein cleavage signal” refers to the nucleotide sequence which encodes a protein cleavage signal.

[1062] Engineered: As used herein, embodiments of the invention are “engineered” when they are designed to have a feature or property, whether structural or chemical, that varies from a starting point, wild type or native molecule.

[1063] Exosome: As used herein, “exosome” is a vesicle secreted by mammalian cells or a complex involved in RNA degradation.

[1064] Expression: As used herein, “expression” of a nucleic acid sequence refers to one or more of the following events: (1) production of an RNA template from a DNA sequence (e.g., by transcription); (2) processing of an RNA transcript (e.g., by splicing, editing, 5′ cap formation, and/or 3′ end processing); (3) translation of an RNA into a polypeptide or protein; and (4) post-translational modification of a polypeptide or protein.

[1065] Feature: As used herein, a “feature” refers to a characteristic, a property, or a distinctive element.

[1066] Formulation: As used herein, a “formulation” includes at least a polynucleotide, primary construct or mmRNA and a delivery agent.

[1067] Fragment: A “fragment,” as used herein, refers to a portion. For example, fragments of proteins may comprise polypeptides obtained by digesting full-length protein isolated from cultured cells.

[1068] Functional: As used herein, a “functional” biological molecule is a biological molecule in a form in which it exhibits a property and/or activity by which it is characterized.

[1069] Homology: As used herein, the term “homology” refers to the overall relatedness between polymeric molecules, e.g. between nucleic acid molecules (e.g. DNA molecules and/or RNA molecules) and/or between polypeptide molecules. In some embodiments, polymeric molecules are considered to be “homologous” to one another if their sequences are at least 25%, 30%, 35%, 40%, 45%, 50%, 55%, 60%, 65%, 70%, 75%, 80%, 85%, 90%, 95%, or 99% identical or similar. The term “homologous” necessarily refers to a comparison between at least two sequences (polynucleotide or polypeptide sequences). In accordance with the invention, two polynucleotide sequences are considered to be homologous if the polypeptides they encode are at least about 50%, 60%, 70%, 80%, 90%, 95%, or even 99% for at least one stretch of at least about 20 amino acids. In some embodiments, homologous polynucleotide sequences are characterized by the ability to encode a stretch of at least 4-5 uniquely specified amino acids. For polynucleotide sequences less than 60 nucleotides in length, homology is determined by the ability to encode a stretch of at least 4-5 uniquely specified amino acids. In accordance with the invention, two protein sequences are considered to be homologous if the proteins are at least about 50%, 60%, 70%, 80%, or 90% identical for at least one stretch of at least about 20 amino acids.

[1070] Identity: As used herein, the term “identity” refers to the overall relatedness between polymeric molecules, e.g., between oligonucleotide molecules (e.g. DNA molecules and/or RNA molecules) and/or between polypeptide molecules. Calculation of the percent identity of two polynucleotide sequences, for example, can be performed by aligning the two sequences for optimal comparison purposes (e.g., gaps can be introduced in one or both of a first and a second nucleic acid sequences for optimal alignment and non-identical sequences can be disregarded for comparison purposes). In certain embodiments, the length of a sequence aligned for comparison purposes is at least 30%, at least 40%, at least 50%, at least 60%, at least 70%, at least 80%, at least 90%, at least 95%, or 100% of the length of the reference sequence. The nucleotides at corresponding nucleotide positions are then compared. When a position in the first sequence is occupied by the same nucleotide as the corresponding position in the second sequence, then the molecules are identical at that position. The percent identity between the two sequences is a function of the number of identical positions shared by the sequences, taking into account the number of gaps, and the length of each gap, which needs to be introduced for optimal alignment of the two sequences. The comparison of sequences and determination of percent identity between two sequences can be accomplished using a mathematical algorithm. For example, the percent identity between two nucleotide sequences can be determined using methods such as those described in Computational Molecular Biology, Lesk, A. M., ed., Oxford University Press, New York, 1988; Biocomputing: Informatics and Genome Projects, Smith, D. W., ed., Academic Press, New York, 1993; Sequence Analysis in Molecular Biology, von Heinje, G., Academic Press, 1987; Computer Analysis of Sequence Data, Part I, Griffin, A. M., and Griffin, H. G., eds., Humana Press, New Jersey, 1994; and Sequence Analysis Primer, Gribskov, M. and Devereux, J., eds., M Stockton Press, New York, 1991; each of which is incorporated herein by reference. For example, the percent identity between two nucleotide sequences can be determined using the algorithm of Meyers and Miller (CABIOS, 1989, 4:11-17), which has been incorporated into the ALIGN program (version 2.0) using a PAM120 weight residue table, a gap length penalty of 12 and a gap penalty of 4. The percent identity between two nucleotide sequences can, alternatively, be determined using the GAP program in the GCG software package using an NWSgapdna.CMP matrix. Methods commonly employed to determine percent identity between sequences include, but are not limited to those disclosed in Carillo, H., and Lipman, D., SIAM J Applied Math., 48:1073 (1988); incorporated herein by reference. Techniques for determining identity are codified in publicly available computer programs. Exemplary computer software to determine homology between two sequences include, but are not limited to, GCG program package, Devereux, J., et al., Nucleic Acids Research, 12(1), 387 (1984)), BLASTP, BLASTN, and FASTA Altschul, S. F. et al., J. Molec. Biol., 215, 403 (1990)).

[1071] Inhibit expression of a gene: As used herein, the phrase “inhibit expression of a gene” means to cause a reduction in the amount of an expression product of the gene. The expression product can be an RNA transcribed from the gene (e.g., an mRNA) or a polypeptide translated from an mRNA transcribed from the gene. Typically a reduction in the level of an mRNA results in a reduction in the level of a polypeptide translated therefrom. The level of expression may be determined using standard techniques for measuring mRNA or protein.

[1072] In vitro: As used herein, the term “in vitro” refers to events that occur in an artificial environment, e.g., in a test tube or reaction vessel, in cell culture, in a Petri dish, etc., rather than within an organism (e.g., animal, plant, or microbe).

[1073] In vivo: As used herein, the term “in vivo” refers to events that occur within an organism (e.g., animal, plant, or microbe or cell or tissue thereof).

[1074] Isolated: As used herein, the term “isolated” refers to a substance or entity that has been separated from at least some of the components with which it was associated (whether in nature or in an experimental setting). Isolated substances may have varying levels of purity in reference to the substances from which they have been associated. Isolated substances and/or entities may be separated from at least about 10%, about 20%, about 30%, about 40%, about 50%, about 60%, about 70%, about 80%, about 90%, or more of the other components with which they were initially associated. In some embodiments, isolated agents are more than about 80%, about 85%, about 90%, about 91%, about 92%, about 93%, about 94%, about 95%, about 96%, about 97%, about 98%, about 99%, or more than about 99% pure. As used herein, a substance is “pure” if it is substantially free of other components. Substantially isolated: By “substantially isolated” is meant that the compound is substantially separated from the environment in which it was formed or detected. Partial separation can include, for example, a composition enriched in the compound of the present disclosure. Substantial separation can include compositions containing at least about 50%, at least about 60%, at least about 70%, at least about 80%, at least about 90%, at least about 95%, at least about 97%, or at least about 99% by weight of the compound of the present disclosure, or salt thereof. Methods for isolating compounds and their salts are routine in the art.

[1075] Linker: As used herein, a linker refers to a group of atoms, e.g., 10-1,000 atoms, and can be comprised of the atoms or groups such as, but not limited to, carbon, amino, alkylamino, oxygen, sulfur, sulfoxide, sulfonyl, carbonyl, and imine. The linker can be attached to a modified nucleoside or nucleotide on the nucleobase or sugar moiety at a first end, and to a payload, e.g., a detectable or therapeutic agent, at a second end. The linker may be of sufficient length as to not interfere with incorporation into a nucleic acid sequence. The linker can be used for any useful purpose, such as to form mmRNA multimers (e.g., through linkage of two or more polynucleotides, primary constructs, or mmRNA molecules) or mmRNA conjugates, as well as to administer a payload, as described herein. Examples of chemical groups that can be incorporated into the linker include, but are not limited to, alkyl, alkenyl, alkynyl, amido, amino, ether, thioether, ester, alkylene, heteroalkylene, aryl, or heterocyclyl, each of which can be optionally substituted, as described herein. Examples of linkers include, but are not limited to, unsaturated alkanes, polyethylene glycols (e.g., ethylene or propylene glycol monomeric units, e.g., diethylene glycol, dipropylene glycol, triethylene glycol, tripropylene glycol, tetraethylene glycol, or tetraethylene glycol), and dextran polymers and derivatives thereof., Other examples include, but are not limited to, cleavable moieties within the linker, such as, for example, a disulfide bond (—S—S—) or an azo bond (—N═N—), which can be cleaved using a reducing agent or photolysis. Non-limiting examples of a selectively cleavable bond include an amido bond can be cleaved for example by the use of tris(2-carboxyethyl) phosphine (TCEP), or other reducing agents, and/or photolysis, as well as an ester bond can be cleaved for example by acidic or basic hydrolysis.

[1076] MicroRNA (miRNA) binding site: As used herein, a microRNA (miRNA) binding site represents a nucleotide location or region of a nucleic acid transcript to which at least the “seed” region of a miRNA binds.

[1077] Modified: As used herein “modified” refers to a changed state or structure of a molecule of the invention. Molecules may be modified in many ways including chemically, structurally, and functionally. In one embodiment, the mRNA molecules of the present invention are modified by the introduction of non-natural nucleosides and/or nucleotides, e.g., as it relates to the natural ribonucleotides A, U, G, and C. Noncanonical nucleotides such as the cap structures are not considered “modified” although they differ from the chemical structure of the A, C, G, U ribonucleotides.

[1078] Mucus: As used herein, “mucus” refers to the natural substance that is viscous and comprises mucin glycoproteins.

[1079] Naturally occurring: As used herein, “naturally occurring” means existing in nature without artificial aid.

[1080] Non-human vertebrate: As used herein, a “non human vertebrate” includes all vertebrates except Homo sapiens, including wild and domesticated species. Examples of non-human vertebrates include, but are not limited to, mammals, such as alpaca, banteng, bison, camel, cat, cattle, deer, dog, donkey, gayal, goat, guinea pig, horse, llama, mule, pig, rabbit, reindeer, sheep water buffalo, and yak.

[1081] Off-target: As used herein, “off target” refers to any unintended effect on any one or more target, gene, or cellular transcript.

[1082] Open reading frame: As used herein, “open reading frame” or “ORF” refers to a sequence which does not contain a stop codon in a given reading frame.

[1083] Operably linked: As used herein, the phrase “operably linked” refers to a functional connection between two or more molecules, constructs, transcripts, entities, moieties or the like.

[1084] Optionally substituted: Herein a phrase of the form “optionally substituted X” (e.g., optionally substituted alkyl) is intended to be equivalent to “X, wherein X is optionally substituted” (e.g., “alkyl, wherein said alkyl is optionally substituted”). It is not intended to mean that the feature “X” (e.g. alkyl) per se is optional.

[1085] Peptide: As used herein, “peptide” is less than or equal to 50 amino acids long, e.g., about 5, 10, 15, 20, 25, 30, 35, 40, 45, or 50 amino acids long.

[1086] Paratope: As used herein, a “paratope” refers to the antigen-binding site of an antibody.

[1087] Patient: As used herein, “patient” refers to a subject who may seek or be in need of treatment, requires treatment, is receiving treatment, will receive treatment, or a subject who is under care by a trained professional for a particular disease or condition.

[1088] Pharmaceutically acceptable: The phrase “pharmaceutically acceptable” is employed herein to refer to those compounds, materials, compositions, and/or dosage forms which are, within the scope of sound medical judgment, suitable for use in contact with the tissues of human beings and animals without excessive toxicity, irritation, allergic response, or other problem or complication, commensurate with a reasonable benefit/risk ratio.

[1089] Pharmaceutically acceptable excipients: The phrase “pharmaceutically acceptable excipient,” as used herein, refers any ingredient other than the compounds described herein (for example, a vehicle capable of suspending or dissolving the active compound) and having the properties of being substantially nontoxic and non-inflammatory in a patient. Excipients may include, for example: antiadherents, antioxidants, binders, coatings, compression aids, disintegrants, dyes (colors), emollients, emulsifiers, fillers (diluents), film formers or coatings, flavors, fragrances, glidants (flow enhancers), lubricants, preservatives, printing inks, sorbents, suspensing or dispersing agents, sweeteners, and waters of hydration. Exemplary excipients include, but are not limited to: butylated hydroxytoluene (BHT), calcium carbonate, calcium phosphate (dibasic), calcium stearate, croscarmellose, crosslinked polyvinyl pyrrolidone, citric acid, crospovidone, cysteine, ethylcellulose, gelatin, hydroxypropyl cellulose, hydroxypropyl methylcellulose, lactose, magnesium stearate, maltitol, mannitol, methionine, methylcellulose, methyl paraben, microcrystalline cellulose, polyethylene glycol, polyvinyl pyrrolidone, povidone, pregelatinized starch, propyl paraben, retinyl palmitate, shellac, silicon dioxide, sodium carboxymethyl cellulose, sodium citrate, sodium starch glycolate, sorbitol, starch (corn), stearic acid, sucrose, talc, titanium dioxide, vitamin A, vitamin E, vitamin C, and xylitol.

[1090] Pharmaceutically acceptable salts: The present disclosure also includes pharmaceutically acceptable salts of the compounds described herein. As used herein, “pharmaceutically acceptable salts” refers to derivatives of the disclosed compounds wherein the parent compound is modified by converting an existing acid or base moiety to its salt form (e.g., by reacting the free base group with a suitable organic acid). Examples of pharmaceutically acceptable salts include, but are not limited to, mineral or organic acid salts of basic residues such as amines; alkali or organic salts of acidic residues such as carboxylic acids; and the like. Representative acid addition salts include acetate, adipate, alginate, ascorbate, aspartate, benzenesulfonate, benzoate, bisulfate, borate, butyrate, camphorate, camphorsulfonate, citrate, cyclopentanepropionate, digluconate, dodecylsulfate, ethanesulfonate, fumarate, glucoheptonate, glycerophosphate, hemisulfate, heptonate, hexanoate, hydrobromide, hydrochloride, hydroiodide, 2-hydroxy-ethanesulfonate, lactobionate, lactate, laurate, lauryl sulfate, malate, maleate, malonate, methanesulfonate, 2-naphthalenesulfonate, nicotinate, nitrate, oleate, oxalate, palmitate, pamoate, pectinate, persulfate, 3-phenylpropionate, phosphate, picrate, pivalate, propionate, stearate, succinate, sulfate, tartrate, thiocyanate, toluenesulfonate, undecanoate, valerate salts, and the like. Representative alkali or alkaline earth metal salts include sodium, lithium, potassium, calcium, magnesium, and the like, as well as nontoxic ammonium, quaternary ammonium, and amine cations, including, but not limited to ammonium, tetramethylammonium, tetraethylammonium, methylamine, dimethylamine, trimethylamine, triethylamine, ethylamine, and the like. The pharmaceutically acceptable salts of the present disclosure include the conventional non-toxic salts of the parent compound formed, for example, from non-toxic inorganic or organic acids. The pharmaceutically acceptable salts of the present disclosure can be synthesized from the parent compound which contains a basic or acidic moiety by conventional chemical methods. Generally, such salts can be prepared by reacting the free acid or base forms of these compounds with a stoichiometric amount of the appropriate base or acid in water or in an organic solvent, or in a mixture of the two; generally, nonaqueous media like ether, ethyl acetate, ethanol, isopropanol, or acetonitrile are preferred. Lists of suitable salts are found in Remington's Pharmaceutical Sciences, 17^{th} ed., Mack Publishing Company, Easton, Pa., 1985, p. 1418, Pharmaceutical Salts: Properties, Selection, and Use, P. H. Stahl and C. G. Wermuth (eds.), Wiley-VCH, 2008, and Berge et al., Journal of Pharmaceutical Science, 66, 1-19 (1977), each of which is incorporated herein by reference in its entirety.

[1091] Pharmaceutically acceptable solvate: The term “pharmaceutically acceptable solvate,” as used herein, means a compound of the invention wherein molecules of a suitable solvent are incorporated in the crystal lattice. A suitable solvent is physiologically tolerable at the dosage administered. For example, solvates may be prepared by crystallization, recrystallization, or precipitation from a solution that includes organic solvents, water, or a mixture thereof. Examples of suitable solvents are ethanol, water (for example, mono-, di-, and tri-hydrates), N-methylpyrrolidinone (NMP), dimethyl sulfoxide (DMSO), N,N′-dimethylformamide (DMF), N,N′-dimethylacetamide (DMAC), 1,3-dimethyl-2-imidazolidinone (DMEU), 1,3-dimethyl-3,4,5,6-tetrahydro-2-(1H)-pyrimidinone (DMPU), acetonitrile (ACN), propylene glycol, ethyl acetate, benzyl alcohol, 2-pyrrolidone, benzyl benzoate, and the like. When water is the solvent, the solvate is referred to as a “hydrate.”

[1092] Pharmacokinetic: As used herein, “pharmacokinetic” refers to any one or more properties of a molecule or compound as it relates to the determination of the fate of substances administered to a living organism. Pharmacokinetics is divided into several areas including the extent and rate of absorption, distribution, metabolism and excretion. This is commonly referred to as ADME where: (A) Absorption is the process of a substance entering the blood circulation; (D) Distribution is the dispersion or dissemination of substances throughout the fluids and tissues of the body; (M) Metabolism (or Biotransformation) is the irreversible transformation of parent compounds into daughter metabolites; and (E) Excretion (or Elimination) refers to the elimination of the substances from the body. In rare cases, some drugs irreversibly accumulate in body tissue.

[1093] Physicochemical: As used herein, “physicochemical” means of or relating to a physical and/or chemical property.

[1094] Polypeptide per unit drug (PUD)): As used herein, a PUD or product per unit drug, is defined as a subdivided portion of total daily dose, usually 1 mg, pg, kg, etc., of a product (such as a polypeptide) as measured in body fluid or tissue, usually defined in concentration such as pmol/mL, mmol/mL, etc divided by the measure in the body fluid.

[1095] Preventing: As used herein, the term “preventing” refers to partially or completely delaying onset of an infection, disease, disorder and/or condition; partially or completely delaying onset of one or more symptoms, features, or clinical manifestations of a particular infection, disease, disorder, and/or condition; partially or completely delaying onset of one or more symptoms, features, or manifestations of a particular infection, disease, disorder, and/or condition; partially or completely delaying progression from an infection, a particular disease, disorder and/or condition; and/or decreasing the risk of developing pathology associated with the infection, the disease, disorder, and/or condition.

[1096] Prodrug: The present disclosure also includes prodrugs of the compounds described herein. As used herein, “prodrugs” refer to any substance, molecule or entity which is in a form predicate for that substance, molecule or entity to act as a therapeutic upon chemical or physical alteration. Prodrugs may by covalently bonded or sequestered in some way and which release or are converted into the active drug moiety prior to, upon or after administered to a mammalian subject. Prodrugs can be prepared by modifying functional groups present in the compounds in such a way that the modifications are cleaved, either in routine manipulation or in vivo, to the parent compounds. Prodrugs include compounds wherein hydroxyl, amino, sulfhydryl, or carboxyl groups are bonded to any group that, when administered to a mammalian subject, cleaves to form a free hydroxyl, amino, sulfhydryl, or carboxyl group respectively. Preparation and use of prodrugs is discussed in T. Higuchi and V. Stella, “Pro-drugs as Novel Delivery Systems,” Vol. 14 of the A.C.S. Symposium Series, and in Bioreversible Carriers in Drug Design, ed. Edward B. Roche, American Pharmaceutical Association and Pergamon Press, 1987, both of which are hereby incorporated by reference in their entirety.

[1097] Proliferate: As used herein, the term “proliferate” means to grow, expand or increase or cause to grow, expand or increase rapidly. “Proliferative” means having the ability to proliferate. “Anti-proliferative” means having properties counter to or inapposite to proliferative properties.

[1098] Protein cleavage site: As used herein, “protein cleavage site” refers to a site where controlled cleavage of the amino acid chain can be accomplished by chemical, enzymatic or photochemical means.

[1099] Protein cleavage signal: As used herein “protein cleavage signal” refers to at least one amino acid that flags or marks a polypeptide for cleavage.

[1100] Protein of interest: As used herein, the terms “proteins of interest” or “desired proteins” include those provided herein and fragments, mutants, variants, and alterations thereof.

[1101] Proximal: As used herein, the term “proximal” means situated nearer to the center or to a point or region of interest.

[1102] Pseudouridine: As used herein, pseudouridine refers to the C-glycoside isomer of the nucleoside uridine. A “pseudouridine analog” is any modification, variant, isoform or derivative of pseudouridine. For example, pseudouridine analogs include but are not limited to 1-carboxymethyl-pseudouridine, 1-propynyl-pseudouridine, 1-taurinomethyl-pseudouridine, 1-taurinomethyl-4-thio-pseudouridine, 1-methylpseudouridine (m¹ψ), 1-methyl-4-thio-pseudouridine (m¹s⁴ψ), 4-thio-1-methyl-pseudouridine, 3-methyl-pseudouridine (m³ψ), 2-thio-1-methyl-pseudouridine, 1-methyl-1-deaza-pseudouridine, 2-thio-1-methyl-1-deaza-pseudouridine, dihydropseudouridine, 2-thio-dihydropseudouridine, 2-methoxyuridine, 2-methoxy-4-thio-uridine, 4-methoxy-pseudouridine, 4-methoxy-2-thio-pseudouridine, N1-methyl-pseudouridine, 1-methyl-3-(3-amino-3-carboxypropyl) pseudouridine (acp³ ψ), and 2′-O-methyl-pseudouridine (ψm).

[1103] Purified: As used herein, “purify,” “purified,” “purification” means to make substantially pure or clear from unwanted components, material defilement, admixture or imperfection.

[1104] Sample: As used herein, the term “sample” or “biological sample” refers to a subset of its tissues, cells or component parts (e.g. body fluids, including but not limited to blood, mucus, lymphatic fluid, synovial fluid, cerebrospinal fluid, saliva, amniotic fluid, amniotic cord blood, urine, vaginal fluid and semen). A sample further may include a homogenate, lysate or extract prepared from a whole organism or a subset of its tissues, cells or component parts, or a fraction or portion thereof, including but not limited to, for example, plasma, serum, spinal fluid, lymph fluid, the external sections of the skin, respiratory, intestinal, and genitourinary tracts, tears, saliva, milk, blood cells, tumors, organs. A sample further refers to a medium, such as a nutrient broth or gel, which may contain cellular components, such as proteins or nucleic acid molecule.

[1105] Signal Sequences: As used herein, the phrase “signal sequences” refers to a sequence which can direct the transport or localization of a protein.

[1106] Single unit dose: As used herein, a “single unit dose” is a dose of any therapeutic administered in one dose/at one time/single route/single point of contact, i.e., single administration event.

[1107] Similarity: As used herein, the term “similarity” refers to the overall relatedness between polymeric molecules, e.g. between polynucleotide molecules (e.g. DNA molecules and/or RNA molecules) and/or between polypeptide molecules.

[1108] Calculation of percent similarity of polymeric molecules to one another can be performed in the same manner as a calculation of percent identity, except that calculation of percent similarity takes into account conservative substitutions as is understood in the art.

[1109] Split dose: As used herein, a “split dose” is the division of single unit dose or total daily dose into two or more doses.

[1110] Stable: As used herein “stable” refers to a compound that is sufficiently robust to survive isolation to a useful degree of purity from a reaction mixture, and preferably capable of formulation into an efficacious therapeutic agent.

[1111] Stabilized: As used herein, the term “stabilize”, “stabilized,” “stabilized region” means to make or become stable.

[1112] Subject: As used herein, the term “subject” or “patient” refers to any organism to which a composition in accordance with the invention may be administered, e.g., for experimental, diagnostic, prophylactic, and/or therapeutic purposes. Typical subjects include animals (e.g., mammals such as mice, rats, rabbits, non-human primates, and humans) and/or plants.

[1113] Substantially: As used herein, the term “substantially” refers to the qualitative condition of exhibiting total or near-total extent or degree of a characteristic or property of interest. One of ordinary skill in the biological arts will understand that biological and chemical phenomena rarely, if ever, go to completion and/or proceed to completeness or achieve or avoid an absolute result. The term “substantially” is therefore used herein to capture the potential lack of completeness inherent in many biological and chemical phenomena.

[1114] Substantially equal: As used herein as it relates to time differences between doses, the term means plus/minus 2%.

[1115] Substantially simultaneously: As used herein and as it relates to plurality of doses, the term means within 2 seconds.

[1116] Suffering from: An individual who is “suffering from” a disease, disorder, and/or condition has been diagnosed with or displays one or more symptoms of a disease, disorder, and/or condition.

[1117] Susceptible to: An individual who is “susceptible to” a disease, disorder, and/or condition has not been diagnosed with and/or may not exhibit symptoms of the disease, disorder, and/or condition but harbors a propensity to develop a disease or its symptoms. In some embodiments, an individual who is susceptible to a disease, disorder, and/or condition (for example, cancer) may be characterized by one or more of the following: (1) a genetic mutation associated with development of the disease, disorder, and/or condition; (2) a genetic polymorphism associated with development of the disease, disorder, and/or condition; (3) increased and/or decreased expression and/or activity of a protein and/or nucleic acid associated with the disease, disorder, and/or condition; (4) habits and/or lifestyles associated with development of the disease, disorder, and/or condition; (5) a family history of the disease, disorder, and/or condition; and (6) exposure to and/or infection with a microbe associated with development of the disease, disorder, and/or condition. In some embodiments, an individual who is susceptible to a disease, disorder, and/or condition will develop the disease, disorder, and/or condition. In some embodiments, an individual who is susceptible to a disease, disorder, and/or condition will not develop the disease, disorder, and/or condition.

[1118] Sustained release: As used herein, the term “sustained release” refers to a pharmaceutical composition or compound release profile that conforms to a release rate over a specific period of time.

[1119] Synthetic: The term “synthetic” means produced, prepared, and/or manufactured by the hand of man. Synthesis of polynucleotides or polypeptides or other molecules of the present invention may be chemical or enzymatic.

[1120] Targeted Cells: As used herein, “targeted cells” refers to any one or more cells of interest. The cells may be found in vitro, in vivo, in situ or in the tissue or organ of an organism. The organism may be an animal, preferably a mammal, more preferably a human and most preferably a patient.

[1121] Therapeutic Agent: The term “therapeutic agent” refers to any agent that, when administered to a subject, has a therapeutic, diagnostic, and/or prophylactic effect and/or elicits a desired biological and/or pharmacological effect.

[1122] Therapeutically effective amount: As used herein, the term “therapeutically effective amount” means an amount of an agent to be delivered (e.g., nucleic acid, drug, therapeutic agent, diagnostic agent, prophylactic agent, etc.) that is sufficient, when administered to a subject suffering from or susceptible to an infection, disease, disorder, and/or condition, to treat, improve symptoms of, diagnose, prevent, and/or delay the onset of the infection, disease, disorder, and/or condition.

[1123] Therapeutically effective outcome: As used herein, the term “therapeutically effective outcome” means an outcome that is sufficient in a subject suffering from or susceptible to an infection, disease, disorder, and/or condition, to treat, improve symptoms of, diagnose, prevent, and/or delay the onset of the infection, disease, disorder, and/or condition.

[1124] Total daily dose: As used herein, a “total daily dose” is an amount given or prescribed in 24 hr period. It may be administered as a single unit dose.

[1125] Transcription factor: As used herein, the term “transcription factor” refers to a DNA-binding protein that regulates transcription of DNA into RNA, for example, by activation or repression of transcription. Some transcription factors effect regulation of transcription alone, while others act in concert with other proteins. Some transcription factor can both activate and repress transcription under certain conditions. In general, transcription factors bind a specific target sequence or sequences highly similar to a specific consensus sequence in a regulatory region of a target gene. Transcription factors may regulate transcription of a target gene alone or in a complex with other molecules.

[1126] Treating: As used herein, the term “treating” refers to partially or completely alleviating, ameliorating, improving, relieving, delaying onset of, inhibiting progression of, reducing severity of, and/or reducing incidence of one or more symptoms or features of a particular infection, disease, disorder, and/or condition. For example, “treating” cancer may refer to inhibiting survival, growth, and/or spread of a tumor. Treatment may be administered to a subject who does not exhibit signs of a disease, disorder, and/or condition and/or to a subject who exhibits only early signs of a disease, disorder, and/or condition for the purpose of decreasing the risk of developing pathology associated with the disease, disorder, and/or condition.

[1127] Unmodified: As used herein, “unmodified” refers to any substance,

[1128] compound or molecule prior to being changed in any way. Unmodified may, but does not always, refer to the wild type or native form of a biomolecule. Molecules may undergo a series of modifications whereby each modified molecule may serve as the “unmodified” starting molecule for a subsequent modification.

### EQUIVALENTS AND SCOPE

[1129] Those skilled in the art will recognize, or be able to ascertain using no more than routine experimentation, many equivalents to the specific embodiments in accordance with the invention described herein. The scope of the present invention is not intended to be limited to the above Description, but rather is as set forth in the appended claims.

[1130] In the claims, articles such as “a,” “an,” and “the” may mean one or more than one unless indicated to the contrary or otherwise evident from the context. Claims or descriptions that include “or” between one or more members of a group are considered satisfied if one, more than one, or all of the group members are present in, employed in, or otherwise relevant to a given product or process unless indicated to the contrary or otherwise evident from the context. The invention includes embodiments in which exactly one member of the group is present in, employed in, or otherwise relevant to a given product or process. The invention includes embodiments in which more than one, or all of the group members are present in, employed in, or otherwise relevant to a given product or process.

[1131] It is also noted that the term “comprising” is intended to be open and permits but does not require the inclusion of additional elements or steps. When the term “comprising” is used herein, the term “consisting of” is thus also encompassed and disclosed.

[1132] Where ranges are given, endpoints are included. Furthermore, it is to be understood that unless otherwise indicated or otherwise evident from the context and understanding of one of ordinary skill in the art, values that are expressed as ranges can assume any specific value or subrange within the stated ranges in different embodiments of the invention, to the tenth of the unit of the lower limit of the range, unless the context clearly dictates otherwise.

[1133] In addition, it is to be understood that any particular embodiment of the present invention that falls within the prior art may be explicitly excluded from any one or more of the claims. Since such embodiments are deemed to be known to one of ordinary skill in the art, they may be excluded even if the exclusion is not set forth explicitly herein. Any particular embodiment of the compositions of the invention (e.g., any nucleic acid or protein encoded thereby; any method of production; any method of use; etc.) can be excluded from any one or more claims, for any reason, whether or not related to the existence of prior art.

[1134] All cited sources, for example, references, publications, databases, database entries, and art cited herein, are incorporated into this application by reference, even if not expressly stated in the citation. In case of conflicting statements of a cited source and the instant application, the statement in the instant application shall control.

[1135] Section and table headings are not intended to be limiting.

### EXAMPLES

### Example 1. Modified mRNA Production

[1136] Modified mRNAs (mmRNA) according to the invention may be made using standard laboratory methods and materials. The open reading frame (ORF) of the gene of interest may be flanked by a 5′ untranslated region (UTR) which may contain a strong Kozak translational initiation signal and/or an alpha-globin 3′ UTR which may include an oligo(dT) sequence for templated addition of a poly-A tail. The modified mRNAs may be modified to reduce the cellular innate immune response. The modifications to reduce the cellular response may include pseudouridine (ψ) and 5-methyl-cytidine (5meC, 5mc or m⁵C). (See, Kariko K et al. Immunity 23:165-75 (2005), Kariko K et al. Mol Ther 16:1833-40 (2008), Anderson B R et al. NAR (2010); each of which are herein incorporated by reference in their entireties).

[1137] The ORF may also include various upstream or downstream additions (such as, but not limited to, β-globin, tags, etc.) may be ordered from an optimization service such as, but limited to, DNA2.0 (Menlo Park, CA) and may contain multiple cloning sites which may have XbaI recognition. Upon receipt of the construct, it may be reconstituted and transformed into chemically competent E. coli.

[1138] For the present invention, NEB DH5-alpha Competent E. coli are used. Transformations are performed according to NEB instructions using 100 ng of plasmid. The protocol is as follows:
[1139] 1 Thaw a tube of NEB 5-alpha Competent E. coli cells on ice for 10 minutes.
[1140] 2 Add 1-5 μl containing 1 pg-100 ng of plasmid DNA to the cell mixture. Carefully flick the tube 4-5 times to mix cells and DNA. Do not vortex.
[1141] 3 Place the mixture on ice for 30 minutes. Do not mix.
[1142] 4 Heat shock at 42° C. for exactly 30 seconds. Do not mix.
[1143] 5 Place on ice for 5 minutes. Do not mix.
[1144] 6 Pipette 950 μl of room temperature SOC into the mixture.
[1145] 7 Place at 37° C. for 60 minutes. Shake vigorously (250 rpm) or rotate.
[1146] 8 Warm selection plates to 37° C.
[1147] 9 Mix the cells thoroughly by flicking the tube and inverting.

[1148] Spread 50-100 μl of each dilution onto a selection plate and incubate overnight at 37° C. Alternatively, incubate at 30° C. for 24-36 hours or 25° C. for 48 hours.

[1149] A single colony is then used to inoculate 5 ml of LB growth media using the appropriate antibiotic and then allowed to grow (250 RPM, 37° C.) for 5 hours. This is then used to inoculate a 200 ml culture medium and allowed to grow overnight under the same conditions.

[1150] To isolate the plasmid (up to 850 μg), a maxi prep is performed using the Invitrogen PURELINK™ HiPure Maxiprep Kit (Carlsbad, CA), following the manufacturer's instructions.

[1151] In order to generate cDNA for In Vitro Transcription (IVT), the plasmid (an Example of which is shown in FIG. 3) is first linearized using a restriction enzyme such as XbaI. A typical restriction digest with XbaI will comprise the following: Plasmid 1.0 μg; 10× Buffer 1.0 μl; XbaI 1.5 μl; dH₂0 up to 10 μl; incubated at 37° C. for 1 hr. If performing at lab scale (<5 μg), the reaction is cleaned up using Invitrogen's PURELINK™ PCR Micro Kit (Carlsbad, CA) per manufacturer's instructions. Larger scale purifications may need to be done with a product that has a larger load capacity such as Invitrogen's standard PURELINK™ PCR Kit (Carlsbad, CA). Following the cleanup, the linearized vector is quantified using the NanoDrop and analyzed to confirm linearization using agarose gel electrophoresis.

[1152] The methods described herein to make modified mRNA may be used to produce molecules of all sizes including long molecules. Modified mRNA using the described methods has been made for different sized molecules including glucosidase, alpha; acid (GAA) (3.2 kb), cystic fibrosis transmembrane conductance regulator (CFTR) (4.7 kb), Factor VII (7.3 kb), lysosomal acid lipase (45.4 kDa), glucocerebrosidase (59.7 kDa) and iduronate 2-sulfatase (76 kDa).

[1153] As a non-limiting example, G-CSF may represent the polypeptide of interest. Sequences used in the steps outlined in Examples 1-5 are shown in Table 11. It should be noted that the start codon (ATG) has been underlined in each sequence of Table 11.

TABLE 11
G-CSF Sequences

| SEQ | |
|---|---|
| ID NO | Description |
| 251430 | cDNA sequence: |
| | ATGGCTGGACCTGCCACCCAGAGCCCCATGAAGCTGAT |
| | GGCCCTGCAGCTGCTGCTGTGGCACAGTGCACTCTGGA |
| | CAGTGCAGGAAGCCACCCCCCTGGGCCCTGCCAGCTCC |
| | CTGCCCCAGAGCTTCCTGCTCAAGTGCTTAGAGCAAGT |
| | GAGGAAGATCCAGGGCGATGGCGCAGCGCTCCAGGAGA |
| | AGCTGTGTGCCACCTACAAGCTGTGCCACCCCGAGGAG |
| | CTGGTGCTGCTCGGACACTCTCTGGGCATCCCCTGGGC |
| | TCCCCTGAGCAGCTGCCCCAGCCAGGCCCTGCAGCTGG |
| | CAGGCTGCTTGAGCCAACTCCATAGCGGCCTTTTCCTC |
| | TACCAGGGGCTCCTGCAGGCCCTGGAAGGGATCTCCCC |
| | CGAGTTGGGTCCCACCTTGGACACACTGCAGCTGGACG |
| | TCGCCGACTTTGCCACCACCATCTGGCAGCAGATGGAA |
| | GAACTGGGAATGGCCCCTGCCCTGCAGCCCACCCAGGG |
| | TGCCATGCCGGCCTTCGCCTCTGCTTTCCAGCGCCGGG |
| | CAGGAGGGGTCCTGGTTGCCTCCCATCTGCAGAGCTTC |
| | CTGGAGGTGTCGTACCGCGTTCTACGCCACCTTGCCCA |
| | GCCCTGA |
| 251431 | cDNA having T7 polymerase site, |
| | AfeI and Xba restriction site: |
| | TAATACGACTCACTATA |
| | GGGAAATAAGAGAGAAAAGAAGAGTAAGAAGAAATATA |
| | AGAGCCACC |
| | ATGGCTGGACCTGCCACCCAGAGCCCCATGAAGCTGAT |
| | GGCCCTGCAGCTGCTGCTGTGGCACAGTGCACTCTGGA |
| | CAGTGCAGGAAGCCACCCCCCTGGGCCCTGCCAGCTCC |
| | CTGCCCCAGAGCTTCCTGCTCAAGTGCTTAGAGCAAGT |
| | GAGGAAGATCCAGGGCGATGGCGCAGCGCTCCAGGAGA |
| | AGCTGTGTGCCACCTACAAGCTGTGCCACCCCGAGGAG |
| | CTGGTGCTGCTCGGACACTCTCTGGGCATCCCCTGGGC |
| | TCCCCTGAGCAGCTGCCCCAGCCAGGCCCTGCAGCTGG |
| | CAGGCTGCTTGAGCCAACTCCATAGCGGCCTTTTCCTC |
| | TACCAGGGGCTCCTGCAGGCCCTGGAAGGGATCTCCCC |
| | CGAGTTGGGTCCCACCTTGGACACACTGCAGCTGGACG |
| | TCGCCGACTTTGCCACCACCATCTGGCAGCAGATGGAA |
| | GAACTGGGAATGGCCCCTGCCCTGCAGCCCACCCAGGG |
| | TGCCATGCCGGCCTTCGCCTCTGCTTTCCAGCGCCGGG |
| | CAGGAGGGGTCCTGGTTGCCTCCCATCTGCAGAGCTTC |
| | CTGGAGGTGTCGTACCGCGTTCTACGCCACCTTGCCCA |
| | GCCCTGA |
| | AGCGCTGCCTTCTGCGGGGCTTGCCTTCTGGCCATGCC |
| | CTTCTTCTCTCCCTTGCACCTGTACCTCTTGGTCTTTG |
| | AATAAAGCCTGAGTAGGAAGGCGGCCGCTCGAGCATGC |
| | ATCTAGA |
| 251432 | Optimized sequence; containing |
| | T7 polymerase site, AfeI and |
| | Xba restriction site |
| | TAATACGACTCACTATA |
| | GGGAAATAAGAGAGAAAAGAAGAGTAAGAAGAAATATA |
| | AGAGCCACC |
| | ATGGCCGGTCCCGCGACCCAAAGCCCCATGAAACTTAT |
| | GGCCCTGCAGTTGCTGCTTTGGCACTCGGCCCTCTGGA |
| | CAGTCCAAGAAGCGACTCCTCTCGGACCTGCCTCATCG |
| | TTGCCGCAGTCATTCCTTTTGAAGTGTCTGGAGCAGGT |
| | GCGAAAGATTCAGGGCGATGGAGCCGCACTCCAAGAGA |
| | AGCTCTGCGCGACATACAAACTTTGCCATCCCGAGGAG |
| | CTCGTACTGCTCGGGCACAGCTTGGGGATTCCCTGGGC |
| | TCCTCTCTCGTCCTGTCCGTCGCAGGCTTTGCAGTTGG |
| | CAGGGTGCCTTTCCCAGCTCCACTCCGGTTTGTTCTTG |
| | TATCAGGGACTGCTGCAAGCCCTTGAGGGAATCTCGCC |
| | AGAATTGGGCCCGACGCTGGACACGTTGCAGCTCGACG |
| | TGGCGGATTTCGCAACAACCATCTGGCAGCAGATGGAG |
| | GAACTGGGGATGGCACCCGCGCTGCAGCCCACGCAGGG |
| | GGCAATGCCGGCCTTTGCGTCCGCGTTTCAGCGCAGGG |
| | CGGGTGGAGTCCTCGTAGCGAGCCACCTTCAATCATTT |
| | TTGGAAGTCTCGTACCGGGTGCTGAGACATCTTGCGCA |
| | GCCGTGA |
| | AGCGCTGCCTTCTGCGGGGCTTGCCTTCTGGCCATGCC |
| | CTTCTTCTCTCCCTTGCACCTGTACCTCTTGGTCTTTG |
| | AATAAAGCCTGAGTAGGAAGGCGGCCGCTCGAGCATGC |
| | ATCTAGA |
| 251433 | mRNA sequence (transcribed) |
| | GGGAAAUAAGAGAGAAAAGAAGAGUAAGAAGAAAUAUA |
| | ACCAGAGCC |
| | AUGGCCGGUCCCGCGACCCAAAGCCCCAUGAAACUUAU |
| | GGCCCUGCAGUUGCUGCUUUGGCACUCGGCCCUCUGGA |
| | CAGUCCAAGAAGCGACUCCUCUCGGACCUGCCUCAUCG |
| | UUGCCGCAGUCAUUCCUUUUGAAGUGUCUGGAGCAGGU |
| | GCGAAAGAUUCAGGGCGAUGGAGCCGCACUCCAAGAGA |
| | AGCUCUGCGCGACAUACAAACUUUGCCAUCCCGAGGAG |
| | CUCGUACUGCUCGGGCACAGCUUGGGGAUUCCCUGGGC |
| | UCCUCUCUCGUCCUGUCCGUCGCAGGCUUUGCAGUUGG |
| | CAGGGUGCCUUUCCCAGCUCCACUCCGGUUUGUUCUUG |
| | UAUCAGGGACUGCUGCAAGCCCUUGAGGGAAUCUCGCC |
| | AGAAUUGGGCCCGACGCUGGACACGUUGCAGCUCGACG |
| | UGGCGGAUUUCGCAACAACCAUCUGGCAGCAGAUGGAG |
| | GAACUGGGGAUGGCACCCGCGCUGCAGCCCACGCAGGG |
| | GGCAAUGCCGGCCUUUGCGUCCGCGUUUCAGCGCAGGG |
| | CGGGUGGAGUCCUCGUAGCGAGCCACCUUCAAUCAUUU |
| | UUGGAAGUCUCGUACCGGGUGCUGAGACAUCUUGCGCA |
| | GCCGUGA |
| | AGCGCUGCCUUCUGCGGGGCUUGCCUUCUGGCCAUGCC |
| | CUUCUUCUCUCCCUUGCACCUGUACCUCUUGGUCUUUG |
| | AAUAAAGCCUGAGUAGGAAG |

### Example 2: PCR for cDNA Production

[1154] PCR procedures for the preparation of cDNA are performed using 2×KAPA HIFI™ HotStart ReadyMix by Kapa Biosystems (Woburn, MA). This system includes 2×KAPA ReadyMix 12.5 μl; Forward Primer (10 uM) 0.75 μl; Reverse Primer (10 uM) 0.75 μl; Template cDNA 100 ng; and dH₂0 diluted to 25.0 μl. The reaction conditions are at 95° C. for 5 min. and 25 cycles of 98° C. for 20 sec, then 58° C. for 15 sec, then 72° C. for 45 sec, then 72° C. for 5 min. then 4° C. to termination.

[1155] The reverse primer of the instant invention incorporates a poly-T₁₂₀ for a poly-A₁₂₀ in the mRNA. Other reverse primers with longer or shorter poly(T) tracts can be used to adjust the length of the poly(A) tail in the mRNA.

[1156] The reaction is cleaned up using Invitrogen's PURELINK™ PCR Micro Kit (Carlsbad, CA) per manufacturer's instructions (up to 5 μg). Larger reactions will require a cleanup using a product with a larger capacity. Following the cleanup, the cDNA is quantified using the NANODROP™ and analyzed by agarose gel electrophoresis to confirm the cDNA is the expected size. The cDNA is then submitted for sequencing analysis before proceeding to the in vitro transcription reaction.

### Example 3. In Vitro Transcription (IVT)

[1157] The in vitro transcription reaction generates mRNA containing modified nucleotides or modified RNA. The input nucleotide triphosphate (NTP) mix is made in-house using natural and un-natural NTPs.

[1158] A typical in vitro transcription reaction includes the following:

| | | | |
|---|---|---|---|
| 1. | Template cDNA | 1.0 | μg |
| 2. | 10x transcription buffer (400 mM Tris- | 2.0 | μl |
| | HCl pH 8.0, 190 mM MgCl₂, 50 mM DTT, | | |
| | 10 mM Spermidine) | | |
| 3. | Custom NTPs (25 mM each) | 7.2 | μl |
| 4. | RNase Inhibitor | 20 | U |
| 5. | T7 RNA polymerase | 3000 | U |

| | | |
|---|---|---|
| 6. | dH₂0 | Up to 20.0 μl. and |
| 7. | Incubation at 37° C. for 3 hr-5 hrs. | |

[1159] The crude IVT mix may be stored at 4° C. overnight for cleanup the next day. 1 U of RNase-free DNase is then used to digest the original template. After 15 minutes of incubation at 37° C., the mRNA is purified using Ambion's MEGACLEAR™ Kit (Austin, TX) following the manufacturer's instructions. This kit can purify up to 500 μg of RNA. Following the cleanup, the RNA is quantified using the NanoDrop and analyzed by agarose gel electrophoresis to confirm the RNA is the proper size and that no degradation of the RNA has occurred.

### Example 4. Enzymatic Capping of mRNA

[1160] Capping of the mRNA is performed as follows where the mixture includes: IVT RNA 60 μg-180 μg and dH₂0 up to 72 μl. The mixture is incubated at 65° C. for 5 minutes to denature RNA, and then is transferred immediately to ice.

[1161] The protocol then involves the mixing of 10× Capping Buffer (0.5 M Tris-HCl (pH 8.0), 60 mM KCl, 12.5 mM MgCl₂) (10.0 μl); 20 mM GTP (5.0 μl); 20 mM S-Adenosyl Methionine (2.5 μl); RNase Inhibitor (100 U); 2′-O-Methyltransferase (400 U); Vaccinia capping enzyme (Guanylyl transferase) (40 U); dH₂0 (Up to 28 μl); and incubation at 37° C. for 30 minutes for 60 μg RNA or up to 2 hours for 180 μg of RNA.

[1162] The mRNA is then purified using Ambion's MEGACLEAR™ Kit (Austin, TX) following the manufacturer's instructions. Following the cleanup, the RNA is quantified using the NANODROP™ (ThermoFisher, Waltham, MA) and analyzed by agarose gel electrophoresis to confirm the RNA is the proper size and that no degradation of the RNA has occurred. The RNA product may also be sequenced by running a reverse-transcription-PCR to generate the cDNA for sequencing.

### Example 5. PolyA Tailing Reaction

[1163] Without a poly-T in the cDNA, a poly-A tailing reaction must be performed before cleaning the final product. This is done by mixing Capped IVT RNA (100 μl); RNase Inhibitor (20 U); 10× Tailing Buffer (0.5 M Tris-HCl (pH 8.0), 2.5 M NaCl, 100 mM MgCl₂) (12.0 μl); 20 mM ATP (6.0 μl); Poly-A Polymerase (20 U); dH₂0 up to 123.5 μl and incubation at 37° C. for 30 min. If the poly-A tail is already in the transcript, then the tailing reaction may be skipped and proceed directly to cleanup with Ambion's MEGACLEAR™ kit (Austin, TX) (up to 500 μg). Poly-A Polymerase is preferably a recombinant enzyme expressed in yeast.

[1164] For studies performed and described herein, the poly-A tail is encoded in the IVT template to comprise 160 nucleotides in length. However, it should be understood that the processivity or integrity of the poly A tailing reaction may not always result in exactly 160 nucleotides. Hence poly A tails of approximately 160 nucleotides, e.g, about 150-165, 155, 156, 157, 158, 159, 160, 161, 162, 163, 164 or 165 are within the scope of the invention.

### Example 6. Natural 5′ Caps and 5′ Cap Analogues

[1165] 5′-capping of modified RNA may be completed concomitantly during the in vitro-transcription reaction using the following chemical RNA cap analogs to generate the 5′-guanosine cap structure according to manufacturer protocols: 3′-O-Me-m7G(5′)ppp(5′) G [the ARCA cap];G(5′)ppp(5′) A; G(5′)ppp(5′)G; m7G(5′)ppp(5′)A; m7G(5′)ppp(5′) G(New England BioLabs, Ipswich, MA). 5′-capping of modified RNA may be completed post-transcriptionally using a Vaccinia Virus Capping Enzyme to generate the “Cap 0” structure: m7G(5′)ppp(5′) G (New England BioLabs, Ipswich, MA). Cap 1 structure may be generated using both Vaccinia Virus Capping Enzyme and a 2′-O methyl-transferase to generate: m7G(5′)ppp(5′) G-2′-O-methyl. Cap 2 structure may be generated from the Cap 1 structure followed by the 2′-O-methylation of the 5′-antepenultimate nucleotide using a 2′-O methyl-transferase. Cap 3 structure may be generated from the Cap 2 structure followed by the 2′-O-methylation of the 5′-preantepenultimate nucleotide using a 2′-O methyl-transferase. Enzymes are preferably derived from a recombinant source.

[1166] When transfected into mammalian cells, the modified mRNAs have a stability of between 12-18 hours or more than 18 hours, e.g., 24, 36, 48, 60, 72 or greater than 72 hours.

### Example 7. Capping

### A. Protein Expression Assay

[1167] Synthetic mRNAs encoding human G-CSF (cDNA shown in SEQ ID NO: 251430; mRNA sequence fully modified with 5-methylcytosine at each cytosine and pseudouridine replacement at each uridine site shown in SEQ ID NO: 251433 with a polyA tail approximately 160 nucleotides in length not shown in sequence) containing the ARCA (3′ O-Me-m7G(5′)ppp(5′)G) cap analog or the Cap1 structure can be transfected into human primary keratinocytes at equal concentrations. 6, 12, 24 and 36 hours post-transfection the amount of G-CSF secreted into the culture medium can be assayed by ELISA. Synthetic mRNAs that secrete higher levels of G-CSF into the medium would correspond to a synthetic mRNA with a higher translationally-competent Cap structure.

### B. Purity Analysis Synthesis

[1168] Synthetic mRNAs encoding human G-CSF (cDNA shown in SEQ ID NO: 251430; mRNA sequence fully modified with 5-methylcytosine at each cytosine and pseudouridine replacement at each uridine site shown in SEQ ID NO: 251433 with a poly A tail approximately 160 nucleotides in length not shown in sequence) containing the ARCA cap analog or the Cap1 structure crude synthesis products can be compared for purity using denaturing Agarose-Urea gel electrophoresis or HPLC analysis. Synthetic mRNAs with a single, consolidated band by electrophoresis correspond to the higher purity product compared to a synthetic mRNA with multiple bands or streaking bands. Synthetic mRNAs with a single HPLC peak would also correspond to a higher purity product. The capping reaction with a higher efficiency would provide a more pure mRNA population.

### C. Cytokine Analysis

[1169] Synthetic mRNAs encoding human G-CSF (cDNA shown in SEQ ID NO: 251430; mRNA sequence fully modified with 5-methylcytosine at each cytosine and pseudouridine replacement at each uridine site shown in SEQ ID NO: 251433 with a poly A tail approximately 160 nucleotides in length not shown in sequence) containing the ARCA cap analog or the Cap1 structure can be transfected into human primary keratinocytes at multiple concentrations. 6, 12, 24 and 36 hours post-transfection the amount of pro-inflammatory cytokines such as TNF-alpha and IFN-beta secreted into the culture medium can be assayed by ELISA. Synthetic mRNAs that secrete higher levels of pro-inflammatory cytokines into the medium would correspond to a synthetic mRNA containing an immune-activating cap structure.

### D. Capping Reaction Efficiency

[1170] Synthetic mRNAs encoding human G-CSF (cDNA shown in SEQ ID NO: 251430; mRNA sequence fully modified with 5-methylcytosine at each cytosine and pseudouridine replacement at each uridine site shown in SEQ ID NO: 251433 with a poly A tail approximately 160 nucleotides in length not shown in sequence) containing the ARCA cap analog or the Cap1 structure can be analyzed for capping reaction efficiency by LC-MS after capped mRNA nuclease treatment. Nuclease treatment of capped mRNAs would yield a mixture of free nucleotides and the capped 5′-5-triphosphate cap structure detectable by LC-MS. The amount of capped product on the LC-MS spectra can be expressed as a percent of total mRNA from the reaction and would correspond to capping reaction efficiency. The cap structure with higher capping reaction efficiency would have a higher amount of capped product by LC-MS.

### Example 8. Agarose Gel Electrophoresis of Modified RNA or RT PCR Products

[1171] Individual modified RNAs (200-400 ng in a 20 μl volume) or reverse transcribed PCR products (200-400 ng) are loaded into a well on a non-denaturing 1.2% Agarose E-Gel (Invitrogen, Carlsbad, CA) and run for 12-15 minutes according to the manufacturer protocol.

### Example 9. Nanodrop Modified RNA Quantification and UV Spectral Data

[1172] Modified RNAs in TE buffer (1 μl) are used for Nanodrop UV absorbance readings to quantitate the yield of each modified RNA from an in vitro transcription reaction.

### Example 10. Formulation of Modified mRNA Using Lipidoids

[1173] Modified mRNAs (mmRNA) are formulated for in vitro experiments by mixing the mmRNA with the lipidoid at a set ratio prior to addition to cells. In vivo formulation may require the addition of extra ingredients to facilitate circulation throughout the body. To test the ability of these lipidoids to form particles suitable for in vivo work, a standard formulation process used for siRNA-lipidoid formulations was used as a starting point. Initial mmRNA-lipidoid formulations may consist of particles composed of 42% lipidoid, 48% cholesterol and 10% PEG, with further optimization of ratios possible. After formation of the particle, mmRNA is added and allowed to integrate with the complex. The encapsulation efficiency is determined using a standard dye exclusion assays.

### Materials and Methods for Examples 11-15

### A. Lipid Synthesis

[1174] Six lipids, DLin-DMA, DLin-K-DMA, DLin-KC2-DMA, 98N12-5, C12-200 and DLin-MC3-DMA, were synthesized by methods outlined in the art in order to be formulated with modified RNA. DLin-DMA and precursors were synthesized as described in Heyes et. al, J. Control Release, 2005, 107, 276-287. DLin-K-DMA and DLin-KC2-DMA and precursors were synthesized as described in Semple et. al, Nature Biotechnology, 2010, 28, 172-176. 98N12-5 and precursor were synthesized as described in Akinc et. al, Nature Biotechnology, 2008, 26, 561-569.

[1175] C12-200 and precursors were synthesized according to the method outlined in Love et. al, PNAS, 2010, 107, 1864-1869. 2-epoxydodecane (5.10 g, 27.7 mmol, 8.2 eq) was added to a vial containing Amine 200 (0.723 g, 3.36 mmol, 1 eq) and a stirring bar. The vial was sealed and warmed to 80° C. The reaction was stirred for 4 days at 80° C. Then the mixture was purified by silica gel chromatography using a gradient from pure dichloromethane (DCM) to DCM:MeOH 98:2. The target compound was further purified by RP-HPLC to afford the desired compound.

[1176] DLin-MC3-DMA and precursors were synthesized according to procedures described in WO 2010054401 herein incorporated by reference in its entirety. A mixture of dilinoleyl methanol (1.5 g, 2.8 mmol, 1 eq), N,N-dimethylaminobutyric acid (1.5 g, 2.8 mmol, 1 eq), DIPEA (0.73 mL, 4.2 mmol, 1.5 eq) and TBTU (1.35 g, 4.2 mmol, 1.5 eq) in 10 mL of DMF was stirred for 10 h at room temperature. Then the reaction mixture was diluted in ether and washed with water. The organic layer was dried over anhydrous sodium sulfate, filtrated and concentrated under reduced pressure. The crude product was purified by silica gel chromatography using a gradient DCM to DCM:MeOH 98:2. Subsequently the target compound was subjected to an additional RP-HPLC purification which was done using a YMC-Pack C4 column to afford the target compound.

### B. Formulation of Modified RNA Nanoparticles

[1177] Solutions of synthesized lipid, 1,2-distearoyl-3-phosphatidylcholine (DSPC) (Avanti Polar Lipids, Alabaster, AL), cholesterol (Sigma-Aldrich, Taufkirchen, Germany), and α-[3′-(1,2-dimyristoyl-3-propanoxy)-carboxamide-propyl]-ω-methoxy-polyoxyethylene (PEG-c-DOMG) (NOF, Bouwelven, Belgium) were prepared at concentrations of 50 mM in ethanol and stored at −20° C. The lipids were combined to yield molar ratio of 50:10:38.5:1.5 (Lipid:DSPC:Cholesterol:PEG-c-DOMG) and diluted with ethanol to a final lipid concentration of 25 mM. Solutions of modified mRNA at a concentration of 1-2 mg/mL in water were diluted in 50 mM sodium citrate buffer at a pH of 3 to form a stock modified mRNA solution. Formulations of the lipid and modified mRNA were prepared by combining the synthesized lipid solution with the modified mRNA solution at total lipid to modified mRNA weight ratio of 10:1, 15:1, 20:1 and 30:1. The lipid ethanolic solution was rapidly injected into aqueous modified mRNA solution to afford a suspension containing 33% ethanol. The solutions were injected either manually (MI) or by the aid of a syringe pump (SP) (Harvard Pump 33 Dual Syringe Pump Harvard Apparatus Holliston, MA).

[1178] To remove the ethanol and to achieve the buffer exchange, the formulations were dialyzed twice against phosphate buffered saline (PBS), pH 7.4 at volumes 200-times of the primary product using a Slide-A-Lyzer cassettes (Thermo Fisher Scientific Inc. Rockford, IL) with a molecular weight cutoff (MWCO) of 10 kD. The first dialysis was carried at room temperature for 3 hours and then the formulations were dialyzed overnight at 4° C. The resulting nanoparticle suspension was filtered through 0.2 μm sterile filter (Sarstedt, Nümbrecht, Germany) into glass vials and sealed with a crimp closure.

### C. Characterization of Formulations

[1179] A Zetasizer Nano ZS (Malvern Instruments Ltd, Malvern, Worcestershire, UK) was used to determine the particle size, the polydispersity index (PDI) and the zeta potential of the modified mRNA nanoparticles in 1×PBS in determining particle size and 15 mM PBS in determining zeta potential.

[1180] Ultraviolet-visible spectroscopy was used to determine the concentration of modified mRNA nanoparticle formulation. 100 μL of the diluted formulation in 1×PBS was added to 900 μL of a 4:1 (v/v) mixture of methanol and chloroform. After mixing, the absorbance spectrum of the solution was recorded between 230 nm and 330 nm on a DU 800 spectrophotometer (Beckman Coulter, Beckman Coulter, Inc., Brea, CA). The modified RNA concentration in the nanoparticle formulation was calculated based on the extinction coefficient of the modified RNA used in the formulation and on the difference between the absorbance at a wavelength of 260 nm and the baseline value at a wavelength of 330 nm.

[1181] QUANT-IT™ RIBOGREEN® RNA assay (Invitrogen Corporation Carlsbad, CA) was used to evaluate the encapsulation of modified RNA by the nanoparticle. The samples were diluted to a concentration of approximately 5 μg/mL in TE buffer (10 mM Tris-HCl, 1 mM EDTA, pH 7.5). 50 μL of the diluted samples were transferred to a polystyrene 96 well plate, then either 50 μL of TE buffer or 50 μL of a 2% Triton X-100 solution was added. The plate was incubated at a temperature of 37° C. for 15 minutes. The RIBOGREEN® reagent was diluted 1:100 in TE buffer, 100 μL of this solution was added to each well. The fluorescence intensity was measured using a fluorescence plate reader (Wallac Victor 1420 Multilablel Counter; Perkin Elmer, Waltham, MA) at an excitation wavelength of ˜480 nm and an emission wavelength of ˜520 nm. The fluorescence values of the reagent blank were subtracted from that of each of the samples and the percentage of free modified RNA was determined by dividing the fluorescence intensity of the intact sample (without addition of Triton X-100) by the fluorescence value of the disrupted sample (caused by the addition of Triton X-100).

### D. In Vitro Incubation

[1182] Human embryonic kidney epithelial (HEK293) and hepatocellular carcinoma epithelial (HepG2) cells (LGC standards GmbH, Wesel, Germany) were seeded on 96-well plates (Greiner Bio-one GmbH, Frickenhausen, Germany) and plates for HEK293 cells were precoated with collagen type1. HEK293 were seeded at a density of 30,000 and HepG2 were seeded at a density of 35,000 cells per well in 100 μl cell culture medium. For HEK293 the cell culture medium was DMEM, 10% FCS, adding 2 mM L-Glutamine, 1 mM Sodiumpyruvate and 1× non-essential amino acids (Biochrom AG, Berlin, Germany) and 1.2 mg/ml Sodiumbicarbonate (Sigma-Aldrich, Munich, Germany) and for HepG2 the culture medium was MEM (Gibco Life Technologies, Darmstadt, Germany), 10% FCS adding 2 mM L-Glutamine, 1 mM Sodiumpyruvate and 1× non-essential amino acids (Biochrom AG, Berlin, Germany. Formulations containing mCherry mRNA (mRNA sequence shown in SEQ ID NO: 251434; polyA tail of approximately 160 nucleotides not shown in sequence; 5′cap, Cap1) were added in quadruplicates directly after seeding the cells and incubated. The mCherry cDNA with the T7 promoter, 5′untranslated region (UTR) and 3′ UTR used in in vitro transcription (IVT) is given in SEQ ID NO: 251435. The mCherry mRNA was modified with a 5meC at each cytosine and pseudouridine replacement at each uridine site.

[1183] Cells were harvested by transferring the culture media supernatants to a 96-well Pro-Bind U-bottom plate (Beckton Dickinson GmbH, Heidelberg, Germany). Cells were trypsinized with ½ volume Trypsin/EDTA (Biochrom AG, Berlin, Germany), pooled with respective supernatants and fixed by adding one volume PBS/2% FCS (both Biochrom AG, Berlin, Germany)/0.5% formaldehyde (Merck, Darmstadt, Germany). Samples then were submitted to a flow cytometer measurement with a 532 nm excitation laser and the 610/20 filter for PE-Texas Red in a LSRII cytometer (Beckton Dickinson GmbH, Heidelberg, Germany). The mean fluorescence intensity (MFI) of all events and the standard deviation of four independent wells are presented in for samples analyzed.

### Example 11. Purification of Nanoparticle Formulations

[1184] Nanoparticle formulations of DLin-KC2-DMA and 98N12-5 in HEK293 and HepG2 were tested to determine if the mean fluorescent intensity (MFI) was dependent on the lipid to modified RNA ratio and/or purification. Three formulations of DLin-KC2-DMA and two formulations of 98N12-5 were produced using a syringe pump to the specifications described in Table 12. Purified samples were purified by SEPHADEX™ G-25 DNA grade (GE Healthcare, Sweden). Each formulation before and after purification (aP) was tested at concentration of 250 ng modified RNA per well in a 24 well plate. The percentage of cells that are positive for the marker for FL4 channel (% FL4-positive) when analyzed by the flow cytometer for each formulation and the background sample, and the MFI of the marker for the FL4 channel for each formulation and the background sample are shown in Table 13. The formulations which had been purified had a slightly higher MFI than those formulations tested before purification.

TABLE 12
Formulations

| Formulation # | Lipid | Lipid/RNA wt/wt | Mean size (nm) |
|---|---|---|---|
| NPA-001-1 | DLin-KC2-DMA | 10 | 155 nm |
| | | | PDI: 0.08 |
| NPA-001-1 aP | DLin-KC2-DMA | 10 | 141 nm |
| | | | PDI: 0.14 |
| NPA-002-1 | DLin-KC2-DMA | 15 | 140 nm |
| | | | PDI: 0.11 |
| NPA-002-1 aP | DLin-KC2-DMA | 15 | 125 nm |
| | | | PDI: 0.12 |
| NPA-003-1 | DLin-KC2-DMA | 20 | 114 nm |
| | | | PDI: 0.08 |
| NPA-003-1 aP | DLin-KC2-DMA | 20 | 104 nm |
| | | | PDI: 0.06 |
| NPA-005-1 | 98N12-5 | 15 | 127 nm |
| | | | PDI: 0.12 |
| NPA-005-1 aP | 98N12-5 | 15 | 134 nm |
| | | | PDI: 0.17 |
| NPA-006-1 | 98N12 | 20 | 126 nm |
| | | | PDI: 0.08 |
| NPA-006-1 aP | 98N12 | 20 | 118 nm |
| | | | PDI: 0.13 |

TABLE 13
HEK293 and HepG2, 24-well, 250 ng Modified RNA/well

| | |
|---|---|
| % FL4-positive | FL4 MFI |

| Formulation | HEK293 | HepG2 | HEK293 | HepG2 |
|---|---|---|---|---|
| Untreated | 0.33 | 0.40 | 0.25 | 0.30 |
| NPA-001-1 | 62.42 | 5.68 | 1.49 | 0.41 |
| NPA-001-ap | 87.32 | 9.02 | 3.23 | 0.53 |
| NPA-002-1 | 91.28 | 9.90 | 4.43 | 0.59 |
| NPA-002-ap | 92.68 | 14.02 | 5.07 | 0.90 |
| NPA-003-1 | 87.70 | 11.76 | 6.83 | 0.88 |
| NPA-003-ap | 88.88 | 15.46 | 8.73 | 1.06 |
| NPA-005-1 | 50.60 | 4.75 | 1.83 | 0.46 |
| NPA-005-ap | 38.64 | 5.16 | 1.32 | 0.46 |
| NPA-006-1 | 54.19 | 13.16 | 1.30 | 0.60 |
| NPA-006-ap | 49.97 | 13.74 | 1.27 | 0.61 |

### Example 12. Concentration Response Curve

[1185] Nanoparticle formulations of 98N12-5 (NPA-005) and DLin-KC2-DMA (NPA-003) were tested at varying concentrations to determine the MFI of FL4 or mCherry (mRNA sequence shown in SEQ ID NO: 251434; polyA tail of approximately 160 nucleotides not shown in sequence; 5′cap, Cap1; fully modified with 5-methylcytosine and pseudouridine) over a range of doses. The formulations tested are outlined in Table 14. To determine the optimal concentration of nanoparticle formulations of 98N12-5, varying concentrations of formulated modified RNA (100 ng, 10 ng, 1.0 ng, 0.1 ng and 0.01 ng per well) were tested in a 24-well plate of HEK293, and the results of the FL4 MFI of each dose are shown in Table 15. Likewise, to determine the optimal concentration of nanoparticle formulations of DLin-KC2-DMA, varying concentrations of formulated modified RNA (250 ng 100 ng, 10 ng, 1.0 ng, 0.1 ng and 0.01 ng per well) were tested in a 24-well plate of HEK293, and the results of the FL4 MFI of each dose are shown in Table 16. Nanoparticle formulations of DLin-KC2-DMA were also tested at varying concentrations of formulated modified RNA (250 ng, 100 ng and 30 ng per well) in a 24 well plate of HEK293, and the results of the FL4 MFI of each dose are shown in Table 17. A dose of 1 ng/well for 98N12-5 and a dose of 10 ng/well for DLin-KC2-DMA were found to resemble the FL4 MFI of the background.

[1186] To determine how close the concentrations resembled the background, we utilized a flow cytometer with optimized filter sets for detection of mCherry expression, and were able to obtain results with increased sensitivity relative to background levels. Doses of 25 ng/well, 0.25 ng/well, 0.025 ng/well and 0.0025 ng/well were analyzed for 98N12-5 (NPA-005) and DLin-KC2-DMA (NPA-003) to determine the MFI of mCherry. As shown in Table 18, the concentration of 0.025 ng/well and lesser concentrations are similar to the background MFI level of mCherry which is about 386.125.

TABLE 14
Formulations

| Formulation # | NPA-003 | NPA-005 |
|---|---|---|
| Lipid | DLin-KC2-DMA | 98N12-5 |
| Lipid/RNA wt/wt | 20 | 15 |
| Mean size | 114 nm | 106 nm |
| | PDI: 0.08 | PDI: 0.12 |

TABLE 15
HEK293, NPA-005, 24-well, n = 4

| Formulation | FL4 MFI |
|---|---|
| Untreated control | 0.246 |
| NPA-005 100 ng | 2.2175 |
| NPA-005 10 ng | 0.651 |
| NPA-005 1.0 ng | 0.28425 |
| NPA-005 0.1 ng | 0.27675 |
| NPA-005 0.01 ng | 0.2865 |

TABLE 16
HEK293, NPA-003, 24-well, n = 4

| Formulation | FL4 MFI |
|---|---|
| Untreated control | 0.3225 |
| NPA-003 250 ng | 2.9575 |
| NPA-003 100 ng | 1.255 |
| NPA-003 10 ng | 0.40025 |
| NPA-003 1 ng | 0.33025 |
| NPA-003 0.1 ng | 0.34625 |
| NPA-003 0.01 ng | 0.3475 |

TABLE 17
HEK293, NPA-003, 24-well, n = 4

| Formulation | FL4 MFI |
|---|---|
| Untreated control | 0.27425 |
| NPA-003 250 ng | 5.6075 |
| NPA-003 100 ng | 3.7825 |
| NPA-003 30 ng | 1.5525 |

TABLE 18
Concentration and MFI

MFI mCherry

| | | |
|---|---|---|
| Formulation | NPA-003 | NPA-005 |

| | | | |
|---|---|---|---|
| 25 | ng/well | 11963.25 | 12256.75 |
| 0.25 | ng/well | 1349.75 | 2572.75 |
| 0.025 | ng/well | 459.50 | 534.75 |
| 0.0025 | ng/well | 310.75 | 471.75 |

### Example 13. Manual Injection and Syringe Pump Formulations

[1187] Two formulations of DLin-KC2-DMA and 98N12-5 were prepared by manual injection (MI) and syringe pump injection (SP) and analyzed along with a background sample to compare the MFI of mCherry (mRNA sequence shown in SEQ ID NO: 251434; polyA tail of approximately 160 nucleotides not shown in sequence; 5′cap, Cap1; fully modified with 5-methylcytosine and pseudouridine) of the different formulations. Table 19 shows that the syringe pump formulations had a higher MFI as compared to the manual injection formulations of the same lipid and lipid/RNA ratio.

TABLE 19
Formulations and MFI

| | | Lipid/ | | Method | |
|---|---|---|---|---|---|
| Formulation | | RNA | Mean size | of formu- | |
| # | Lipid | wt/wt | (nm) | lation | MFI |
| Untreated | N/A | N/A | N/A | N/A | 674.67 |
| Control | | | | | |
| NPA-002 | DLin-KC2- | 15 | 140 nm | MI | 10318.25 |
| | DMA | | PDI: 0.11 | | |
| NPA-002-2 | DLin-KC2- | 15 | 105 nm | SP | 37054.75 |
| | DMA | | PDI: 0.04 | | |
| NPA-003 | DLin-KC2- | 20 | 114 nm | MI | 22037.5 |
| | DMA | | PDI: 0.08 | | |
| NPA-003-2 | DLin-KC2- | 20 | 95 nm | SP | 37868.75 |
| | DMA | | PDI: 0.02 | | |
| NPA-005 | 98N12-5 | 15 | 127 nm | MI | 11504.75 |
| | | | PDI: 0.12 | | |
| NPA-005-2 | 98N12-5 | 15 | 106 nm | SP | 9343.75 |
| | | | PDI: 0.07 | | |
| NPA-006 | 98N12-5 | 20 | 126 nm | MI | 11182.25 |
| | | | PDI: 0.08 | | |
| NPA-006-2 | 98N12-5 | 20 | 93 nm | SP | 5167 |
| | | | PDI: 0.08 | | |

### Example 14. Lipid Nanoparticle Formulations

[1188] Formulations of DLin-DMA, DLin-K-DMA, DLin-KC2-DMA, 98N12-5, C12-200 and DLin-MC3-DMA were incubated at a concentration of 60 ng/well or 62.5 ng/well in a plate of HEK293 and 62.5 ng/well in a plate of HepG2 cells for 24 hours to determine the MFI of mCherry (mRNA sequence shown in SEQ ID NO: 251434; polyA tail of approximately 160 nucleotides not shown in sequence; 5′cap, Cap1; fully modified with 5-methylcytosine and pseudouridine) for each formulation. The formulations tested are outlined in Table 20 below. As shown in Table 21 for the 60 ng/well and Tables 22, 23, 24 and 25 for the 62.5 ng/well, the formulation of NPA-003 and NPA-018 have the highest mCherry MFI and the formulations of NPA-008, NPA-010 and NPA-013 are most the similar to the background sample mCherry MFI value.

TABLE 20
Formulations

| Formulation | | Lipid/RNA | |
|---|---|---|---|
| # | Lipid | wt/wt | Mean size (nm) |
| NPA-001 | DLin-KC2-DMA | 10 | 155 nm |
| | | | PDI: 0.08 |
| NPA-002 | DLin-KC2-DMA | 15 | 140 nm |
| | | | PDI: 0.11 |
| NPA-002-2 | DLin-KC2-DMA | 15 | 105 nm |
| | | | PDI: 0.04 |
| NPA-003 | DLin-KC2-DMA | 20 | 114 nm |
| | | | PDI: 0.08 |
| NPA-003-2 | DLin-KC2-DMA | 20 | 95 nm |
| | | | PDI: 0.02 |
| NPA-005 | 98N12-5 | 15 | 127 nm |
| | | | PDI: 0.12 |
| NPA-006 | 98N12-5 | 20 | 126 nm |
| | | | PDI: 0.08 |
| NPA-007 | DLin-DMA | 15 | 148 nm |
| | | | PDI: 0.09 |
| NPA-008 | DLin-K-DMA | 15 | 121 nm |
| | | | PDI: 0.08 |
| NPA-009 | C12-200 | 15 | 138 nm |
| | | | PDI: 0.15 |
| NPA-010 | DLin-MC3-DMA | 15 | 126 nm |
| | | | PDI: 0.09 |
| NPA-012 | DLin-DMA | 20 | 86 nm |
| | | | PDI: 0.08 |
| NPA-013 | DLin-K-DMA | 20 | 104 nm |
| | | | PDI: 0.03 |
| NPA-014 | C12-200 | 20 | 101 nm |
| | | | PDI: 0.06 |
| NPA-015 | DLin-MC3-DMA | 20 | 109 nm |
| | | | PDI: 0.07 |

TABLE 21
HEK293, 96-well, 60 ng Modified RNA/well

| Formulation | MFI mCherry |
|---|---|
| Untreated | 871.81 |
| NPA-001 | 6407.25 |
| NPA-002 | 14995 |
| NPA-003 | 29499.5 |
| NPA-005 | 3762 |
| NPA-006 | 2676 |
| NPA-007 | 9905.5 |
| NPA-008 | 1648.75 |
| NPA-009 | 2348.25 |
| NPA-010 | 4426.75 |
| NPA-012 | 11466 |
| NPA-013 | 2098.25 |
| NPA-014 | 3194.25 |
| NPA-015 | 14524 |

TABLE 22
HEK293, 62.5 ng/well

| Formulation | MFI mCherry |
|---|---|
| Untreated | 871.81 |
| NPA-001 | 6407.25 |
| NPA-002 | 14995 |
| NPA-003 | 29499.5 |
| NPA-005 | 3762 |
| NPA-006 | 2676 |
| NPA-007 | 9905.5 |
| NPA-008 | 1648.75 |
| NPA-009 | 2348.25 |
| NPA-010 | 4426.75 |
| NPA-012 | 11466 |
| NPA-013 | 2098.25 |
| NPA-014 | 3194.25 |
| NPA-015 | 14524 |

TABLE 23
HEK293, 62.5 ng/well

| Formulation | MFI mCherry |
|---|---|
| Untreated | 295 |
| NPA-007 | 3504 |
| NPA-012 | 8286 |
| NPA-017 | 6128 |
| NPA-003-2 | 17528 |
| NPA-018 | 34142 |
| NPA-010 | 1095 |
| NPA-015 | 5859 |
| NPA-019 | 3229 |

TABLE 24
HepG2, 62.5 ng/well

| Formulation | MFI mCherry |
|---|---|
| Untreated | 649.94 |
| NPA-001 | 6006.25 |
| NPA-002 | 8705 |
| NPA-002-2 | 15860.25 |
| NPA-003 | 15059.25 |
| NPA-003-2 | 28881 |
| NPA-005 | 1676 |
| NPA-006 | 1473 |
| NPA-007 | 15678 |
| NPA-008 | 2976.25 |
| NPA-009 | 961.75 |
| NPA-010 | 3301.75 |
| NPA-012 | 18333.25 |
| NPA-013 | 5853 |
| NPA-014 | 2257 |
| NPA-015 | 16225.75 |

TABLE 25
HepG2, 62.5 ng/well

| Formulation | MFI mCherry |
|---|---|
| Untreated control | 656 |
| NPA-007 | 16798 |
| NPA-012 | 21993 |
| NPA-017 | 20377 |
| NPA-003-2 | 35651 |
| NPA-018 | 40154 |
| NPA-010 | 2496 |
| NPA-015 | 19741 |
| NPA-019 | 16373 |

### Example 15. In Vivo Formulation Studies

[1189] Rodents (n=5) are administered intravenously, subcutaneously or intramuscularly a single dose of a formulation containing a modified mRNA and a lipid. The modified mRNA administered to the rodents is selected from G-CSF (mRNA sequence shown in SEQ ID NO: 251433; polyA tail of approximately 160 nucleotides not shown in sequence; 5′cap, Cap1), erythropoietin (EPO) (mRNA sequence shown in SEQ ID NO: 251436; polyA tail of approximately 160 nucleotides not shown in sequence; 5′cap, Cap1), Factor IX (mRNA sequence shown in SEQ ID NO: 251437; polyA tail of approximately 160 nucleotides not shown in sequence; 5′cap, Cap1) or mCherry (mRNA sequence shown in SEQ ID NO: 251434; polyA tail of approximately 160 nucleotides not shown in sequence; 5′cap, Cap1). The erythropoietin cDNA with the T7 promoter, 5′untranslated region (UTR) and 3′ UTR used in in vitro transcription (IVT) is given in SEQ ID NO: 251438 and SEQ ID NO: 251439.

[1190] Each formulation also contains a lipid which is selected from one of DLin-DMA, DLin-K-DMA, DLin-KC2-DMA, 98N12-5, C12-200, DLin-MC3-DMA, reLNP, ATUPLEX®, DACC and DBTC. The rodents are injected with 100 ug, 10 ug or 1 ug of the formulated modified mRNA and samples are collected at specified time intervals.

[1191] Serum from the rodents administered formulations containing human G-CSF modified mRNA are measured by specific G-CSF ELISA and serum from mice administered human factor IX modified RNA is analyzed by specific factor IX ELISA or chromogenic assay. The liver and spleen from the mice administered with mCherry modified mRNA are analyzed by immunohistochemistry (IHC) or fluorescence-activated cell sorting (FACS). As a control, a group of mice are not injected with any formulation and their serum and tissue are collected analyzed by ELISA, FACS and/or IHC.

### A. Time Course

[1192] The rodents are administered formulations containing at least one modified mRNA to study the time course of protein expression for the administered formulation. The rodents are bled at specified time intervals prior to and after administration of the modified mRNA formulations to determine protein expression and complete blood count. Samples are also collected from the site of administration of rodents administered modified mRNA formulations subcutaneously and intramuscularly to determine the protein expression in the tissue.

### B. Dose Response

[1193] The rodents are administered formulations containing at least one modified mRNA to determine dose response of each formulation. The rodents are bled at specified time intervals prior to and after administration of the modified mRNA formulations to determine protein expression and complete blood count. The rodents are also sacrificed to analyze the effect of the modified mRNA formulation on the internal tissue. Samples are also collected from the site of administration of rodents administered modified mRNA formulations subcutaneously and intramuscularly to determine the protein expression in the tissue.

### C. Toxicity

[1194] The rodents are administered formulations containing at least one modified mRNA to study toxicity of each formulation. The rodents are bled at specified time intervals prior to and after administration of the modified mRNA formulations to determine protein expression and complete blood count. The rodents are also sacrificed to analyze the effect of the modified mRNA formulation on the internal tissue. Samples are also collected from the site of administration of rodents administered modified mRNA formulations subcutaneously and intramuscularly to determine the protein expression in the tissue.

### Example 16. PLGA Microsphere Formulations

[1195] Optimization of parameters used in the formulation of PLGA microspheres may allow for tunable release rates and high encapsulation efficiencies while maintaining the integrity of the modified RNA encapsulated in the microspheres. Parameters such as, but not limited to, particle size, recovery rates and encapsulation efficiency may be optimized to achieve the optimal formulation.

### A. Synthesis of PLGA Microspheres

[1196] Polylacticglycolic acid (PLGA) microspheres were synthesized using the water/oil/water double emulsification methods known in the art using PLGA (Lactel, Cat #B6010-2, inherent viscosity 0.55-0.75, 50:50 LA:GA), polyvinylalcohol (PVA) (Sigma, Cat #348406-25G, MW 13-23 k) dichloromethane and water. Briefly, 0.1 ml of water (W1) was added to 2 ml of PLGA dissolved in dichloromethane (DCM) (01) at concentrations ranging from 50-200 mg/ml of PLGA. The W1/O1 emulsion was homogenized (IKA Ultra-Turrax Homogenizer, T18) for 30 seconds at speed 4 (˜15,000 rpm). The W1/O1 emulsion was then added to 100 to 200 ml of 0.3 to 1% PVA (W2) and homogenized for 1 minute at varied speeds. Formulations were left to stir for 3 hours and then washed by centrifugation (20-25 min, 4,000 rpm, 4° C.). The supernatant was discarded and the PLGA pellets were resuspended in 5-10 ml of water, which was repeated 2×. Average particle size (represents 20-30 particles) for each formulation was determined by microscopy after washing. Table 26 shows that an increase in the PLGA concentration led to larger sized microspheres. A PLGA concentration of 200 mg/ml gave an average particle size of 14.8 μm, 100 mg/mL was 8.7 μm, and 50 mg/mL of PLGA gave an average particle size of 4.0 μm.

TABLE 26
Varied PLGA Concentration

| | | PLGA | | PVA | | Average |
|---|---|---|---|---|---|---|
| Sample | O1 Volume | Concentration | W2 Volume | Concentration | | Size |
| ID | (mL) | (mg/mL) | (mL) | (%) | Speed | (μm) |
| 1 | 2 | 200 | 100 | 0.3 | 5 | 14.8 |
| 2 | 2 | 100 | 100 | 0.3 | 5 | 8.7 |
| 3 | 2 | 50 | 100 | 0.3 | 5 | 4.0 |

[1197] Table 27 shows that decreasing the homogenization speed from 5 (˜20,000 rpm) to speed 4 (˜15,000 rpm) led to an increase in particle size from 14.8 μm to 29.7 μm.

TABLE 27
Varied Homogenization Speed

| | | PLGA | | PVA | | Average |
|---|---|---|---|---|---|---|
| Sample | O1 Volume | Concentration | W2 Volume | Concentration | | Size |
| ID | (mL) | (mg/mL) | (mL) | (%) | Speed | (μm) |
| 1 | 2 | 200 | 100 | 0.3 | 5 | 14.8 |
| 4 | 2 | 200 | 100 | 0.3 | 4 | 29.7 |

[1198] Table 28 shows that increasing the W2 volume (i.e. increasing the ratio of W2:O1 from 50:1 to 100:1), decreased average particle size slightly. Altering the PVA concentration from 0.3 to 1 wt % had little impact on PLGA microsphere size.

TABLE 28
Varied W2 Volume and Concentration

| | O1 | PLGA | W2 | PVA | | Average |
|---|---|---|---|---|---|---|
| Sample | Volume | Concentration | Volume | Concentration | | Size |
| ID | (mL) | (mg/mL) | (mL) | (%) | Speed | (μm) |
| 1 | 2 | 200 | 100 | 0.3 | 5 | 14.8 |
| 5 | 2 | 200 | 200 | 0.3 | 5 | 11.7 |
| 6 | 2 | 200 | 190 | 0.3 | 5 | 11.4 |
| 7 | 2 | 200 | 190 | 1.0 | 5 | 12.3 |

B. Encapsulation of Modified mRNA

[1199] Modified G-CSF mRNA (mRNA sequence shown in SEQ ID NO: 251433; polyA tail of approximately 160 nucleotides not shown in sequence; 5′cap, Cap1; fully modified with 5-methylcytosine and pseudouridine) was dissolved in water at a concentration of 2 mg/ml (W3). Three batches of PLGA microsphere formulations were made as described above with the following parameters: 0.1 ml of W3 at 2 mg/ml, 1.6 ml of O1 at 200 mg/ml, 160 ml of W2 at 1%, and homogenized at a speed of 4 for the first emulsion (W3/O1) and homogenized at a speed of 5 for the second emulsion (W3/O1/W2). After washing by centrifugation, the formulations were frozen in liquid nitrogen and then lyophilized for 3 days. To test the encapsulation efficiency of the formulations, the lyophilized material was deformulated in DCM for 6 hours followed by an overnight extraction in water. The modified RNA concentration in the samples was then determined by OD260. Encapsulation efficiency was calculated by taking the actual amount of modified RNA and dividing by the starting amount of modified RNA. In the three batches tested, there was an encapsulation efficiency of 59.2, 49.8 and 61.3.

C. Integrity of modified mRNA encapsulated in PLGA microspheres

[1200] Modified Factor IX mRNA (mRNA sequence shown in SEQ ID NO: 251437; poly A tail of approximately 160 nucleotides not shown in sequence; 5′cap, Cap1; fully modified with 5-methylcytosine and pseudouridine) was dissolved in water at varied concentrations (W4) to vary the weight percent loading in the formulation (mg modified RNA/mg PLGA*100) and to determine encapsulation efficiency. The parameters in Table 29 were used to make four different batches of PLGA microsphere formulations with a homogenization speed of 4 for the first emulsion (W4/O1) and a homogenization speed of 5 for the second emulsion (W4/O1/W2).

TABLE 29
Factor IX PLGA Microsphere Formulation Parameters

| | W4 | Factor IX | Factor IX | O1 | PLGA | W2 | PVA | Weight % |
|---|---|---|---|---|---|---|---|---|
| | Vol. | Conc. | Amount | Vol. | Conc. | Vol. | Conc. | (wt %) |
| ID | (uL) | (mg/ml) | (ug) | (ml) | (mg/ml) | (ml) | (%) | Loading |
| A | 100 | 2.0 | 200.0 | 2.0 | 200 | 200 | 1.0 | 0.05 |
| B | 100 | 4.0 | 400.0 | 2.0 | 200 | 200 | 1.0 | 0.10 |
| C | 400 | 2.0 | 800.0 | 2.0 | 200 | 200 | 1.0 | 0.20 |
| D | 400 | 4.0 | 1600.0 | 2.0 | 200 | 200 | 1.0 | 0.40 |

[1201] After lyophilization, PLGA microspheres were weighed out in 2 ml eppendorf tubes to correspond to ˜10 ug of modified RNA. Lyophilization was found to not destroy the overall structure of the PLGA microspheres. To increase weight percent loading (wt %) for the PLGA microspheres, increasing amounts of modified RNA were added to the samples. PLGA microspheres were deformulated by adding 1.0 ml of DCM to each tube and then shaking the samples for 6 hours. For modified RNA extraction, 0.5 ml of water was added to each sample and the samples were shaken overnight before the concentration of modified RNA in the samples was determined by OD260. To determine the recovery of the extraction process, unformulated Factor IX modified RNA (mRNA sequence shown in SEQ ID NO: 251437; polyA tail of approximately 160 nucleotides not shown in sequence; 5′cap, Cap1; fully modified with 5-methylcytosine and pseudouridine) (deformulation control) was spiked into DCM and was subjected to the deformulation process. Table 30 shows the loading and encapsulation efficiency for the samples. All encapsulation efficiency samples were normalized to the deformulation control.

TABLE 30
Weight Percent Loading and Encapsulation Efficiency

| | Theoretical | Actual | |
|---|---|---|---|
| | modified RNA | modified RNA | Encapsulation |
| ID | loading (wt %) | loading (wt %) | Efficiency (%) |
| A | 0.05 | 0.06 | 97.1 |
| B | 0.10 | 0.10 | 85.7 |
| C | 0.20 | 0.18 | 77.6 |
| D | 0.40 | 0.31 | 68.1 |
| Control | — | — | 100.0 |

D. Release Study of Modified mRNA Encapsulated in PLGA Microspheres

[1202] PLGA microspheres formulated with Factor IX modified RNA (mRNA sequence shown in SEQ ID NO: 251437; polyA tail of approximately 160 nucleotides not shown in sequence; 5′cap, Cap1; fully modified with 5-methylcytosine and pseudouridine) were deformulated as described above and the integrity of the extracted modified RNA was determined by automated electrophoresis (Bio-Rad Experion). The extracted modified mRNA was compared against unformulated modified mRNA and the deformulation control in order to test the integrity of the encapsulated modified mRNA. As shown in FIG. 4, the majority of modRNA was intact for batch ID A, B, C and D, for the deformulated control (Deform control) and the unformulated control (Unform control).

E. Protein Expression of Modified mRNA Encapsulated in PLGA Microspheres

[1203] PLGA microspheres formulated with Factor IX modified RNA (mRNA sequence shown in SEQ ID NO: 251437; polyA tail of approximately 160 nucleotides not shown in sequence; 5′cap, Cap1; fully modified with 5-methylcytosine and pseudouridine) were deformulated as described above and the protein expression of the extracted modified RNA was determined by an in vitro transfection assay. HEK293 cells were reverse transfected with 250 ng of Factor IX modified RNA complexed with RNAiMAX (Invitrogen) in triplicate.

[1204] Factor IX modified RNA was diluted in nuclease-free water to a concentration of 25 ng/μl and RNAiMAX was diluted 13.3× in serum-free EMEM. Equal volumes of diluted modified RNA and diluted RNAiMAX were mixed together and were allowed to stand for 20 to 30 minutes at room temperature. Subsequently, 20 μl of the transfection mix containing 250 ng of Factor IX modified RNA was added to 80 μl of a cell suspension containing 30,000 cells. Cells were then incubated for 16 h in a humidified 37° C./5% CO2 cell culture incubator before harvesting the cell culture supernatant. Factor IX protein expression in the cell supernatant was analyzed by an ELISA kit specific for Factor IX (Molecular Innovations, Cat #HFIXKT-TOT) and the protein expression is shown in Table 31 and FIG. 5. In all PLGA microsphere batches tested, Factor IX modified RNA remained active and expressed Factor IX protein after formulation in PLGA microspheres and subsequent deformulation.

TABLE 31
Protein Expression

| | Factor IX Protein |
|---|---|
| Sample | Expression (ng/ml) |
| Batch A | 0.83 |
| Batch B | 1.83 |
| Batch C | 1.54 |
| Batch D | 2.52 |
| Deformulated Control | 4.34 |
| Unformulated Control | 3.35 |

F. Release Study of Modified mRNA Encapsulated in PLGA Microspheres

[1205] PLGA microspheres formulated with Factor IX modified RNA (mRNA sequence shown in SEQ ID NO: 251437; polyA tail of approximately 160 nucleotides not shown in sequence; 5′cap, Cap1; fully modified with 5-methylcytosine and pseudouridine) were resuspended in water to a PLGA microsphere concentration of 24 mg/ml. After resuspension, 150 ul of the PLGA microsphere suspension was aliquoted into eppendorf tubes. Samples were kept incubating and shaking at 37° C. during the course of the study. Triplicate samples were pulled at 0.2, 1, 2, 8, 14, and 21 days. To determine the amount of modified RNA released from the PLGA microspheres, samples were centrifuged, the supernatant was removed, and the modified RNA concentration in the supernatant was determined by OD 260. The percent release, shown in Table 32, was calculated based on the total amount of modified RNA in each sample. After 31 days, 96% of the Factor IX modified RNA was released from the PLGA microsphere formulations.

TABLE 32
Percent Release

| Time (days) | % Release |
|---|---|
| 0 | 0.0 |
| 0.2 | 27.0 |
| 1 | 37.7 |
| 2 | 45.3 |
| 4 | 50.9 |
| 8 | 57.0 |
| 14 | 61.8 |
| 21 | 75.5 |
| 31 | 96.4 |

### G. Particle Size Reproducibility of PLGA Microspheres

[1206] Three batches of Factor IX modified RNA (mRNA sequence shown in SEQ ID NO: 251437; polyA tail of approximately 160 nucleotides not shown in sequence; 5′cap, Cap1; fully modified with 5-methylcytosine and pseudouridine) PLGA microspheres were made using the same conditions described for Batch D, shown in Table 29, (0.4 ml of W4 at 4 mg/ml, 2.0 ml of O1 at 200 mg/ml, 200 ml of W2 at 1%, and homogenized at a speed of 5 for the W4/O1/W2 emulsion). To improve the homogeneity of the PLGA microsphere suspension, filtration was incorporated prior to centrifugation. After stirring for 3 hours and before centrifuging, all formulated material was passed through a 100 μm nylon mesh strainer (Fisherbrand Cell Strainer, Cat #22-363-549) to remove larger aggregates. After washing and resuspension with water, 100-200 μl of a PLGA microspheres sample was used to measure particle size of the formulations by laser diffraction (Malvern Mastersizer2000). The particle size of the samples is shown in Table 33.

TABLE 33
Particle Size Summary

| | | | | Volume | |
|---|---|---|---|---|---|
| | | | | Weighted | |
| ID | D10 (μm) | D50 (μm) | D90 (μm) | Mean (um) | Filtration |
| Control | 19.2 | 62.5 | 722.4 | 223.1 | No |
| A | 9.8 | 31.6 | 65.5 | 35.2 | Yes |
| B | 10.5 | 32.3 | 66.9 | 36.1 | Yes |
| C | 10.8 | 35.7 | 79.8 | 41.4 | Yes |

[1207] Results of the 3 PLGA microsphere batches using filtration were compared to a PLGA microsphere batch made under the same conditions without filtration. The inclusion of a filtration step before washing reduced the mean particle size and demonstrated a consistent particle size distribution between 3 PLGA microsphere batches.

### H. Serum Stability of Factor IX PLGA Microspheres

[1208] Factor IX mRNA RNA (mRNA sequence shown in SEQ ID NO: 251437; polyA tail of approximately 160 nucleotides not shown in sequence; 5′cap, Cap1; fully modified with 5-methylcytosine and pseudouridine) in buffer (TE) or 90% serum (Se), or Factor IX mRNA in PLGA in buffer, 90% serum or 1% serum was incubated in buffer, 90% serum or 1% serum at an mRNA concentration of 50 ng/ul in a total volume of 70 ul. The samples were removed at 0, 30, 60 or 120 minutes. RNases were inactivated with proteinase K digestion for 20 minutes at 55° C. by adding 25 μl of 4× proteinase K buffer (0.4 ml 1M TRIS-HCl pH 7.5, 0.1 ml 0.5M EDTA, 0.12 ml 5M NaCl, and 0.4 ml 10% SDS) and 8 ul of proteinase K at 20 mg/ml. The Factor IX mRNA was precipitated (add 250 μl 95% ethanol for 1 hour, centrifuge for 10 min at 13 k rpm and remove supernatant, add 200 μl 70% ethanol to the pellet, centrifuge again for 5 min at 13 k rpm and remove supernatant and resuspend the pellet in 70 ul water) or extracted from PLGA microspheres (centrifuge 5 min at 13 k rpm and remove supernatant, wash pellet with 1 ml water, centrifuge 5 min at 13 k rpm and remove supernatant, add 280 μl dichloromethane to the pellet and shake for 15 minutes, add 70 μl water and then shake for 2 hours and remove the aqueous phase) before being analyzed by bioanalyzer. PLGA microspheres protect Factor IX modified mRNA from degradation in 90% and 1% serum over 2 hours. Factor IX modified mRNA completely degrades in 90% serum at the initial time point.

### Example 17. Lipid Nanoparticle In Vivo Studies

[1209] G-CSF (cDNA with the T7 promoter, 5′ Untranslated region (UTR) and 3′UTR used in in vitro transcription is given in SEQ ID NO: 251432. mRNA sequence shown in SEQ ID NO: 251433; polyA tail of approximately 160 nucleotides not shown in sequence; 5′cap, Cap 1; fully modified with 5-methylcytosine and pseudouridine) and Factor IX (cDNA with the T7 promoter, 5′ UTR and 3′UTR used in in vitro transcription is given in SEQ ID NO: 251440. mRNA sequence shown in SEQ ID NO: 251437; polyA tail of approximately 160 nucleotides not shown in sequence; 5′cap, Cap 1; fully modified with 5-methylcytosine and pseudouridine) modified mRNA were formulated as lipid nanoparticles (LNPs) using the syringe pump method. The LNPs were formulated at a 20:1 weight ratio of total lipid to modified mRNA with a final lipid molar ratio of 50:10:38.5:1.5 (DLin-KC2-DMA:DSPC:Cholesterol:PEG-c-DOMG). Formulations, listed in Table 34, were characterized by particle size, zeta potential, and encapsulation.

TABLE 34
Formulations

| Formulation # | NPA-029-1 | NPA-030-1 |
|---|---|---|
| Modified mRNA | Factor IX | G-CSF |
| Mean size | 91 nm | 106 nm |
| | PDI: 0.04 | PDI: 0.06 |
| Zeta at pH 7.4 | 1.8 mV | 0.9 mV |
| Encaps. (RiboGr) | 92% | 100% |

[1210] LNP formulations were administered to mice (n=5) intravenously at a modified mRNA dose of 100, 10, or 1 ug. Mice were sacrificed at 8 hrs after dosing. Serum was collected by cardiac puncture from mice that were administered with G-CSF or Factor IX modified mRNA formulations. Protein expression was determined by ELISA.

[1211] There was no significant body weight loss (<5%) in the G-CSF or Factor IX dose groups. Protein expression for G-CSF or Factor IX dose groups was determined by ELISA from a standard curve. Serum samples were diluted (about 20-2500× for G-CSF and about 10-250× for Factor IX) to ensure samples were within the linear range of the standard curve. As shown in Table 35, G-CSF protein expression determined by ELISA was approximately 17, 1200, and 4700 ng/ml for the 1, 10, and 100 ug dose groups, respectively. As shown in Table 36, Factor IX protein expression determined by ELISA was approximately 36, 380, and 3000-11000 ng/ml for the 1, 10, and 100 ug dose groups, respectively.

TABLE 35
G-CSF Protein Expression

| Dose (ug) | Conc (ng/ml) | Dilution Factor | Sample Volume |
|---|---|---|---|
| 1 | 17.73 | 20x | 5 ul |
| 10 | 1204.82 | 2500x | 0.04 ul |
| 100 | 4722.20 | 2500x | 0.04 ul |

TABLE 36
Factor IX Protein Expression

| Dose (ug) | Conc (ng/ml) | Dilution Factor | Sample Volume |
|---|---|---|---|
| 1 | 36.05 | 10x | 5 ul |
| 10 | 383.04 | 10x | 5 ul |
| 100* | 3247.75 | 50x | 1 ul |
| 100* | 11177.20 | 250x | 0.2 ul |

[1212] As shown in Table 37, the LNP formulations described above have about a 10,000-100,000-fold increase in protein production compared to an administration of an intravenous (IV)-lipoplex formulation for the same dosage of modified mRNA and intramuscular (IM) or subcutaneous (SC) administration of the same dose of modified mRNA in saline. As used in Table 37, the symbol “˜” means about.

TABLE 37
Protein Production

| | | Serum Concentration (pg/ml) |
|---|---|---|
| G-CSF | Dose (ug) | 8-12 hours after administration |
| IM | 100 | ~20-80 |
| SC | 100 | ~10-40 |
| IV (Lipoplex) | 100 | ~30 |
| IV (LNP) | 100 | ~5,000,000 |
| IV (LNP) | 10 | ~1,000,000 |
| IV (LNP) | 1 | ~20,000 |

| | | Serum Concentration (ng/ml) | |
|---|---|---|---|
| Factor IX | Dose (ug) | 8-12 hours after administration | |
| IM | 2 × 100 | ~1.6 | ng/ml |
| IV (LNP) | 100 | ~3,000-10,000 | ng/ml |
| IV (LNP) | 10 | ~400 | ng/ml |
| IV (LNP) | 1 | ~40 | ng/ml |

### Materials and Methods for Examples 18-23

[1213] G-CSF (mRNA sequence shown in SEQ ID NO: 251433; polyA tail of approximately 160 nucleotides not shown in sequence; 5′cap, Cap 1; fully modified with 5-methylcytosine and pseudouridine) and EPO (mRNA sequence shown in SEQ ID NO: 251436; polyA tail of approximately 160 nucleotides not shown in sequence; 5′cap, Cap 1; fully modified with 5-methylcytosine and pseudouridine) modified mRNA were formulated as lipid nanoparticles (LNPs) using the syringe pump method. The LNPs were formulated at a 20:1 weight ratio of total lipid to modified mRNA with a final lipid molar ratio of 50:10:38.5:1.5 (DLin-KC2-DMA:DSPC:Cholesterol:PEG-c-DOMG). Formulations, listed in Table 38, were characterized by particle size, zeta potential, and encapsulation.

TABLE 38
Formulations

| Formulation # | NPA-030-2 | NPA-060-1 |
|---|---|---|
| Modified mRNA | G-CSF | EPO |
| Mean size | 84 nm | 85 nm |
| | PDI: 0.04 | PDI: 0.03 |
| Zeta at pH 7.4 | 0.8 mV | 1.5 mV |
| Encapsulation | 95% | 98% |
| (RiboGreen) | | |

### Example 18. Lipid Nanoparticle In Vivo Studies with Modified mRNA

[1214] LNP formulations, shown in Table 38 (above), were administered to rats (n=5) intravenously (IV), intramuscularly (IM) or subcutaneously (SC) at a single modified mRNA dose of 0.05 mg/kg. A control group of rats (n=4) was untreated. The rats were bled at 2 hours, 8 hours, 24 hours, 48 hours and 96 hours and after they were administered with G-CSF or EPO modified mRNA formulations to determine protein expression using ELISA. The rats administered EPO modified mRNA intravenously were also bled at 7 days.

[1215] As shown in Table 39, EPO protein expression in the rats intravenously administered modified EPO mRNA was detectable out to 5 days. G-CSF in the rats intravenously administered modified G-CSF mRNA was detectable to 7 days. Subcutaneous and intramuscular administration of EPO modified mRNA was detectable to at least 24 hours and G-CSF modified mRNA was detectable to at least 8 hours. In Table 39, “OSC” refers to values that were outside the standard curve and “NT” means not tested.

TABLE 39
G-CSF and EPO Protein Expression

| | | | EPO Serum | G-CSF Serum |
|---|---|---|---|---|
| | | | Concentration | Concentration |
| Route | Time | | (pg/ml) | (pg/ml) |
| IV | 2 | hours | 36,981.0 | 31,331.9 |
| IV | 8 | hours | 62,053.3 | 70,532.4 |
| IV | 24 | hours | 42,077.0 | 5,738.6 |
| IV | 48 | hours | 5,561.5 | 233.8 |
| IV | 5 | days | 0.0 | 60.4 |
| IV | 7 | days | 0.0 | NT |
| IM | 2 | hours | 1395.4 | 1620.4 |
| IM | 8 | hours | 8974.6 | 7910.4 |
| IM | 24 | hours | 4678.3 | 893.3 |
| IM | 48 | hours | NT | OSC |
| IM | 5 | days | NT | OSC |
| SC | 2 | hours | 386.2 | 80.3 |
| SC | 8 | hours | 985.6 | 164.2 |
| SC | 24 | hours | 544.2 | OSC |
| SC | 48 | hours | NT | OSC |
| SC | 5 | days | NT | OSC |

| | | | |
|---|---|---|---|
| Untreated | All bleeds | 0 | 0 |

### Example 19. Time Course In Vivo Study

[1216] LNP formulations, shown in Table 38 (above), were administered to mice (n=5) intravenously (IV) at a single modified mRNA dose of 0.5, 0.05 or 0.005 mg/kg. The mice were bled at 8 hours, 24 hours, 72 hours and 6 days after they were administered with G-CSF or EPO modified mRNA formulations to determine protein expression using ELISA.

[1217] As shown in Table 40, EPO and G-CSF protein expression in the mice administered with the modified mRNA intravenously was detectable out to 72 hours for the mice dosed with 0.005 mg/kg and 0.05 mg/kg of modified mRNA and out to 6 days for the mice administered the EPO modified mRNA. In Table 40, “>” means greater than and “ND” means not detected.

TABLE 40
Protein Expression

| | | | EPO Serum | G-CSF Serum |
|---|---|---|---|---|
| | | | Concentration | Concentration |
| Dose (mg/kg) | Time | | (pg/ml) | (pg/ml) |
| 0.005 | 8 | hours | 12,508.3 | 11,550.6 |
| 0.005 | 24 | hours | 6,803.0 | 5,068.9 |
| 0.005 | 72 | hours | ND | ND |
| 0.005 | 6 | days | ND | ND |
| 0.05 | 8 | hours | 92,139.9 | 462,312.5 |
| 0.05 | 24 | hours | 54,389.4 | 80,903.8 |
| 0.05 | 72 | hours | ND | ND |
| 0.05 | 6 | days | ND | ND |
| 0.5 | 8 | hours | 498,515.3 | >1,250,000 |
| 0.5 | 24 | hours | 160,566.3 | 495,812.5 |
| 0.5 | 72 | hours | 3,492.5 | 1,325.6 |
| 0.5 | 6 | days | 21.2 | ND |

### Example 20. LNP Formulations In Vivo Study in Rodents

### A. LNP Formulations in Mice

[1218] LNP formulations, shown in Table 38 (above), were administered to mice (n=4) intravenously (IV) at a single modified mRNA dose 0.05 mg/kg or 0.005 mg/kg. There was also 3 control groups of mice (n=4) that were untreated. The mice were bled at 2 hours, 8 hours, 24 hours, 48 hours and 72 hours after they were administered with G-CSF or EPO modified mRNA formulations to determine the protein expression. Protein expression of G-CSF and EPO were determined using ELISA.

[1219] As shown in Table 41, EPO and G-CSF protein expression in the mice was detectable at least out to 48 hours for the mice that received a dose of 0.005 mg/kg modified RNA and 72 hours for the mice that received a dose of 0.05 mg/kg modified RNA. In Table 41, “OSC” refers to values that were outside the standard curve and “NT” means not tested.

TABLE 41
Protein Expression in Mice

| | | | EPO Serum | G-CSF Serum |
|---|---|---|---|---|
| | | | Concentration | Concentration |
| Dose (mg/kg) | Time | | (pg/ml) | (pg/ml) |
| 0.005 | 2 | hours | OSC | 3,447.8 |
| 0.005 | 8 | hours | 1,632.8 | 11,454.0 |
| 0.005 | 24 | hours | 1,141.0 | 4,960.2 |
| 0.005 | 48 | hours | 137.4 | 686.4 |
| 0.005 | 72 | hours | 0 | NT |
| 0.05 | 2 | hours | 10,027.3 | 20,951.4 |
| 0.05 | 8 | hours | 56,547.2 | 70,012.8 |
| 0.05 | 24 | hours | 25,027.3 | 19,356.2 |
| 0.05 | 48 | hours | 1,432.3 | 1,963.0 |
| 0.05 | 72 | hours | 82.2 | 47.3 |

### B. LNP Formulations in Rodents

[1220] LNP formulations, shown in Table 38 (above), are administered to rats (n=4) intravenously (IV) at a single modified mRNA dose 0.05 mg/kg. There is also a control group of rats (n=4) that are untreated. The rats are bled at 2 hours, 8 hours, 24 hours, 48 hours, 72 hours, 7 days and 14 days after they were administered with G-CSF or EPO modified mRNA formulations to determine the protein expression. Protein expression of G-CSF and EPO are determined using ELISA.

### Example 21. Early Time Course Study of LNPs

[1221] LNP formulations, shown in Table 38 (above), are administered to mammals intravenously (IV), intramuscularly (IM) or subcutaneously (SC) at a single modified mRNA dose of 0.5 mg/kg, 0.05 mg/kg or 0.005 mg/kg. A control group of mammals are not treated. The mammals are bled at 5 minutes, 10 minutes, 20 minutes, 30 minutes, 45 minutes, 1 hour, 1.5 hours and/or 2 hours after they are administered with the modified mRNA LNP formulations to determine protein expression using ELISA. The mammals are also bled to determine the complete blood count such as the granulocyte levels and red blood cell count.

### Example 22. Non-Human Primate In Vivo Study

[1222] LNP formulations, shown in Table 38 (above), were administered to non-human primates (NHP) (cynomolgus monkey) (n=2) as a bolus intravenous injection (IV) over approximately 30 seconds using a hypodermic needle, which may be attached to a syringe/abbocath or butterfly if needed. The NHP were administered a single modified mRNA IV dose of 0.05 mg/kg of EPO or G-CSF or 0.005 mg/kg of EPO in a dose volume of 0.5 mL/kg. The NHPs were bled 5-6 days before dosing with the modified mRNA LNP formulations to determine protein expression in the serum and a baseline complete blood count. After administration with the modified mRNA formulation the NHP were bled at 8, 24, 48 and 72 hours to determined protein expression. At 24 and 72 hours after administration the complete blood count of the NHP was also determined. Protein expression of G-CSF and EPO was determined by ELISA. Urine from the NHPs was collected over the course of the entire experiment and analyzed to evaluate clinical safety. Samples were collected from the NHPs after they were administered with G-CSF or EPO modified mRNA formulations to determine protein expression using ELISA. Clinical chemistry, hematology, urinalysis and cytokines of the non-human primates were also analyzed.

[1223] As shown in Table 42, EPO protein expression in the NHPs administered 0.05 mg/kg is detectable out to 72 hours and the 0.005 mg/kg dosing of the EPO formulation is detectable out to 48 hours. In Table 42, the “<” means less than a given value. G-CSF protein expression was seen out to 24 hours after administration with the modified mRNA formulation. Preliminarily, there was an increase in granulocytes and reticulocytes levels seen in the NHP after administration with the modified mRNA formulations.

TABLE 42
Protein Expression in Non-Human Primates

| | | | Female NHP | Male NHP | Average |
|---|---|---|---|---|---|
| | | | Serum | Serum | Serum |
| | | | Concen- | Concen- | Conen- |
| Modified | Dose | | tration | tration | tration |
| mRNA | (mg/kg) | Time | (pg/ml) | (pg/ml) | (pg/ml) |
| G-CSF | 0.05 | Pre-bleed | 0 | 0 | 0 |
| | | 8 hours | 3289 | 1722 | 2,506 |
| | | 24 hours | 722 | 307 | 515 |
| | | 48 hours | 0 | 0 | 0 |
| | | 72 hours | 0 | 0 | 0 |
| EPO | 0.05 | Pre-bleed | 0 | 0 | 0 |
| | | 8 hours | 19,858 | 7,072 | 13,465 |
| | | 24 hours | 18,178 | 4,913 | 11,546 |
| | | 48 hours | 5,291 | 498 | 2,895 |
| | | 72 hours | 744 | 60 | 402 |
| EPO | 0.005 | Pre-bleed | 0 | 0 | 0 |
| | | 8 hours | 523 | 250 | 387 |
| | | 24 hours | 302 | 113 | 208 |
| | | 48 hours | <7.8 | <7.8 | <7.8 |
| | | 72 hours | 0 | 0 | 0 |

### Example 23. Non-Human Primate In Vivo Study for G-CSF and EPO

[1224] LNP formulations, shown in Table 38 (above), were administered to non-human primates (NHP) (cynomolgus monkey) (n=2) as intravenous injection (IV). The NHP were administered a single modified mRNA IV dose of 0.5 mg/kg, 0.05 mg/kg or 0.005 mg/kg of G-CSF or EPO in a dose volume of 0.5 mL/kg. The NHPs were bled before dosing with the modified mRNA LNP formulations to determine protein expression in the serum and a baseline complete blood count. After administration with the G-CSF modified mRNA formulation the NHP were bled at 8, 24, 48 and 72 hours to determined protein expression. After administration with the EPO modified mRNA formulation the NHP were bled at 8, 24, 48, 72 hours and 7 days to determined protein expression.

[1225] Samples collected from the NHPs after they were administered with G-CSF or EPO modified mRNA formulations were analyzed by ELISA to determine protein expression. Neutrophil and reticulocyte count was also determined pre-dose, 24 hours, 3 days, 7 days, 14 days and 18 days after administration of the modified G-CSF or EPO formulation.

[1226] As shown in Table 43, G-CSF protein expression was not detected beyond 72 hours. In Table 43, “<39” refers to a value below the lower limit of detection of 39 pg/ml.

TABLE 43
G-CSF Protein Expression

| | | | Female NHP | Male NHP |
|---|---|---|---|---|
| | | | Serum G-CSF | Serum G-CSF |
| Modified | Dose | | Concentration | Concentration |
| mRNA | (mg/kg) | Time | (pg/ml) | (pg/ml) |
| G-CSF | 0.5 | Pre-bleed | <39 | <39 |
| | | 8 hours | 43,525 | 43,594 |
| | | 24 hours | 11,374 | 3,628 |
| | | 48 hours | 1,100 | 833 |
| | | 72 hours | <39 | 306 |
| G-CSF | 0.05 | Pre-bleed | <39 | <39 |
| | | 8 hours | 3,289 | 1,722 |
| | | 24 hours | 722 | 307 |
| | | 48 hours | <39 | <39 |
| | | 72 hours | <39 | <39 |
| G-CSF | 0.005 | Pre-bleed | <39 | <39 |
| | | 8 hours | 559 | 700 |
| | | 24 hours | 155 | <39 |
| | | 48 hours | <39 | <39 |
| | | 72 hours | <39 | <39 |

[1227] As shown in Table 44, EPO protein expression was not detected beyond 7 days. In Table 44, “<7.8” refers to a value below the lower limit of detection of 7.8 pg/ml.

TABLE 44
EPO Protein Expression

| | | | Female NHP | Male NHP |
|---|---|---|---|---|
| | | | Serum EPO | Serum EPO |
| Modified | Dose | | Concentration | Concentration |
| mRNA | (mg/kg) | Time | (pg/ml) | (pg/ml) |
| EPO | 0.5 | Pre-bleed | <7.8 | <7.8 |

| | | | |
|---|---|---|---|
| 8 | hours | 158,771 | 119,086 |
| 24 | hours | 133,978 | 85,825 |
| 48 | hours | 45,250 | 64,793 |
| 72 | hours | 15,097 | 20,407 |
| 7 | days | <7.8 | <7.8 |

| | | | | |
|---|---|---|---|---|
| EPO | 0.05 | Pre-bleed | <7.8 | <7.8 |

| | | | |
|---|---|---|---|
| 8 | hours | 19,858 | 7,072 |
| 24 | hours | 18,187 | 4,913 |
| 48 | hours | 5,291 | 498 |
| 72 | hours | 744 | 60 |
| 7 | days | <7.8 | <7.8 |

| | | | | |
|---|---|---|---|---|
| EPO | 0.005 | Pre-bleed | <7.8 | <7.8 |

| | | | |
|---|---|---|---|
| 8 | hours | 523 | 250 |
| 24 | hours | 302 | 113 |
| 48 | hours | 11 | 29 |
| 72 | hours | <7.8 | <7.8 |
| 7 | days | <7.8 | <7.8 |

[1228] As shown in Table 45, there was an increase in neutrophils in all G-CSF groups relative to pre-dose levels.

TABLE 45
Pharmacologic Effect of G-CSF mRNA in NHP

| | | | Male NHP | Female NHP | Male NHP | Female NHP |
|---|---|---|---|---|---|---|
| | | | (G-CSF) | (G-CSF) | (EPO) | (EPO) |
| Dose | | | Neutrophils | Neutrophils | Neutrophils | Neutrophils |
| (mg/kg) | Time | | (10⁹/L) | (10⁹/L) | (10⁹/L) | (10⁹/L) |
| 0.5 | Pre-dose | | 1.53 | 1.27 | 9.72 | 1.82 |
| | 24 | hours | 14.92 | 13.96 | 7.5 | 11.85 |
| | 3 | days | 9.76 | 13.7 | 11.07 | 5.22 |
| | 7 | days | 2.74 | 3.81 | 11.8 | 2.85 |
| | 14/18 | days | 2.58 | 1.98 | 7.16 | 2.36 |
| 0.05 | Pre-dose | | 13.74 | 3.05 | 0.97 | 2.15 |
| | 24 | hours | 19.92 | 29.91 | 2.51 | 2.63 |
| | 3 | days | 7.49 | 10.77 | 1.73 | 4.08 |
| | 7 | days | 4.13 | 3.8 | 1.23 | 2.77 |
| | 14/18 | days | 3.59 | 1.82 | 1.53 | 1.27 |
| 0.005 | Pre-dose | | 1.52 | 2.54 | 5.46 | 5.96 |
| | 24 | hours | 16.44 | 8.6 | 5.37 | 2.59 |
| | 3 | days | 3.74 | 1.78 | 6.08 | 2.83 |
| | 7 | days | 7.28 | 2.27 | 3.51 | 2.23 |
| | 14/18 | days | 4.31 | 2.28 | 1.52 | 2.54 |

[1229] As shown in Table 46, there was an increase in reticulocytes in all EPO groups 3 days to 14/18 days after dosing relative to reticulocyte levels 24 hours after dosing.

TABLE 46
Pharmacologic Effect of EPO mRNA on Neutrophil Count

| | | | Male NHP | Female NHP | Male NHP | Female NHP |
|---|---|---|---|---|---|---|
| | | | (G-CSF) | (G-CSF) | (EPO) | (EPO) |
| Dose | | | Neutrophils | Neutrophils | Neutrophils | Neutrophils |
| (mg/kg) | Time | | (10¹²/L) | (10¹²/L) | (10¹²/L) | (10¹²/L) |
| 0.5 | Pre-dose | | 0.067 | 0.055 | 0.107 | 0.06 |
| | 24 | hours | 0.032 | 0.046 | 0.049 | 0.045 |
| | 3 | days | 0.041 | 0.017 | 0.09 | 0.064 |
| | 7 | days | 0.009 | 0.021 | 0.35 | 0.367 |
| | 14/18 | days | 0.029 | 0.071 | 0.066 | 0.071 |
| 0.05 | Pre-dose | | 0.055 | 0.049 | 0.054 | 0.032 |
| | 24 | hours | 0.048 | 0.046 | 0.071 | 0.04 |
| | 3 | days | 0.101 | 0.061 | 0.102 | 0.105 |
| | 7 | days | 0.157 | 0.094 | 0.15 | 0.241 |
| | 14/18 | days | 0.107 | 0.06 | 0.067 | 0.055 |
| 0.005 | Pre-dose | | 0.037 | 0.06 | 0.036 | 0.052 |
| | 24 | hours | 0.037 | 0.07 | 0.034 | 0.061 |
| | 3 | days | 0.037 | 0.054 | 0.079 | 0.118 |
| | 7 | days | 0.046 | 0.066 | 0.049 | 0.087 |
| | 14/18 | days | 0.069 | 0.057 | 0.037 | 0.06 |

[1230] As shown in Tables 47-49, the administration of EPO modified RNA had an effect on other erythropoetic parameters including hemoglobin (HGB), hematocrit (HCT) and red blood cell (RBC) count.

TABLE 47
Pharmacologic Effect of EPO mRNA on Hemoglobin

| Dose | | | Male NHP (G- | Female NHP (G- | Male NHP (EPO) | Female NHP (EPO) |
|---|---|---|---|---|---|---|
| (mg/kg) | Time | | CSF) HGB (g/L) | CSF) HGB (g/L) | HGB (g/L) | HGB (g/L) |
| 0.5 | Pre-dose | | 133 | 129 | 134 | 123 |
| | 24 | hours | 113 | 112 | 127 | 108 |
| | 3 | days | 118 | 114 | 126 | 120 |
| | 7 | days | 115 | 116 | 140 | 134 |
| | 14/18 | days | 98 | 113 | 146 | 133 |
| 0.05 | Pre-dose | | 137 | 129 | 133 | 133 |
| | 24 | hours | 122 | 117 | 123 | 116 |
| | 3 | days | 126 | 115 | 116 | 120 |
| | 7 | days | 126 | 116 | 126 | 121 |
| | 14/18 | days | 134 | 123 | 133 | 129 |
| 0.005 | Pre-dose | | 128 | 129 | 132 | 136 |
| | 24 | hours | 117 | 127 | 122 | 128 |
| | 3 | days | 116 | 127 | 125 | 130 |
| | 7 | days | 116 | 129 | 119 | 127 |
| | 14/18 | days | 118 | 129 | 128 | 129 |

TABLE 48
Pharmacologic Effect of EPO mRNA on Hematocrit

| Dose | | | Male NHP (G- | Female NHP (G- | Male NHP (EPO) | Female NHP (EPO) |
|---|---|---|---|---|---|---|
| (mg/kg) | Time | | CSF) HCT (L/L) | CSF) HCT (L/L) | HCT (L/L) | HCT (L/L) |
| 0.5 | Pre-dose | | 0.46 | 0.43 | 0.44 | 0.4 |
| | 24 | hours | 0.37 | 0.38 | 0.4 | 0.36 |
| | 3 | days | 0.39 | 0.38 | 0.41 | 0.39 |
| | 7 | days | 0.39 | 0.38 | 0.45 | 0.45 |
| | 14/18 | days | 0.34 | 0.37 | 0.48 | 0.46 |
| 0.05 | Pre-dose | | 0.44 | 0.44 | 0.45 | 0.43 |
| | 24 | hours | 0.39 | 0.4 | 0.43 | 0.39 |
| | 3 | days | 0.41 | 0.39 | 0.38 | 0.4 |
| | 7 | days | 0.42 | 0.4 | 0.45 | 0.41 |
| | 14/18 | days | 0.44 | 0.4 | 0.46 | 0.43 |
| 0.005 | Pre-dose | | 0.42 | 0.42 | 0.48 | 0.45 |
| | 24 | hours | 0.4 | 0.42 | 0.42 | 0.43 |
| | 3 | days | 0.4 | 0.41 | 0.44 | 0.42 |
| | 7 | days | 0.39 | 0.42 | 0.41 | 0.42 |
| | 14/18 | days | 0.41 | 0.42 | 0.42 | 0.42 |

TABLE 49
Pharmacologic Effect of EPO mRNA on Red Blood Cells

| | | | Male NHP (G- | Female NHP (G- | | |
|---|---|---|---|---|---|---|
| Dose | | | CSF) RBC | CSF) RBC | Male NHP (EPO) | Female NHP (EPO) |
| (mg/kg) | Time | | (10¹²/L) | (10¹²/L) | RBC (10¹²/L) | RBC (10¹²/L) |
| 0.5 | Pre-dose | | 5.57 | 5.57 | 5.43 | 5.26 |
| | 24 | hours | 4.66 | 4.96 | 5.12 | 4.69 |
| | 3 | days | 4.91 | 4.97 | 5.13 | 5.15 |
| | 7 | days | 4.8 | 5.04 | 5.55 | 5.68 |
| | 14/18 | days | 4.21 | 4.92 | 5.83 | 5.72 |
| 0.05 | Pre-dose | | 5.68 | 5.64 | 5.57 | 5.84 |
| | 24 | hours | 4.96 | 5.08 | 5.25 | 5.18 |
| | 3 | days | 5.13 | 5.04 | 4.81 | 5.16 |
| | 7 | days | 5.17 | 5.05 | 5.37 | 5.31 |
| | 14/18 | days | 5.43 | 5.26 | 5.57 | 5.57 |
| 0.005 | Pre-dose | | 5.67 | 5.36 | 6.15 | 5.72 |
| | 24 | hours | 5.34 | 5.35 | 5.63 | 5.35 |
| | 3 | days | 5.32 | 5.24 | 5.77 | 5.42 |
| | 7 | days | 5.25 | 5.34 | 5.49 | 5.35 |
| | 14/18 | days | 5.37 | 5.34 | 5.67 | 5.36 |

[1231] As shown in Tables 50 and 51, the administration of modified RNA had an effect on serum chemistry parameters including alanine transaminase (ALT) and aspartate transaminase (AST).

TABLE 50
Pharmacologic Effect of EPO mRNA on Alanine Transaminase

| Dose | | | Male NHP (G- | Female NHP (G- | Male NHP (EPO) | Female NHP (EPO) |
|---|---|---|---|---|---|---|
| (mg/kg) | Time | | CSF) ALT (U/L) | CSF) ALT (U/L) | ALT (U/L) | ALT (U/L) |
| 0.5 | Pre-dose | | 29 | 216 | 50 | 31 |
| | 2 | days | 63 | 209 | 98 | 77 |
| | 4 | days | 70 | 98 | 94 | 87 |
| | 7 | days | 41 | 149 | 60 | 59 |
| | 14 | days | 43 | 145 | 88 | 44 |
| 0.05 | Pre-dose | | 58 | 53 | 56 | 160 |
| | 2 | days | 82 | 39 | 95 | 254 |
| | 4 | days | 88 | 56 | 70 | 200 |
| | 7 | days | 73 | 73 | 64 | 187 |
| | 14 | days | 50 | 31 | 29 | 216 |
| 0.005 | Pre-dose | | 43 | 51 | 45 | 45 |
| | 2 | days | 39 | 32 | 62 | 48 |
| | 4 | days | 48 | 58 | 48 | 50 |
| | 7 | days | 29 | 55 | 21 | 48 |
| | 14 | days | 44 | 46 | 43 | 51 |

TABLE 51
Pharmacologic Effect of EPO mRNA on Aspartate Transaminase

| Dose | | | Male NHP (G- | Female NHP (G- | Male NHP (EPO) | Female NHP (EPO) |
|---|---|---|---|---|---|---|
| (mg/kg) | Time | | CSF) AST (U/L) | CSF) AST (U/L) | AST (U/L) | AST (U/L) |
| 0.5 | Pre-dose | | 32 | 47 | 59 | 20 |
| | 2 | days | 196 | 294 | 125 | 141 |
| | 4 | days | 67 | 63 | 71 | 60 |
| | 7 | days | 53 | 68 | 56 | 47 |
| | 14 | days | 47 | 67 | 82 | 44 |
| 0.05 | Pre-dose | | 99 | 33 | 74 | 58 |
| | 2 | days | 95 | 34 | 61 | 80 |
| | 4 | days | 69 | 42 | 48 | 94 |
| | 7 | days | 62 | 52 | 53 | 78 |
| | 14 | days | 59 | 20 | 32 | 47 |
| 0.005 | Pre-dose | | 35 | 54 | 39 | 40 |
| | 2 | days | 70 | 34 | 29 | 25 |
| | 4 | days | 39 | 36 | 43 | 55 |
| | 7 | days | 28 | 31 | 55 | 31 |
| | 14 | days | 39 | 20 | 35 | 54 |

[1232] As shown in Table 52, the administration of lipid nanoparticle-formulated modified RNA at high doses (0.5 mg/kg) caused an increase in cytokines, interferon-alpha (IFN-alpha) after administration of modified mRNA.

TABLE 52
Pharmacologic Effect of EPO mRNA on Alanine Transaminase

| | | Male NHP | Female NHP | Male NHP | Female NHP |
|---|---|---|---|---|---|
| | | (G-CSF) | (G-CSF) | (EPO) | (EPO) |
| Dose | | IFN-alpha | IFN-alpha | IFN-alpha | IFN-alpha |
| (mg/kg) | Time | (pg/mL) | (pg/mL) | (pg/mL) | (pg/mL) |
| 0.5 | Pre-dose | 0 | 0 | 0 | 0 |
| | Day 1 + | 503.8 | 529.2 | 16.79 | 217.5 |
| | 8 hr | | | | |
| | 4 days | 0 | 0 | 0 | 0 |
| 0.05 | Pre-dose | 0 | 0 | 0 | 0 |
| | Day 1 + | 0 | 0 | 0 | 0 |
| | 8 hr | | | | |
| | 4 days | 0 | 0 | 0 | 0 |
| 0.005 | Pre-dose | 0 | 0 | 0 | 0 |
| | Day 1 + | 0 | 0 | 0 | 0 |
| | 8 hr | | | | |
| | 4 days | 0 | 0 | 0 | 0 |

### Example 24. Study of Intramuscular and/or Subcutaneous Administration in Non-Human Primates

[1233] Formulations containing modified EPO mRNA (mRNA sequence shown in SEQ ID NO: 251436; polyA tail of approximately 160 nucleotides not shown in sequence; 5′cap, Cap1; fully modified with 5-methylcytosine and pseudouridine) or G-CSF mRNA (mRNA sequence shown in SEQ ID NO: 251433; polyA tail of approximately 160 nucleotides not shown in sequence; 5′cap, Cap1; fully modified with 5-methylcytosine and pseudouridine) in saline were administered to non-human primates (Cynomolgus monkey) (NHP) intramuscularly (IM) or subcutaneously (SC). The single modified mRNA dose of 0.05 mg/kg or 0.005 mg/kg was in a dose volume of 0.5 mL/kg. The non-human primates are bled 5-6 days prior to dosing to determine serum protein concentration and a baseline complete blood count. After administration with the modified mRNA formulation the NHP are bled at 8 hours, 24 hours, 48 hours, 72 hours, 7 days and 14 days to determined protein expression. Protein expression of G-CSF and EPO is determined by ELISA. At 24 hours, 72 hours, 7 days and 14 days after administration the complete blood count of the NHP is also determined. Urine from the NHPs is collected over the course of the entire experiment and analyzed to evaluate clinical safety. Tissue near the injection site is also collected and analyzed to determine protein expression.

### Example 25. Modified mRNA Trafficking

[1234] In order to determine localization and/or trafficking of the modified mRNA, studies may be performed as follows.

[1235] LNP formulations of siRNA and modified mRNA are formulated according to methods known in the art and/or described herein. The LNP formulations may include at least one modified mRNA which may encode a protein such as G-CSF, EPO, Factor VII, and/or any protein described herein. The formulations may be administered locally into muscle of mammals using intramuscular or subcutaneous injection. The dose of modified mRNA and the size of the LNP may be varied to determine the effect on trafficking in the body of the mammal and/or to assess the impact on a biologic reaction such as, but not limited to, inflammation. The mammal may be bled at different time points to determine the expression of protein encoded by the modified mRNA administered present in the serum and/or to determine the complete blood count in the mammal.

[1236] For example, modified mRNA encoding Factor VII, expressed in the liver and secreted into the serum, may be administered intramuscularly and/or subcutaneously. Coincident or prior to modified mRNA administration, siRNA is administered to knock out endogenous Factor VII. Factor VII arising from the intramuscular and/or subcutaneous injection of modified mRNA is administered is measured in the blood. Also, the levels of Factor VII is measured in the tissues near the injection site. If Factor VII is expressed in blood then there is trafficking of the modified mRNA. If Factor VII is expressed in tissue and not in the blood than there is only local expression of Factor VII.

### Example 26. Formulations of Multiple Modified mRNA

[1237] LNP formulations of modified mRNA are formulated according to methods known in the art and/or described herein or known in the art. The LNP formulations may include at least one modified mRNA which may encode a protein such as G-CSF, EPO, thrombopoietin and/or any protein described herein. The at least one modified mRNA may include 1, 2, 3, 4 or 5 modified mRNA molecules. The formulations containing at least one modified mRNA may be administered intravenously, intramuscularly or subcutaneously in a single or multiple dosing regimens. Biological samples such as, but not limited to, blood and/or serum may be collected and analyzed at different time points before and/or after administration of the at least one modified mRNA formulation. An expression of a protein in a biological sample of 50-200 pg/ml after the mammal has been administered a formulation containing at least one modified mRNA encoding said protein would be considered biologically effective.

### Example 27. Polyethylene Glycol Ratio Studies

### A. Formulation and Characterization of PEG LNPs

[1238] Lipid nanoparticles (LNPs) were formulated using the syringe pump method. The LNPs were formulated at a 20:1 weight ratio of total lipid to modified G-CSF mRNA (mRNA sequence shown in SEQ ID NO: 251433; polyA tail of approximately 160 nucleotides not shown in sequence; 5′cap, Cap1; fully modified with 5-methylcytosine and pseudouridine). The molar ratio ranges of the formulations are shown in Table 53.

TABLE 53
Molar Ratios

| | DLin- | | | PEG-c- |
|---|---|---|---|---|
| | KC2-DMA | DSPC | Cholesterol | DOMG |
| Mole Percent | 50.0 | 10.0 | 37-38.5 | 1.5-3 |
| (mol %) | | | | |

[1239] Two types of PEG lipid, 1,2-Dimyristoyl-sn-glycerol, methoxypolyethylene Glycol (PEG-DMG, NOF Cat #SUNBRIGHT® GM-020) and 1,2-Distearoyl-sn-glycerol, methoxypolyethylene Glycol (PEG-DSG, NOF Cat #SUNBRIGHT® GS-020), were tested at 1.5 or 3.0 mol %. After the formation of the LNPs and the encapsulation of the modified G-CSF mRNA, the LNP formulations were characterized by particle size, zeta potential and encapsulation percentage and the results are shown in Table 54.

TABLE 54
Characterization of LNP Formulations

| | Formulation No. | | | |
|---|---|---|---|---|
| | NPA-071-1 | NPA-072-1 | NPA-073-1 | NPA-074-1 |
| Lipid | PEG-DMG | PEG-DMG | PEG-DSA | PEG-DSA |
| | 1.5% | 3% | 1.5% | 3% |
| Mean Size | 95 nm | 85 nm | 95 nm | 75 nm |
| | PDI: 0.01 | PDI: 0.06 | PDI: 0.08 | PDI: 0.08 |
| Zeta at pH 7.4 | −1.1 mV | −2.6 mV | 1.7 mV | 0.7 mV |
| Encapsulation | 88% | 89% | 98% | 95% |
| (RiboGreen) | | | | |

### B. In Vivo Screening of PEG LNPs

[1240] Formulations of the PEG LNPs described in Table 55 were administered to mice (n=5) intravenously at a dose of 0.5 mg/kg. Serum was collected from the mice at 2 hours, 8 hours, 24 hours, 48 hours, 72 hours and 8 days after administration of the formulation. The serum was analyzed by ELISA to determine the protein expression of G-CSF and the expression levels are shown in Table 55. LNP formulations using PEG-DMG gave substantially higher levels of protein expression than LNP formulations with PEG-DSA.

TABLE 55
Protein Expression

| | Formulation | | Protein Expression |
|---|---|---|---|
| Lipid | No. | Time | (pg/ml) |
| PEG-DMG, 1.5% | NPA-071-1 | 2 hours | 114,102 |
| | | 8 hours | 357,944 |
| | | 24 hours | 104,832 |
| | | 48 hours | 6,697 |
| | | 72 hours | 980 |
| | | 8 days | 0 |
| PEG-DMG, 3% | NPA-072-1 | 2 hours | 154,079 |
| | | 8 hours | 354,994 |
| | | 24 hours | 164,311 |
| | | 48 hours | 13,048 |
| | | 72 hours | 1,182 |
| | | 8 days | 13 |
| PEG-DSA, 1.5% | NPA-073-1 | 2 hours | 3,193 |
| | | 8 hours | 6,162 |
| | | 24 hours | 446 |
| | | 48 hours | 197 |
| | | 72 hours | 124 |
| | | 8 days | 5 |
| PEG-DSA, 3% | NPA-074-1 | 2 hours | 259 |
| | | 8 hours | 567 |
| | | 24 hours | 258 |
| | | 48 hours | 160 |
| | | 72 hours | 328 |
| | | 8 days | 33 |

### Example 28. Cationic Lipid Formulation Studies

### A. Formulation and Characterization of Cationic Lipid Nanoparticles

[1241] Lipid nanoparticles (LNPs) were formulated using the syringe pump method. The LNPs were formulated at a 20:1 weight ratio of total lipid to modified mRNA. The final lipid molar ratio ranges of cationic lipid, DSPC, cholesterol and PEG-c-DOMG are outlined in Table 56.

TABLE 56
Molar Ratios

| | Cationic | | | PEG-c- |
|---|---|---|---|---|
| | Lipid | DSPC | Cholesterol | DOMG |
| Mole Percent | 50.0 | 10.0 | 38.5 | 1.5 |
| (mol %) | | | | |

[1242] A 25 mM lipid solution in ethanol and modified RNA in 50 mM citrate at a pH of 3 were mixed to create spontaneous vesicle formation. The vesicles were stabilized in ethanol before the ethanol was removed and there was a buffer exchange by dialysis. The LNPs were then characterized by particle size, zeta potential, and encapsulation percentage. Table 57 describes the characterization of LNPs encapsulating EPO modified mRNA (mRNA sequence shown in SEQ ID NO: 251436 polyA tail of approximately 160 nucleotides not shown in sequence; 5′cap, Cap1; fully modified with 5-methylcytosine and pseudouridine) or G-CSF modified mRNA (mRNA sequence shown in SEQ ID NO: 251433; polyA tail of approximately 160 nucleotides not shown in sequence; 5′cap, Cap1; fully modified with 5-methylcytosine and pseudouridine) using DLin-MC3-DMA, DLin-DMA or C12-200 as the cationic lipid.

TABLE 57
Characterization of Cationic Lipid Formulations

| Formulation No. | NPA-071-1 | | NPA-072-1 | | NPA-073-1 | | NPA-074-1 | | NPA-075-1 | | NPA-076-1 | |
|---|---|---|---|---|---|---|---|---|---|---|---|---|
| Lipid | DLin-MC3- | | DLin-MC3- | | DLin-DMA | | DLin-DMA | | C12-200 | | C12-200 | |
| | DMA | | DMA | | | | | | | | | |
| Modified | EPO | | G-CSF | | EPO | | G-CSF | | EPO | | G-CSF | |
| RNA | | | | | | | | | | | | |
| Mean Size | 89 | nm | 96 | nm | 70 | nm | 73 | nm | 97 | nm | 103 | nm |
| | PDI: 0.07 | | PDI: 0.08 | | PDI: 0.04 | | PDI: 0.06 | | PDI: 0.05 | | PDI: 0.09 | |
| Zeta at pH 7.4 | −1.1 | mV | −1.4 | mV | −1.6 | mV | −0.4 | mV | 1.4 | mV | 0.9 | mV |

| | | | | | | |
|---|---|---|---|---|---|---|
| Encapsulation | 100% | 100% | 99% | 100% | 88% | 98% |
| (RiboGreen) | | | | | | |

### B. In Vivo Screening of Cationic LNP Formulations

[1243] Formulations of the cationic lipid formulations described in Table 57 were administered to mice (n=5) intravenously at a dose of 0.5 mg/kg. Serum was collected from the mice at 2 hours, 24 hours, 72 hours and/or 7 days after administration of the formulation. The serum was analyzed by ELISA to determine the protein expression of EPO or G-CSF and the expression levels are shown in Table 58.

TABLE 58
Protein Expression

| | | | Protein |
|---|---|---|---|
| Modified | Formulation | | Expression |
| mRNA | No. | Time | (pg/ml) |
| EPO | NPA-071-1 | 2 hours | 304,190.0 |
| | | 24 hours | 166,811.5 |
| | | 72 hours | 1,356.1 |
| | | 7 days | 20.3 |
| EPO | NPA-073-1 | 2 hours | 73,852.0 |
| | | 24 hours | 75,559.7 |
| | | 72 hours | 130.8 |
| EPO | NPA-075-1 | 2 hours | 413,010.2 |
| | | 24 hours | 56,463.8 |
| G-CSF | NPA-072-1 | 2 hours | 62,113.1 |
| | | 24 hours | 53,206.6 |
| G-CSF | NPA-074-1 | 24 hours | 25,059.3 |
| G-CSF | NPA-076-1 | 2 hours | 219,198.1 |
| | | 24 hours | 8,470.0 |

[1244] Toxicity was seen in the mice administered the LNPs formulations with the cationic lipid C12-200 (NPA-075-1 and NPA-076-1) and they were sacrificed at 24 hours because they showed symptoms such as scrubby fur, cowering behavior and weight loss of greater than 10%. C12-200 was expected to be more toxic but also had a high level of expression over a short period. The cationic lipid DLin-DMA (NPA-073-1 and NPA-074-1) had the lowest expression out of the three cationic lipids tested. DLin-MC3-DMA (NPA-071-1 and NPA-072-1) showed good expression up to day three and was above the background sample out to day 7 for EPO formulations.

### Example 29. Method of Screening for Protein Expression

### A. Electrospray Ionization

[1245] A biological sample which may contain proteins encoded by modified RNA administered to the subject is prepared and analyzed according to the manufacturer protocol for electrospray ionization (ESI) using 1, 2, 3 or 4 mass analyzers. A biologic sample may also be analyzed using a tandem ESI mass spectrometry system.

[1246] Patterns of protein fragments, or whole proteins, are compared to known controls for a given protein and identity is determined by comparison.

### B. Matrix-Assisted Laser Desorption/Ionization

[1247] A biological sample which may contain proteins encoded by modified RNA administered to the subject is prepared and analyzed according to the manufacturer protocol for matrix-assisted laser desorption/ionization (MALDI).

[1248] Patterns of protein fragments, or whole proteins, are compared to known controls for a given protein and identity is determined by comparison.

[1249] C. Liquid Chromatography-Mass Spectrometry-Mass Spectrometry

[1250] A biological sample, which may contain proteins encoded by modified RNA, may be treated with a trypsin enzyme to digest the proteins contained within. The resulting peptides are analyzed by liquid chromatography-mass spectrometry-mass spectrometry (LC/MS/MS). The peptides are fragmented in the mass spectrometer to yield diagnostic patterns that can be matched to protein sequence databases via computer algorithms. The digested sample may be diluted to achieve 1 ng or less starting material for a given protein. Biological samples containing a simple buffer background (e.g. water or volatile salts) are amenable to direct in-solution digest; more complex backgrounds (e.g. detergent, non-volatile salts, glycerol) require an additional clean-up step to facilitate the sample analysis.

[1251] Patterns of protein fragments, or whole proteins, are compared to known controls for a given protein and identity is determined by comparison.

### Example 30. Lipid Nanoparticle In Vivo Studies

[1252] mCherry mRNA (mRNA sequence shown in SEQ ID NO: 251441; polyA tail of approximately 160 nucleotides not shown in sequence; 5′cap, Cap1; fully modified with 5-methylcytosine and pseudouridine) was formulated as a lipid nanoparticle (LNP) using the syringe pump method. The LNP was formulated at a 20:1 weight ratio of total lipid to modified mRNA with a final lipid molar ratio of 50:10:38.5:1.5 (DLin-KC2-DMA:DSPC:Cholesterol:PEG-c-DOMG). The mCherry formulation, listed in Table 59, was characterized by particle size, zeta potential, and encapsulation.

TABLE 59
mCherry Formulation

| Formulation # | NPA-003-5 |
|---|---|
| Modified mRNA | mCherry |
| Mean size | 105 nm |
| | PDI: 0.09 |
| Zeta at pH 7.4 | 1.8 mV |
| Encaps. (RiboGr) | 100% |

[1253] The LNP formulation was administered to mice (n=5) intravenously at a modified mRNA dose of 100 ug. Mice were sacrificed at 24 hrs after dosing. The liver and spleen from the mice administered with mCherry modified mRNA formulations were analyzed by immunohistochemistry (IHC), western blot, or fluorescence-activated cell sorting (FACS).

[1254] Histology of the liver showed uniform mCherry expression throughout the section, while untreated animals did not express mCherry. Western blots were also used to confirm mCherry expression in the treated animals, whereas mCherry was not detected in the untreated animals. Tubulin was used as a control marker and was detected in both treated and untreated mice, indicating that normal protein expression in hepatocytes was unaffected.

[1255] FACS and IHC were also performed on the spleens of mCherry and untreated mice. All leukocyte cell populations were negative for mCherry expression by FACS analysis. By IHC, there were also no observable differences in the spleen in the spleen between mCherry treated and untreated mice.

### Example 31. Syringe Pump In Vivo Studies

[1256] mCherry modified mRNA (mRNA sequence shown in SEQ ID NO: 251434; poly A tail of approximately 160 nucleotides not shown in sequence; 5′cap, Cap1) is formulated as a lipid nanoparticle (LNP) using the syringe pump method. The LNP is formulated at a 20:1 weight ratio of total lipid to modified mRNA with a final lipid molar ratio of 50:10:38.5:1.5 (DLin-KC2-DMA:DSPC:Cholesterol:PEG-c-DOMG). The mCherry formulation is characterized by particle size, zeta potential, and encapsulation.

[1257] The LNP formulation is administered to mice (n=5) intravenously at a modified mRNA dose of 10 or 100 ug. Mice are sacrificed at 24 hrs after dosing. The liver and spleen from the mice administered with mCherry modified mRNA formulations are analyzed by immunohistochemistry (IHC), western blot, and/or fluorescence-activated cell sorting (FACS).

### Example 32. In Vitro and In Vivo Expression

### A. In Vitro Expression in Human Cells Using Lipidoid Formulations

[1258] The ratio of mmRNA to lipidoid used to test for in vitro transfection is tested empirically at different lipidoid: mmRNA ratios. Previous work using siRNA and lipidoids have utilized 2.5:1, 5:1, 10:1, and 15:1 lipidoid:siRNAwt:wt ratios. Given the longer length of mmRNA relative to siRNA, a lower wt:wt ratio of lipidoid to mmRNA may be effective. In addition, for comparison mmRNA were also formulated using RNAIMAX™ (Invitrogen, Carlsbad, CA) or TRANSIT-mRNA (Mirus Bio, Madison, WI) cationic lipid delivery vehicles.

[1259] The ability of lipidoid-formulated Luciferase (IVT cDNA sequence as shown in SEQ ID NO: 251442; mRNA sequence shown in SEQ ID NO: 251443, polyA tail of approximately 160 nucleotides not shown in sequence, 5′cap, Cap1, fully modified with 5-methylcytosine at each cytosine and pseudouridine replacement at each uridine site), green fluorescent protein (GFP) (IVT cDNA sequence as shown in SEQ ID NO: 251444; mRNA sequence shown in SEQ ID NO: 251445, polyA tail of approximately 160 nucleotides not shown in sequence, 5′cap, Cap1, fully modified with 5-methylcytosine at each cytosine and pseudouridine replacement at each uridine site), G-CSF mRNA (mRNA sequence shown in SEQ ID NO: 251434; polyA tail of approximately 160 nucleotides not shown in sequence; 5′cap, Cap1), and EPO mRNA (mRNA sequence shown in SEQ ID NO: 251436; polyA tail of approximately 160 nucleotides not shown in sequence; 5′cap, Cap1) to express the desired protein product can be confirmed by luminescence for luciferase expression, flow cytometry for GFP expression, and by ELISA for G-CSF and Erythropoietin (EPO) secretion.

### B. In Vivo Expression Following Intravenous Injection

[1260] Systemic intravenous administration of the formulations are created using various different lipidoids including, but not limited to, 98N12-5, C12-200, and MD1.

[1261] Lipidoid formulations containing mmRNA are injected intravenously into animals. The expression of the modified mRNA (mmRNA)-encoded proteins are assessed in blood and/or other organs samples such as, but not limited to, the liver and spleen collected from the animal. Conducting single dose intravenous studies will also allow an assessment of the magnitude, dose responsiveness, and longevity of expression of the desired product.

[1262] In one embodiment, lipidoid based formulations of 98N12-5, C12-200, MD1 and other lipidoids, are used to deliver luciferase, green fluorescent protein (GFP), mCherry fluorescent protein, secreted alkaline phosphatase (sAP), human G-CSF, human Factor IX, or human Erythropoietin (EPO) mmRNA into the animal. After formulating mmRNA with a lipid, as described previously, animals are divided into groups to receive either a saline formulation, or a lipidoid-formulation which contains one of a different mmRNA selected from luciferase, GFP, mCherry, sAP, human G-CSF, human Factor IX, and human EPO. Prior to injection into the animal, mmRNA-containing lipidoid formulations are diluted in PBS. Animals are then administered a single dose of formulated mmRNA ranging from a dose of 10 mg/kg to doses as low as 1 ng/kg, with a preferred range to be 10 mg/kg to 100 ng/kg, where the dose of mmRNA depends on the animal body weight such as a 20 gram mouse receiving a maximum formulation of 0.2 ml (dosing is based no mmRNA per kg body weight). After the administration of the mmRNA-lipidoid formulation, serum, tissues, and/or tissue lysates are obtained and the level of the mmRNA-encoded product is determined at a single and/or a range of time intervals. The ability of lipidoid-formulated Luciferase, GFP, mCherry, sAP, G-CSF, Factor IX, and EPO mmRNA to express the desired protein product is confirmed by luminescence for the expression of Luciferase, flow cytometry for the expression of GFP and mCherry expression, by enzymatic activity for sAP, or by ELISA for the section of G-CSF, Factor IX and/or EPO.

[1263] Further studies for a multi-dose regimen are also performed to determine the maximal expression of mmRNA, to evaluate the saturability of the mmRNA-driven expression (by giving a control and active mmRNA formulation in parallel or in sequence), and to determine the feasibility of repeat drug administration (by giving mmRNA in doses separated by weeks or months and then determining whether expression level is affected by factors such as immunogenicity). An assessment of the physiological function of proteins such as G-CSF and EPO are also determined through analyzing samples from the animal tested and detecting increases in granulocyte and red blood cell counts, respectively. Activity of an expressed protein product such as Factor IX, in animals can also be assessed through analysis of Factor IX enzymatic activity (such as an activated partial thromboplastin time assay) and effect of clotting times.

C. In Vitro Expression Following Intramuscular and/or Subcutaneous Injection

[1264] The use of lipidoid formulations to deliver oligonucleotides, including mRNA, via an intramuscular route or a subcutaneous route of injection needs to be evaluated as it has not been previously reported. Intramuscular and/or subcutaneous injection of mmRNA are evaluated to determine if mmRNA-containing lipidoid formulations are capable to produce both localized and systemic expression of a desired portions.

[1265] Lipidoid formulations of 98N12-5, C12-200, and MD1containing mmRNA selected from luciferase, green fluorescent protein (GFP), mCherry fluorescent protein, secreted alkaline phosphatase (sAP), human G-CSF, human factor IX, or human Erythropoietin (EPO) mmRNA are injected intramuscularly and/or subcutaneously into animals. The expression of mmRNA-encoded proteins are assessed both within the muscle or subcutaneous tissue and systemically in blood and other organs such as the liver and spleen. Single dose studies allow an assessment of the magnitude, dose responsiveness, and longevity of expression of the desired product.

[1266] Animals are divided into groups to receive either a saline formulation or a formulation containing modified mRNA. Prior to injection mmRNA-containing lipidoid formulations are diluted in PBS. Animals are administered a single intramuscular dose of formulated mmRNA ranging from 50 mg/kg to doses as low as 1 ng/kg with a preferred range to be 10 mg/kg to 100 ng/kg. A maximum dose for intramuscular administration, for a mouse, is roughly 1 mg mmRNA or as low as 0.02 ng mmRNA for an intramuscular injection into the hind limb of the mouse. For subcutaneous administration, the animals are administered a single subcutaneous dose of formulated mmRNA ranging from 400 mg/kg to doses as low as 1 ng/kg with a preferred range to be 80 mg/kg to 100 ng/kg. A maximum dose for subcutaneous administration, for a mouse, is roughly 8 mg mmRNA or as low as 0.02 ng mmRNA.

[1267] For a 20 gram mouse the volume of a single intramuscular injection is maximally 0.025 ml and a single subcutaneous injection is maximally 0.2 ml. The optimal dose of mmRNA administered is calculated from the body weight of the animal. At various points in time points following the administration of the mmRNA-lipidoid, serum, tissues, and tissue lysates is obtained and the level of the mmRNA-encoded product is determined. The ability of lipidoid-formulated luciferase, green fluorescent protein (GFP), mCherry fluorescent protein, secreted alkaline phosphatase (sAP), human G-CSF, human factor IX, or human Erythropoietin (EPO) mmRNA to express the desired protein product is confirmed by luminescence for luciferase expression, flow cytometry for GFP and mCherry expression, by enzymatic activity for sAP, and by ELISA for G-CSF, Factor IX and Erythropoietin (EPO) secretion.

[1268] Additional studies for a multi-dose regimen are also performed to determine the maximal expression using mmRNA, to evaluate the saturability of the mmRNA-driven expression (achieved by giving a control and active mmRNA formulation in parallel or in sequence), and to determine the feasibility of repeat drug administration (by giving mmRNA in doses separated by weeks or months and then determining whether expression level is affected by factors such as immunogenicity). Studies utilizing multiple subcutaneous or intramuscular injection sites at one time point, are also utilized to further increase mmRNA drug exposure and improve protein production. An assessment of the physiological function of proteins, such as GFP, mCherry, sAP, human G-CSF, human factor IX, and human EPO, are determined through analyzing samples from the tested animals and detecting a change in granulocyte and/or red blood cell counts. Activity of an expressed protein product such as Factor IX, in animals can also be assessed through analysis of Factor IX enzymatic activity (such as an activated partial thromboplastin time assay) and effect of clotting times.

### Example 33. Bifunctional mmRNA

[1269] Using the teachings and synthesis methods described herein, modified RNAs are designed and synthesized to be bifunctional, thereby encoding one or more cytotoxic protein molecules as well as be synthesized using cytotoxic nucleosides.

[1270] Administration of the bifunctional modified mRNAs is effected using either saline or a lipid carrier. Once administered, the bifunctional modified mRNA is translated to produce the encoded cytotoxic peptide. Upon degradation of the delivered modified mRNA, the cytotoxic nucleosides are released which also effect therapeutic benefit to the subject.

### Example 34. Modified mRNA Transfection

### A. Reverse Transfection

[1271] For experiments performed in a 24-well collagen-coated tissue culture plate, Keratinocytes are seeded at a cell density of 1×10⁵. For experiments performed in a 96-well collagen-coated tissue culture plate, Keratinocytes are seeded at a cell density of 0.5×10⁵. For each modified mRNA (mmRNA) to be transfected, modified mRNA: RNAIMAX™ is prepared as described and mixed with the cells in the multi-well plate within a period of time, e.g., 6 hours, of cell seeding before cells had adhered to the tissue culture plate.

### B. Forward Transfection

[1272] In a 24-well collagen-coated tissue culture plate, Keratinocytes are seeded at a cell density of 0.7×10⁵. For experiments performed in a 96-well collagen-coated tissue culture plate, Keratinocytes are seeded at a cell density of 0.3×10⁵. Keratinocytes are grown to a confluency of >70% for over 24 hours. For each modified mRNA (mmRNA) to be transfected, modified mRNA:RNAIMAX™ is prepared as described and transfected onto the cells in the multi-well plate over 24 hours after cell seeding and adherence to the tissue culture plate.

C. Modified mRNA Translation Screen: G-CSF ELISA

[1273] Keratinocytes are grown in EPILIFE medium with Supplement S7 from Invitrogen (Carlsbad, CA) at a confluence of >70%. One set of keratinocytes were reverse transfected with 300 ng of the chemically modified mRNA (mmRNA) complexed with RNAIMAX™ from Invitrogen. Another set of keratinocytes are forward transfected with 300 ng modified mRNA complexed with RNAIMAX™ from Invitrogen. The modified mRNA:RNAIMAX™ complex is formed by first incubating the RNA with Supplement-free EPILIFE® media in a 5× volumetric dilution for 10 minutes at room temperature.

[1274] In a second vial, RNAIMAX™ reagent was incubated with Supplement-free EPILIFE® Media in 10× volumetric dilution for 10 minutes at room temperature. The RNA vial was then mixed with the RNAIMAX™ vial and incubated for 20-30 minutes at room temperature before being added to the cells in a drop-wise fashion. Secreted human Granulocyte-Colony Stimulating Factor (G-CSF) concentration in the culture medium is measured at 18 hours post-transfection for each of the chemically modified mRNA in triplicate.

[1275] Secretion of Human G-CSF from transfected human keratinocytes is quantified using an ELISA kit from Invitrogen or R&D Systems (Minneapolis, MN) following the manufacturers recommended instructions.

D. Modified mRNA Dose and Duration: G-CSF ELISA

[1276] Keratinocytes are grown in EPILIFE® medium with Supplement S7 from Invitrogen at a confluence of >70%. Keratinocytes are reverse transfected with either Ong, 46.875 ng, 93.75 ng, 187.5 ng, 375 ng, 750 ng, or 1500 ng modified mRNA complexed with the RNAIMAX™ from Invitrogen (Carlsbad, CA). The modified mRNA:RNAIMAX™ complex is formed as described. Secreted human G-CSF concentration in the culture medium is measured at 0, 6, 12, 24, and 48 hours post-transfection for each concentration of each modified mRNA in triplicate. Secretion of human G-CSF from transfected human keratinocytes is quantified using an ELISA kit from Invitrogen or R&D Systems following the manufacturers recommended instructions.

### Example 35. Split Dose Studies

[1277] Studies utilizing multiple subcutaneous or intramuscular injection sites at one time point were designed and performed to investigate ways to increase mmRNA drug exposure and improve protein production. In addition to detection of the expressed protein product, an assessment of the physiological function of proteins was also determined through analyzing samples from the animal tested.

[1278] Surprisingly, it has been determined that split dosing of mmRNA produces greater protein production and phenotypic responses than those produced by single unit dosing or multi-dosing schemes.

[1279] The design of a single unit dose, multi-dose and split dose experiment involved using human erythropoietin (EPO) mmRNA (mRNA shown in SEQ ID NO: 251436; polyA tail of approximately 160 nucleotides not shown in sequence; 5′cap, Cap1) administered in buffer alone. The dosing vehicle (F. buffer) consisted of 150 mM NaCl, 2 mM CaCl₂), 2 mM Na-phosphate (1.4 mM monobasic sodium phosphate; 0.6 mM dibasic sodium phosphate), and 0.5 mM EDTA, pH 6.5. The pH was adjusted using sodium hydroxide and the final solution was filter sterilized. The mmRNA was modified with 5meC at each cytosine and pseudouridine replacement at each uridine site.

[1280] Animals (n=5) were injected IM (intramuscular) for the single unit dose of 100 ug. For multi-dosing, two schedules were used, 3 doses of 100 ug and 6 doses of 100 ug. For the split dosing scheme, two schedules were used, 3 doses at 33.3 ug and 6 doses of 16.5 ug mmRNA. Control dosing involved use of buffer only at 6 doses. Control mmRNA involved the use of luciferase mmRNA (IVT cDNA sequence shown in SEQ ID NO: 251442; mRNA sequence shown in SEQ ID NO: 251443, polyA tail of approximately 160 nucleotides not shown in sequence, 5′cap, Cap1, fully modified with 5-methylcytosine at each cytosine and pseudouridine replacement at each uridine site) dosed 6 times at 100 ug. Blood and muscle tissue were evaluated 13 hrs post injection.

[1281] Human EPO protein was measured in mouse serum 13 h post I.M. single, multi- or split dosing of the EPO mmRNA in buffer. Seven groups of mice (n=5 mice per group) were treated and evaluated. The results are shown in Table 60.

TABLE 60
Split dose study

| | | | | Avg. | Polypeptide | |
|---|---|---|---|---|---|---|
| | | | | pmol/mL | per unit | Dose |
| | | Dose of | Total | human | drug | Splitting |
| Group | Treatment | mmRNA | Dose | EPO | (pmol/ug) | Factor |
| 1 | Human EPO mmRNA | 1 × 100 ug | 100 ug | 14.3 | .14 | 1 |
| 2 | Human EPO mmRNA | 3 × 100 ug | 300 ug | 82.5 | .28 | 2 |
| 3 | Human EPO mmRNA | 6 × 100 ug | 600 ug | 273.0 | .46 | 3.3 |
| 4 | Human EPO mmRNA | 3 × 33.3 ug | 100 ug | 104.7 | 1.1 | 7.9 |
| 5 | Human EPO mmRNA | 6 × 16.5 ug | 100 ug | 127.9 | 1.3 | 9.3 |
| 6 | Luciferase mmRNA | 6 × 100 ug | 600 ug | 0 | — | — |
| 7 | Buffer Alone | — | — | 0 | — | — |

[1282] The splitting factor is defined as the product per unit drug divided by the single dose product per unit drug (PUD). For example for treatment group 2 the value 0.28 or product (EPO) per unit drug (mmRNA) is divided by the single dose product per unit drug of 0.14. The result is 2. Likewise, for treatment group 4, the value 1.1 or product (EPO) per unit drug (mmRNA) is divided by the single dose product per unit drug of 0.14. The result is 7.9. Consequently, the dose splitting factor (DSF) may be used as an indicator of the efficacy of a split dose regimen. For any single administration of a total daily dose, the DSF should be equal to 1. Therefore any DSF greater than this value in a split dose regimen is an indication of increased efficacy.

[1283] To determine the dose response trends, impact of injection site and impact of injection timing, studies are performed. In these studies, varied doses of 1 ug, 5 ug, 10 ug, 25 ug, 50 ug, and values in between are used to determine dose response outcomes. Split dosing for a 100 ug total dose includes three or six doses of 1.6 ug, 4.2 ug, 8.3 ug, 16.6 ug, or values and total doses equal to administration of the total dose selected.

[1284] Injection sites are chosen from the limbs or any body surface presenting enough area suitable for injection. This may also include a selection of injection depth to target the dermis (Intradermal), epidermis (Epidermal), subcutaneous tissue (SC) or muscle (IM). Injection angle will vary based on targeted delivery site with injections targeting the intradermal site to be 10-15 degree angles from the plane of the surface of the skin, between 20-45 degrees from the plane of the surface of the skin for subcutaneous injections and angles of between 60-90 degrees for injections substantially into the muscle.

### Example 36. Quantification in Exosomes

[1285] The quantity and localization of the mmRNA of the present invention can be determined by measuring the amounts (initial, timecourse, or residual basis) in isolated exosomes. In this study, since the mmRNA are typically codon-optimized and distinct in sequence from endogenous mRNA, the levels of mmRNA are quantitated as compared to endogenous levels of native or wild type mRNA by using the methods of Gibbings, PCT/IB2009/005878, the contents of which are incorporated herein by reference in their entirety.

[1286] In these studies, the method is performed by first isolating exosomes or vesicles preferably from a bodily fluid of a patient previously treated with a polynucleotide, primary construct or mmRNA of the invention, then measuring, in said exosomes, the polynucleotide, primary construct or mmRNA levels by one of mRNA microarray, qRT-PCR, or other means for measuring RNA in the art including by suitable antibody or immunohistochemical methods.

### Example 37. Effect of Modified mRNA on Cellular Viability, Cytotoxicity and Apoptosis

[1287] This experiment demonstrates cellular viability, cytotoxicity and apoptosis for distinct modified mRNA in-vitro transfected Human Keratinocyte cells. Keratinocytes are grown in EPILIFE® medium with Human Keratinocyte Growth Supplement in the absence of hydrocortisone from Invitrogen (Carlsbad, CA) at a confluence of >70%. Keratinocytes are reverse transfected with Ong, 46.875 ng, 93.75 ng, 187.5 ng, 375 ng, 750 ng, 1500 ng, 3000 ng, or 6000 ng of modified mRNA complexed with RNAIMAX™ from Invitrogen. The modified mRNA:RNAIMAX™ complex is formed. Secreted human G-CSF concentration in the culture medium is measured at 0, 6, 12, 24, and 48 hours post-transfection for each concentration of each modified m RNA in triplicate. Secretion of human G-CSF from transfected human keratinocytes is quantified using an ELISA kit from Invitrogen or R&D Systems following the manufacturers recommended instructions.

[1288] Cellular viability, cytotoxicity and apoptosis is measured at 0, 12, 48, 96, and 192 hours post-transfection using the APOTOX-GLO™ kit from Promega (Madison, WI) according to manufacturer instructions.

### Example 38. Detection of a Cellular Innate Immune Response to Modified mRNA Using an ELISA Assay

[1289] An enzyme-linked immunosorbent assay (ELISA) for Human Tumor Necrosis Factor-α (TNF-α), Human Interferon-β (IFN-β) and Human Granulocyte-Colony Stimulating Factor (G-CSF) secreted from in vitro-transfected Human Keratinocyte cells is tested for the detection of a cellular innate immune response. Keratinocytes are grown in EPILIFE® medium with Human Keratinocyte Growth Supplement in the absence of hydrocortisone from Invitrogen (Carlsbad, CA) at a confluence of >70%. Secreted TNF-α keratinocytes are reverse transfected with Ong, 93.75 ng, 1 87.5 ng, 375 ng, 750 ng, 1500 ng or 3000 ng of the chemically modified mRNA (mmRNA) complexed with RNAIMAX™ from Invitrogen as described in triplicate. Secreted TNF-α in the culture medium is measured 24 hours post-transfection for each of the chemically modified mRNA using an ELISA kit from Invitrogen according to the manufacturer protocols.

[1290] Secreted IFN-β in the same culture medium is measured 24 hours post-transfection for each of the chemically modified mRNA using an ELISA kit from Invitrogen according to the manufacturer protocols. Secreted human G-CSF concentration in the same culture medium is measured at 24 hours post-transfection for each of the chemically modified mRNA. Secretion of human G-CSF from transfected human keratinocytes is quantified using an ELISA kit from Invitrogen or R&D Systems (Minneapolis, MN) following the manufacturers recommended instructions. These data indicate which modified mRNA (mmRNA) are capable eliciting a reduced cellular innate immune response in comparison to natural and other chemically modified polynucleotides or reference compounds by measuring exemplary type 1 cytokines TNF-α and IFN-β.

### Example 39. Human Granulocyte-Colony Stimulating Factor (G-CSF) Modified mRNA-Induced Cell Proliferation Assay

[1291] Human keratinocytes are grown in EPILIFE® medium with Supplement S7 from Invitrogen at a confluence of >70% in a 24-well collagen-coated TRANSWELL® (Coming, Lowell, MA) co-culture tissue culture plate. Keratinocytes are reverse transfected with 750 ng of the indicated chemically modified mRNA (mmRNA) complexed with RNAIMAX from Invitrogen as described in triplicate. The modified mRNA:RNAIMAX complex is formed as described. Keratinocyte media is exchanged 6-8 hours post-transfection. 42-hours post-transfection, the 24-well TRANSWELL® plate insert with a 0.4 μm-pore semi-permeable polyester membrane is placed into the human G-CSF modified mRNA-transfected keratinocyte containing culture plate

[1292] Human myeloblast cells, Kasumi-1 cells or KG-1 (0.2×10⁵ cells), are seeded into the insert well and cell proliferation is quantified 42 hours post-co-culture initiation using the CyQuant Direct Cell Proliferation Assay (Invitrogen, Carlsbad, CA) in a 100-120 μl volume in a 96-well plate. Modified mRNA-encoding human G-CSF-induced myeloblast cell proliferation is expressed as a percent cell proliferation normalized to untransfected keratinocyte/myeloblast co-culture control wells. Secreted human G-CSF concentration in both the keratinocyte and myeloblast insert co-culture wells is measured at 42 hours post-co-culture initiation for each modified mRNA in duplicate. Secretion of human G-CSF is quantified using an ELISA kit from Invitrogen following the manufacturer recommended instructions.

[1293] Transfected human G-CSF modified mRNA in human keratinocyte feeder cells and untransfected human myeloblast cells are detected by RT-PCR. Total RNA from sample cells is extracted and lysed using RNEASY® kit (Qiagen, Valencia, CA) according to the manufacturer instructions. Extracted total RNA is submitted to RT-PCR for specific amplification of modified mRNA-G-CSF using PROTOSCRIPT® M-MuL V Taq RT-PCR kit (New England BioLabs, Ipswich, MA) according to the manufacturer instructions with human G-CSF-specific primers. RT-PCR products are visualized by 1.2% agarose gel electrophoresis.

### Example 40: Co-Culture Assay

[1294] Modified mRNA comprised of chemically-distinct modified nucleotides encoding human Granulocyte-Colony Stimulating Factor (G-CSF) may stimulate the cellular proliferation of a transfection incompetent cell in a co-culture environment. The co-culture includes a highly transfectable cell type such as a human keratinocyte and a transfection incompetent cell type such as a white blood cell (WBC). The modified mRNA encoding G-CSF are transfected into the highly transfectable cell allowing for the production and secretion of G-CSF protein into the extracellular environment where G-CSF acts in a paracrine-like manner to stimulate the white blood cell expressing the G-CSF receptor to proliferate. The expanded WBC population may be used to treat immune-compromised patients or partially reconstitute the WBC population of an immunosuppressed patient and thus reduce the risk of opportunistic infections.

[1295] In another example, a highly transfectable cell such as a fibroblast are transfected with certain growth factors support and simulate the growth, maintenance, or differentiation of poorly transfectable embryonic stem cells or induced pluripotent stem cells.

### Example 41: Detection Assays of Human IgG Antibodies

### A. ELISA Detection of Human IgG Antibodies

[1296] This example describes an ELISA for Human IgG from Chinese Hamster Ovary's (CHO) and Human Embryonic Kidney (HEK, HER-2 Negative) 293 cells transfected with human IgG modified mRNA (mmRNA). The Human Embryonic Embryonic Kidney (HEK) 293 are grown in CD 293 Medium with Supplement of L-Glutamine from Invitrogen until they reach a confluence of 80-90%. The CHO cells are grown in CD CHO Medium with Supplement of L-Glutamine, Hypoxanthine and Thymidine. In one aspect, 2×106 cells are transfected with 24 μg modified mRNA complexed with RNAIMAX™ from Invitrogen in a 75 cm² culture flask from Corning in 7 ml of medium. In another aspect, 80,000 cells are transfected with 1 μg modified mRNA complexed with RNAIMAX™ from Invitrogen in a 24-well plate. The modified mRNA:RNAIMAX™ complex is formed by incubating in a vial the mmRNA with either the CD 293 or CD CHO medium in a 5× volumetric dilution for 10 minutes at room temperature. In a second vial, RNAIMAX™ reagent is incubated with CD 293 medium or CD CHO medium in a 10× volumetric dilution for 10 minutes at room temperature. The mmRNA vial is then mixed with the RNAIMAX™ vial and incubated for 20-30 minutes at room temperature before it is added to the CHO or HEK cells in a drop-wise fashion. The culture supernatants are stored at 4 degrees celsius. The concentration of the secreted human IgG in the culture medium in the 24 μg mmRNA transfections is measured at 12, 24, 36 hours post-transfection and the 1 μg mmRNA transfection is measured at 36 hours. Secretion of Trastuzumab from transfected HEK 293 cells is quantified using an ELISA kit from Abcam (Cambridge, MA) following the manufacturers recommended instructions. The data shows that a Humanized IgG antibody (such as Trastuzumab) mmRNA is capable of being translated in HEK Cells and that Trastuzumab is secreted out of the cells and released into the extracellular environment. Furthermore, the data demonstrate that transfection of cells with mmRNA encoding Trastuzumab for the production of secreted protein can be scaled up to a bioreactor or large cell culture conditions.

B. Western Detection of Modified mRNA Produced Human IgG Antibody

[1297] A Western Blot of CHO-K1 cells is co-transfected with 1 μg each of Heavy and Light Chain of Trastuzumab modified mRNA (mmRNA). CHO cells are grown using standard protocols in 24-well plates. The cell supernatants or cell lysates are collected 24 hours post-transfection, separated on a 12% SDS-Page gel and transferred onto a nitrocellulose membrane using the IBOT® by Invitrogen (Carlsbad, CA). The cells are incubated with a first conjugation of a rabbit polyclonal antibody to Human IgG conjugated to DYLIGHT594 (ab96904, abcam, Cambridge, MA) and a second conjugation of a goat polyclonal antibody to Rb IgG which is conjugated to alkaline phosphatase. After incubation, the antibody is detected using Novex® alkaline phosphatase chromogenic substrate by Invitrogen (Carlsbad, CA).

C. Cell Immuno Staining of Modified mRNA Produced Trastuzumab and Rituximab

[1298] CHO-K1 cells are co-transfected with 500 ng each of Heavy and Light Chain of either Trastuzumab or Rituximab. Cells are grown in F-12K Medium from GIBCO® (Grand Island, NY) and 10% FBS. Cells are fixed with 4% paraformaldehyde in PBS, permeabilized with 0.1% Triton X-100 in PBS for 5-10 minutes at room temperature and cells are washed 3 times with room temperature PBS. Trastuzumab and Rituximab staining is performed using rabbit polyclonal antibody to Human IgG conjugated to DYLIGHT®594 (ab96904, abcam, Cambridge, MA) according to the manufacture's recommended dilutions. Nuclear DNA staining is performed with DAPI dye from Invitrogen (Carlsbad, CA). The protein for Trastuzumab and Rituximab is translated and localized to the cytoplasm upon modified mRNA transfections. Pictures are taken 13 hours post-transfection.

D. Binding Immunoblot Assay for Modified mRNA Produced Trastuzumab and Rituximab

[1299] Trastuzumab and Rituximab are detected using a binding immunoblot detection assay. Varying concentrations (100 ng/ul to 0 ng/ul) of the ErB2 peptide (ab40048, abeam, Cambridge, MA), antigen for Trastuzumab and the CD20 peptide (ab97360, abeam, Cambridge, MA), antigen for Rituximab are run on a 12% SDS-Page gel and transferred onto a membrane using the iBlot from Invitrogen. The membranes are incubated for 1 hour with their respective cell supernatants from CHO-K1 cells which are co-transfected with 500 ng each of Heavy and Light Chain of either Trastuzumab or Rituximab. The membranes are blocked with 1% BSA and a secondary anti-human IgG antibody conjugated to alkaline phosphatase (abcam, Cambridge, MA) is added. Antibody detection is conducted using the NOVEX alkaline phosphatase chromogenic substrate by Invitrogen (Carlsbad, CA). The data shows that a humanized IgG antibodies generated from modified mRNA is capable of recognizing and binding to their respective antigens.

### E. Cell Proliferation Assay

[1300] The SK-BR-3 cell line, an adherent cell line derived from a human breast adenocarcinoma, which overexpresses the HER2/neu receptor can be used to compare the anti-proliferative properties of modified mRNA (mmRNA) generated Trastuzumab. Varying concentrations of purified Trastuzumab generated from modified mRNA and trastuzumab are be added to cell cultures, and their effects on cell growth are be assessed in triplicate cytotoxicity and viability assays.

### Example 42: Bulk Transfection of Modified mRNA into Cell Culture

### A. Cationic Lipid Delivery Vehicles

[1301] RNA transfections are carried out using RNAIMAX™ (Invitrogen, Carlsbad, CA) or TRANSIT-mRNA (Mirus Bio, Madison, WI) cationic lipid delivery vehicles. RNA and reagent are first diluted in Opti-MEM basal media (Invitrogen, Carlsbad, CA). 100 ng/uL RNA is diluted 5× and 5 μL of RNAIMax per μg of RNA is diluted 10×. The diluted components are pooled and incubated 15 minutes at room temperature before they are dispensed to culture media. For TRANSIT-mRNA transfections, 100 ng/uL RNA is diluted 10× in Opti-MEM and BOOST reagent is added (at a concentration of 2 μL per μg of RNA), TRANSIT-mRNA is added (at a concentration of 2 μL per ug of RNA), and then the RNA-lipid complexes are delivered to the culture media after a 2-minute incubation at room temperature. RNA transfections are performed in Nutristem xenofree hES media (Stemgent, Cambridge, MA) for RiPS derivations, Dermal Cell Basal Medium plus Keratinocyte Growth Kit (ATCC) for keratinocyte experiments, and Opti-MEM plus 2% FBS for all other experiments. Successful introduction of a modified mRNA (mmRNA) into host cells can be monitored using various known methods, such as a fluorescent marker, such as Green Fluorescent Protein (GFP). Successful transfection of a modified mRNA can also be determined by measuring the protein expression level of the target polypeptide by e.g., Western Blotting or immunocytochemistry. Similar methods may be followed for large volume scale-up to multi-liter (5-10,000 L) culture format following similar RNA-lipid complex ratios.

B. Electroporation Delivery of Exogenous Synthetic mRNA Transcripts

[1302] Electroporation parameters are optimized by transfecting MRC-5 fibroblasts with in vitro synthetic modified mRNA (mmRNA) transcripts and measuring transfection efficiency by quantitative RT-PCR with primers designed to specifically detect the exogenous transcripts. Discharging a 150 uF capacitor charged to F into 2.5×10⁶ cells suspended in 50 μl of Opti-MEM (Invitrogen, Carlsbad, CA) in a standard electroporation cuvette with a 2 mm gap is sufficient for repeated delivery in excess of 10,000 copies of modified mRNA transcripts per cell, as determined using the standard curve method, while maintaining high viability (>70%). Further experiments may reveal that the voltage required to efficiently transfect cells with mmRNA transcripts can depend on the cell density during electroporation. Cell density may vary from 1×10⁶ cell/50 μl to a density of 2.5×10⁶ cells/50 μl and require from 110V to 145V to transfect cells with similar efficiencies measured in transcript copies per cell. Large multi-liter (5-10,000 L) electroporation may be performed similar to large volume flow electroporation strategies similar to methods described with the above described constraints (Li et al., 2002; Geng et al., 2010).

### Example 43: In Vivo Delivery Using Lipoplexes

### A. Human EPO Modified RNA Lipoplex

[1303] A formulation containing 100 μg of modified human erythropoietin mRNA (mRNA shown in SEQ ID NO: 251436; polyA tail of approximately 160 nucleotides not shown in sequence; 5′cap, Cap1) (EPO; fully modified 5-methylcytosine; N1-methyl-pseudouridine) was lipoplexed with 30% by volume of RNAIMAX™ (Lipoplex-h-Epo-46; Generation 2 or Gen2) in 50-70 μL delivered intramuscularly to four C57/BL6 mice. Other groups consisted of mice receiving an injection of the lipoplexed modified luciferase mRNA (Lipoplex-luc) (IVT cDNA sequence shown in SEQ ID NO: 251442; mRNA sequence shown in SEQ ID NO: 251443, poly A tail of approximately 160 nucleotides not shown in sequence, 5′cap, Cap1, fully modified with 5-methylcytosine at each cytosine and pseudouridine replacement at each uridine site) which served as a control containing 100 μg of modified luciferase mRNA was lipoplexed with 30% by volume of RNAiMAX™ or mice receiving an injection of the formulation buffer as negative control at a dose volume of 65 ul. 13 hours after the intramuscular injection, serum was collected from each mouse to measure the amount of human EPO protein in the mouse serum by human EPO ELISA and the results are shown in Table 61.

TABLE 61
Human EPO Production (IM Injection Route)

| Formualtion | Average |
|---|---|
| Lipoplex-h-Epo-46 | 251.95 |
| Lipoplex-Luc | 0 |
| Formulation Buffer | 0 |

### B. Human G-CSF Modified RNA Lipoplex

[1304] A formulation containing 100 μg of one of two versions of modified human G-CSF mRNA (mRNA sequence shown in SEQ ID NO: 251433; polyA tail of approximately 160 nucleotides not shown in sequence; 5′cap, Cap1) (G-CSF fully modified with 5-methylcytosine and pseudouridine (G-CSF) or G-CSF fully modified with 5-methylcytosine and N1-methyl-pseudouridine (G-CSF-N1) lipoplexed with 30% by volume of RNAIMAX™ and delivered in 150 μL intramuscularly (I.M), in 150 μL subcutaneously (S.C) and in 225 μL intravenously (I.V) to C57/BL6 mice.

[1305] Three control groups were administered either 100 μg of modified luciferase mRNA (IVT cDNA sequence shown in SEQ ID NO: 251442; mRNA sequence shown in SEQ ID NO: 251443, polyA tail of approximately 160 nucleotides not shown in sequence, 5′cap, Cap1, fully modified with 5-methylcytosine at each cytosine and pseudouridine replacement at each uridine site) intramuscularly (Luc-unsp I.M.) or 150 μg of modified luciferase mRNA intravenously (Luc-unsp I.V.) or 150 μL of the formulation buffer intramuscularly (Buffer I.M.). 6 hours after administration of a formulation, serum was collected from each mouse to measure the amount of human G-CSF protein in the mouse serum by human G-CSF ELISA and the results are shown in Table 62.

[1306] These results demonstrate that both 5-methylcytosine/pseudouridine and 5-methylcytosine/N1-methyl-pseudouridine modified human G-CSF mRNA can result in specific human G-CSF protein expression in serum when delivered via I.V. or I.M. route of administration in a lipoplex formulation.

TABLE 62
Human G-CSF in Serum (I.M., I.V., S.C. Injection Route)

| Formulation | Route | G-CSF (pg/ml) |
|---|---|---|
| G-CSF | I.M. | 85.6 |
| G-CSF N1 | I.M. | 40.1 |
| G-CSF | S.C. | 3.9 |
| G-CSF N1 | S.C. | 0.0 |
| G-CSF | I.V. | 31.0 |
| G-CSF N1 | I.V. | 6.1 |
| Luc-unsp | I.M. | 0.0 |
| Luc-unsp | I.V. | 0.0 |
| Buffer | I.M. | 0.0 |

### C. Human G-CSF Modified RNA Lipoplex Comparison

[1307] A formulation containing 100 μg of either modified human G-CSF mRNA lipoplexed with 30% by volume of RNAIMAX™ with a 5-methylcytosine (5mc) and a pseudouridine (ψ) modification (G-CSF-Gen1-Lipoplex), modified human G-CSF mRNA with a 5mc and ψ modification in saline (G-CSF-Gen1-Saline), modified human G-CSF mRNA with a N1-5-methylcytosine (N1-5mc) and a ψ modification lipoplexed with 30% by volume of RNAIMAX™ (G-CSF-Gen2-Lipoplex), modified human G-CSF mRNA with a N1-5mc and ψ modification in saline (G-CSF-Gen2-Saline), modified luciferase with a 5mc and ψ modification lipoplexed with 30% by volume of RNAIMAX™ (Luc-Lipoplex), or modified luciferase mRNA with a a 5mc and ψ modification in saline (Luc-Saline) was delivered intramuscularly (I.M.) or subcutaneously (S.C.) and a control group for each method of administration was giving a dose of 80 μL of the formulation buffer (F. Buffer) to C57/BL6 mice. 13 hours post injection serum and tissue from the site of injection were collected from each mouse and analyzed by G-CSF ELISA to compare human G-CSF protein levels. The results of the human G-CSF protein in mouse serum from the intramuscular administration, and the subcutaneous administration results are shown in Table 63.

[1308] These results demonstrate that 5-methylcytosine/pseudouridine and 5-methylcytosine/N1-methyl-pseudouridine modified human G-CSF mRNA can result in specific human G-CSF protein expression in serum when delivered via I.M. or S.C. route of administration whether in a saline formulation or in a lipoplex formulation. As shown in Table 63, 5-methylcytosine/N1-methyl-pseudouridine modified human G-CSF mRNA generally demonstrates increased human G-CSF protein production relative to 5-methylcytosine/pseudouridine modified human G-CSF mRNA.

TABLE 63
Human G-CSF Protein in Mouse Serum

| | G-CSF (pg/ml) | |
|---|---|---|
| Formulation | I.M. Injection Route | S.C. Injenction Route |
| G-CSF-Gen1-Lipoplex | 13.988 | 42.855 |
| G-CSF-Gen1-saline | 9.375 | 4.614 |
| G-CSF-Gen2-lipoplex | 75.572 | 32.107 |
| G-CSF-Gen2-saline | 20.190 | 45.024 |
| Luc lipoplex | 0 | 3.754 |
| Luc saline | 0.0748 | 0 |
| F. Buffer | 4.977 | 2.156 |

D. mCherry Modified RNA Lipoplex Comparison

### Intramuscular and Subcutaneous Administration

[1309] A formulation containing 100 μg of either modified mCherry mRNA (mRNA sequence shown in SEQ ID NO: 251434; polyA tail of approximately 160 nucleotides not shown in sequence; 5′cap, Cap1) lipoplexed with 30% by volume of RNAIMAX™ or modified mCherry mRNA in saline is delivered intramuscularly and subcutaneously to mice. A formulation buffer is also administered to a control group of mice either intramuscularly or subcutaneously. The site of injection on the mice may be collected 17 hours post injection for sectioning to determine the cell type(s) responsible for producing protein.

### Intravitreal Administration

[1310] A formulation containing 10 μg of either modified mCherry mRNA lipoplexed with RNAIMAX™, modified mCherry mRNA in a formulation buffer, modified luciferase mRNA lipoplexed with RNAMAX™, modified luciferase mRNA in a formulation buffer can be administered by intravitreal injection (IVT) in rats in a dose volume of 5 μl/eye. A formulation buffer is also administered by IVT to a control group of rats in a dose volume of 5 μl/eye. Eyes from treated rats can be collected after 18 hours post injection for sectioning and lysating to determine whether mmRNA can be effectively delivered in vivo to the eye and result in protein production, and to also determine the cell type(s) responsible for producing protein in vivo.

### Intranasal Administration

[1311] A formulation containing 100 μg of either modified mCherry mRNA lipoplexed with 30% by volume of RNAIMAX™, modified mCherry mRNA in saline, modified luciferase mRNA lipoplexed with 30% by volume of RNAIMAX™ or modified luciferase mRNA in saline is delivered intranasally. A formulation buffer is also administered to a control group intranasally. Lungs may be collected about 13 hours post instillation for sectioning (for those receiving mCherry mRNA) or homogenization (for those receiving luciferase mRNA). These samples will be used to determine whether mmRNA can be effectively delivered in vivo to the lungs and result in protein production, and to also determine the cell type(s) responsible for producing protein in vivo.

### Example 44: In Vivo Delivery Using Varying Lipid Ratios

[1312] Modified mRNA was delivered to C57/BL6 mice to evaluate varying lipid ratios and the resulting protein expression. Formulations of 100 μg modified human EPO mRNA (mRNA shown in SEQ ID NO: 251436; polyA tail of approximately 160 nucleotides not shown in sequence; 5′cap, Cap1; fully modified with 5-methylcytosine and pseudouridine) lipoplexed with 10%, 30% or 50% RNAIMAX™, 100 μg modified luciferase mRNA (IVT cDNA sequence shown in SEQ ID NO: 251442; mRNA sequence shown in SEQ ID NO: 251443, polyA tail of approximately 160 nucleotides not shown in sequence, 5′cap, Cap1, fully modified with 5-methylcytosine at each cytosine and pseudouridine replacement at each uridine site) lipoplexed with 10%, 30% or 50% RNAIMAX™ or a formulation buffer were administered intramuscularly to mice in a single 70 μl dose. Serum was collected 13 hours post injection to undergo a human EPO ELISA to determine the human EPO protein level in each mouse. The results of the human EPO ELISA, shown in Table 64, show that modified human EPO expressed in the muscle is secreted into the serum for each of the different percentage of RNAIMAX™

TABLE 64
Human EPO Protein in Mouse Serum (IM Injection Route)

| Formulation | EPO (pg/ml) |
|---|---|
| Epo + 10% RNAiMAX | 11.4 |
| Luc + 10% RNAiMAX | 0 |
| Epo + 30% RNAiMAX | 27.1 |
| Luc + 30% RNAiMAX | 0 |
| Epo + 50% RNAiMAX | 19.7 |
| Luc + 50% RNAiMAX | 0 |
| F. Buffer | 0 |

### Example 45: Intramuscular and Subcutaneous In Vivo Delivery in Mammals

[1313] Modified human EPO mRNA (mRNA sequence shown in SEQ ID NO: 251436; polyA tail of approximately 160 nucleotides not shown in sequence; 5′cap, Cap1; fully modified with 5-methylcytosine and pseudouridine) formulated in formulation buffer was delivered to either C57/BL6 mice or Sprague-Dawley rats to evaluate the dose dependency on human EPO production. Rats were intramuscularly injected with 50 μl of the modified human EPO mRNA (h-EPO), modified luciferase mRNA (Luc) (IVT cDNA sequence shown in SEQ ID NO: 251442; mRNA sequence shown in SEQ ID NO: 251443, polyA tail of approximately 160 nucleotides not shown in sequence, 5′cap, Cap1, fully modified with 5-methylcytosine at each cytosine and pseudouridine replacement at each uridine site) or the formulation buffer (F.Buffer) as described in the dosing chart Table 65.

[1314] Mice were intramuscularly or subcutaneously injected with 50 μl of the modified human EPO mRNA (h-EPO), modified luciferase mRNA (Luc) or the formulation buffer (F.Buffer) as described in the dosing chart Table 66. 13 hours post injection blood was collected and serum was analyzed to determine the amount human EPO for each mouse or rat. The average and geometric mean in pg/ml for the rat study are also shown in Table 65.

TABLE 65
Rat Study

| | | Dose | Avg. | Geometric- |
|---|---|---|---|---|
| | Group | (ug) | pg/ml | mean pg/ml |
| h-EPO | G#1 | 150 | 67.7 | 67.1 |
| h-EPO | G#2 | 100 | 79.4 | 66.9 |
| h-EPO | G#3 | 50 | 101.5 | 85.4 |
| h-EPO | G#4 | 10 | 46.3 | 31.2 |
| h-EPO | G#5 | 1 | 28.7 | 25.4 |
| Luc | G#6 | 100 | 24.5 | 22.4 |
| F. Buffer | G#7 | — | 18.7 | 18.5 |

TABLE 66
Mouse Study

| | | | | Average Level |
|---|---|---|---|---|
| Route | Treatment | Group | Dose | in serum pg/ml |
| IM | h-EPO | 1 | 100 μg | 96.2 |
| IM | h-EPO | 2 | 50 μg | 63.5 |
| IM | h-EPO | 3 | 25 μg | 18.7 |
| IM | h-EPO | 4 | 10 μg | 25.9 |
| IM | h-EPO | 5 | 1 μg | 2.6 |
| IM | Luc | 6 | 100 μg | 0 |
| IM | F. Buffer | 7 | — | 1.0 |
| SC | h-EPO | 1 | 100 μg | 72.0 |
| SC | Luc | 2 | 100 μg | 26.7 |
| SC | F. Buffer | 3 | — | 17.4 |

### Example 46: Duration of Activity after Intramuscular In Vivo Delivery

[1315] Modified human EPO mRNA (mRNA sequence shown in SEQ ID NO: 251436; polyA tail of approximately 160 nucleotides not shown in sequence; 5′cap, Cap1; fully modified with 5-methylcytosine and pseudouridine) formulated in formulation buffer was delivered to Sprague-Dawley rats to determine the duration of the dose response. Rats were intramuscularly injected with 50 μl of the modified human EPO mRNA (h-EPO), modified luciferase mRNA (IVT cDNA sequence shown in SEQ ID NO: 251442; mRNA sequence shown in SEQ ID NO: 251443, polyA tail of approximately 160 nucleotides not shown in sequence, 5′cap, Cap1, fully modified with 5-methylcytosine at each cytosine and pseudouridine replacement at each uridine site) (Luc) or the formulation buffer (F.Buffer) as described in the dosing chart Table 67. The rats were bled 2, 6, 12, 24, 48 and 72 hours after the intramuscular injection to determine the concentration of human EPO in serum at a given time. The average and geometric mean in pg/ml for this study are also shown in Table 67.

TABLE 67
Dosing Chart

| | | Dose | Avg. | Geometric- |
|---|---|---|---|---|
| | Group | (ug) | pg/ml | mean (pg/ml) |
| h-EPO | 2 hour | 100 | 59.6 | 58.2 |
| h-EPO | 6 hour | 100 | 68.6 | 55.8 |
| h-EPO | 12 hour | 100 | 87.4 | 84.5 |
| h-EPO | 24 hour | 100 | 108.6 | 95.3 |
| h-EPO | 48 hour | 100 | 77.9 | 77.0 |
| h-EPO | 72 hour | 100 | 80.1 | 75.8 |
| Luc | 24, 48 | 100 | 37.2 | 29.2 |
| | and 72 | | | |
| | hour | | | |
| F. Buffer | 24, 48 | — | 48.9 | 10.4 |
| | and 72 | | | |
| | hour | | | |

### Example 47: Routes of Administration

[1316] Further studies were performed to investigate dosing using different routes of administration. Following the protocol outlined in Example 35, 4 mice per group were dosed intramuscularly (I.M.), intravenously (IV) or subcutaneously (S.C.) by the dosing chart outlined in Table 68. Serum was collected 13 hours post injection from all mice, tissue was collected from the site of injection from the intramuscular and subcutaneous group and the spleen, liver and kidneys were collected from the intravenous group. The results from the intramuscular group and the subcutaneous group results are shown in Table 69.

TABLE 68
Dosing Chart

| | | | | Total | | Dosing |
|---|---|---|---|---|---|---|
| Group | Treatment | Route | Dose of mmRNA | Dose | | Vehicle |
| 1 | Lipoplex-human EPO mmRNA | I.M. | 4 × 100 ug + 30% | 4 × 70 | ul | Lipoplex |
| | | | Lipoplex | | | |
| 2 | Lipoplex-human EPO mmRNA | I.M. | 4 × 100 ug | 4 × 70 | ul | Buffer |
| 3 | Lipoplex-human EPO mmRNA | S.C. | 4 × 100 ug + 30% | 4 × 70 | ul | Lipoplex |
| | | | Lipoplex | | | |
| 4 | Lipoplex-human EPO mmRNA | S.C. | 4 × 100 ug | 4 × 70 | ul | Buffer |
| 5 | Lipoplex-human EPO mmRNA | I.V. | 200 ug + 30% Lipoplex | 140 | ul | Lipoplex |
| 6 | Lipoplexed-Luciferase mmRNA | I.M. | 100 ug + 30% Lipoplex | 4 × 70 | ul | Lipoplex |
| 7 | Lipoplexed-Luciferase mmRNA | I.M. | 100 ug | 4 × 70 | ul | Buffer |
| 8 | Lipoplexed-Luciferase mmRNA | S.C. | 100 ug + 30% Lipoplex | 4 × 70 | ul | Lipoplex |
| 9 | Lipoplexed-Luciferase mmRNA | S.C. | 100 ug | 4 × 70 | ul | Buffer |
| 10 | Lipoplexed-human EPO mmRNA | I.V. | 200 ug + 30% Lipoplex | 140 | ul | Lipoplex |
| 11 | Formulation Buffer | I.M. | 4 × multi dosing | 4 × 70 | ul | Buffer |

TABLE 69
Human EPO Protein in Mouse Serum (I.M. Injection Route)

EPO (pg/ml)

| Formulation | I.M. Injection Route | S.C. Injection Route |
|---|---|---|
| Epo-Lipoplex | 67.115 | 2.154 |
| Luc-Lipoplex | 0 | 0 |
| Epo-Saline | 100.891 | 11.37 |
| Luc-Saline | 0 | 0 |
| Formulation Buffer | 0 | 0 |

### Example 48. Rapidly Eliminated Lipid Nanoparticle (reLNP) Studies

A. Formulation of Modified RNA reLNPs

[1317] Solutions of synthesized lipid, 1,2-distearoyl-3-phosphatidylcholine (DSPC) (Avanti Polar Lipids, Alabaster, AL), cholesterol (Sigma-Aldrich, Taufkirchen, Germany), and α-[3′-(1,2-dimyristoyl-3-propanoxy)-carboxamide-propyl]-ψ-methoxy-polyoxyethylene (PEG-c-DOMG) (NOF, Bouwelven, Belgium) are prepared and stored at −20° C. The synthesized lipid is selected from DLin-DMA with an internal ester, DLin-DMA with a terminal ester, DLin-MC3-DMA-internal ester, and DLin-MC3-DMA with a terminal ester. The reLNPs are combined to yield a molar ratio of 50:10:38.5:1.5 (reLNP: DSPC: Cholesterol: PEG-c-DOMG). Formulations of the reLNPs and modified mRNA are prepared by combining the lipid solution with the modified mRNA solution at total lipid to modified mRNA weight ratio of 10:1, 15:1, 20:1 and 30:1.

### B. Characterization of Formulations

[1318] A Zetasizer Nano ZS (Malvern Instruments Ltd, Malvern, Worcestershire, UK) is used to determine the particle size, the polydispersity index (PDI) and the zeta potential of the modified mRNA nanoparticles in 1×PBS in determining particle size and 15 mM PBS in determining zeta potential.

[1319] Ultraviolet-visible spectroscopy is used to determine the concentration of modified mRNA nanoparticle formulation. After mixing, the absorbance spectrum of the solution is recorded between 230 nm and 330 nm on a DU 800 spectrophotometer (Beckman Coulter, Beckman Coulter, Inc., Brea, CA). The modified RNA concentration in the nanoparticle formulation is calculated based on the extinction coefficient of the modified RNA used in the formulation and on the difference between the absorbance at a wavelength of 260 nm and the baseline value at a wavelength of 330 nm.

[1320] QUANT-IT™ RIBOGREEN® RNA assay (Invitrogen Corporation Carlsbad, CA) is used to evaluate the encapsulation of modified RNA by the nanoparticle. The samples are diluted, transferred to a polystyrene 96 well plate, then either a TE buffer or a 2% Triton X-100 solution is added. The plate is incubated and the RIBOGREEN® reagent is diluted in TE buffer, and of this solution is added to each well. The fluorescence intensity is measured using a fluorescence plate reader (Wallac Victor 1420 Multilablel Counter; Perkin Elmer, Waltham, MA) The fluorescence values of the reagent blank are subtracted from each of the samples and the percentage of free modified RNA is determined by dividing the fluorescence intensity of the intact sample by the fluorescence value of the disrupted sample.

### C. In Vitro Incubation

[1321] Human embryonic kidney epithelial (HEK293) and hepatocellular carcinoma epithelial (HepG2) cells (LGC standards GmbH, Wesel, Germany) are seeded on 96-well plates (Greiner Bio-one GmbH, Frickenhausen, Germany) and plates for HEK293 cells are precoated with collagen type1. HEK293 are seeded at a density of about 30,000 and HepG2 are seeded at a density of about 35,000 cells per well in 100 μl cell culture medium. Formulations containing mCherry mRNA (mRNA sequence shown in SEQ ID NO: 251434; polyA tail of approximately 160 nucleotides not shown in sequence; 5′cap, Cap1) are added directly after seeding the cells and incubated. The mCherry cDNA with the T7 promoter, 5′untranslated region (UTR) and 3′ UTR used in in vitro transcription (IVT) is given in SEQ ID NO: 251435.

[1322] Cells are harvested by transferring the culture media supernatants to a 96-well Pro-Bind U-bottom plate (Beckton Dickinson GmbH, Heidelberg, Germany). Cells are trypsinized with ½ volume Trypsin/EDTA (Biochrom AG, Berlin, Germany), pooled with respective supernatants and fixed by adding one volume PBS/2% FCS (both Biochrom AG, Berlin, Germany)/0.5% formaldehyde (Merck, Darmstadt, Germany). Samples are then submitted to a flow cytometer measurement with an excitation laser and a filter for PE-Texas Red in a LSRII cytometer (Beckton Dickinson GmbH, Heidelberg, Germany). The mean fluorescence intensity (MFI) of all events and the standard deviation of four independent wells are presented in for samples analyzed.

### D. In Vivo Formulation Studies

[1323] Mice are administered intravenously a single dose of a formulation containing a modified mRNA and a reLNP. The modified mRNA administered to the mice is selected from G-CSF (mRNA sequence shown in SEQ ID NO: 251433; polyA tail of approximately 160 nucleotides not shown in sequence; 5′cap, Cap1), Factor IX (mRNA shown in SEQ ID NO: 251437; polyA tail of approximately 160 nucleotides not shown in sequence; 5′cap, Cap1) or mCherry (mRNA sequence shown in SEQ ID NO: 251434; poly A tail of approximately 160 nucleotides not shown in sequence; 5′cap, Cap1).

[1324] The mice are injected with 100 μg, 10 ug or 1 ug of the formulated modified mRNA and are sacrificed 8 hours after they are administered the formulation. Serum from the mice administered formulations containing human G-CSF modified mRNA are measured by specific G-CSF ELISA and serum from mice administered human Factor IX modified RNA is analyzed by specific factor IX ELISA or chromogenic assay. The liver and spleen from the mice administered with mCherry modified mRNA are analyzed by immunohistochemistry (IHC) or fluorescence-activated cell sorting (FACS). As a control, a group of mice are not injected with any formulation and their serum and tissue are collected analyzed by ELISA, FACS and/or IHC.

### Example 49. In Vitro Transfection of VEGF-A

[1325] Human vascular endothelial growth factor-isoform A (VEGF-A) modified mRNA (mRNA sequence shown in SEQ ID NO: 251446; polyA tail of approximately 160 nucleotides not shown in sequence; 5′cap, Cap1) was transfected via reverse transfection in Human Keratinocyte cells in 24 multi-well plates. Human Keratinocytes cells were grown in EPILIFE® medium with Supplement S7 from Invitrogen (Carlsbad, CA) until they reached a confluence of 50-70%. The cells were transfected with 0, 46.875, 93.75, 187.5, 375, 750, and 1500 ng of modified mRNA (mmRNA) encoding VEGF-A which had been complexed with RNAIMAX™ from Invitrogen (Carlsbad, CA). The RNA: RNAIMAX™ complex was formed by first incubating the RNA with Supplement-free EPILIFE® media in a 5× volumetric dilution for 10 minutes at room temperature. In a second vial, RNAIMAX™ reagent was incubated with Supplement-free EPILIFE® Media in a 10× volumetric dilution for 10 minutes at room temperature. The RNA vial was then mixed with the RNAIMAX™ vial and incubated for 20-30 minutes at room temperature before being added to the cells in a drop-wise fashion.

[1326] The fully optimized mRNA encoding VEGF-A (mRNA sequence shown in SEQ ID NO: 251446; polyA tail of approximately 160 nucleotides not shown in sequence; 5′cap, Cap1) transfected with the Human Keratinocyte cells included modifications during translation such as natural nucleoside triphosphates (NTP), pseudouridine at each uridine site and 5-methylcytosine at each cytosine site (pseudo-U/5mC), and N1-methyl-pseudouridine at each uridine site and 5-methylcytosine at each cytosine site (N1-methyl-Pseudo-U/5mC). Cells were transfected with the mmRNA encoding VEGF-A and secreted VEGF-A concentration (ρg/ml) in the culture medium was measured at 6, 12, 24, and 48 hours post-transfection for each of the concentrations using an ELISA kit from Invitrogen (Carlsbad, CA) following the manufacturers recommended instructions. These data, shown in Table 70 and FIGS. 6A, 6B and 6C, show that modified mRNA encoding VEGF-A is capable of being translated in Human Keratinocyte cells and that VEGF-A is transported out of the cells and released into the extracellular environment.

TABLE 70
VEGF-A Dosing and Protein Secretion

| | | | | |
|---|---|---|---|---|
| | 6 hours | 12 hours | 24 hours | 48 hours |
| Dose (ng) | (pg/ml) | (pg/ml) | (pg/ml) | (pg/ml) |

VEGF-A Dose Containing Natural NTPs

| | | | | |
|---|---|---|---|---|
| 46.875 | 10.37 | 18.07 | 33.90 | 67.02 |
| 93.75 | 9.79 | 20.54 | 41.95 | 65.75 |
| 187.5 | 14.07 | 24.56 | 45.25 | 64.39 |
| 375 | 19.16 | 37.53 | 53.61 | 88.28 |
| 750 | 21.51 | 38.90 | 51.44 | 61.79 |
| 1500 | 36.11 | 61.90 | 76.70 | 86.54 |

VEGF-A Dose Containing Pseudo-U/5mC

| | | | | |
|---|---|---|---|---|
| 46.875 | 10.13 | 16.67 | 33.99 | 72.88 |
| 93.75 | 11.00 | 20.00 | 46.47 | 145.61 |
| 187.5 | 16.04 | 34.07 | 83.00 | 120.77 |
| 375 | 69.15 | 188.10 | 448.50 | 392.44 |
| 750 | 133.95 | 304.30 | 524.02 | 526.58 |
| 1500 | 198.96 | 345.65 | 426.97 | 505.41 |

VEGF-A Dose Containing N1-methyl-Pseudo-U/5mC

| | | | | |
|---|---|---|---|---|
| 46.875 | 0.03 | 6.02 | 27.65 | 100.42 |
| 93.75 | 12.37 | 46.38 | 121.23 | 167.56 |
| 187.5 | 104.55 | 365.71 | 1025.41 | 1056.91 |
| 375 | 605.89 | 1201.23 | 1653.63 | 1889.23 |
| 750 | 445.41 | 1036.45 | 1522.86 | 1954.81 |
| 1500 | 261.61 | 714.68 | 1053.12 | 1513.39 |

### Example 50. In Vivo Studies of Factor IX

[1327] Human Factor IX mmRNA (Gen1; fully modified 5-methycytosine and pseudouridine) formulated in formulation buffer was delivered to mice via intramuscular injection. The results demonstrate that Factor IX protein was elevated in serum as measured 13 hours after administration.

[1328] In this study, mice (N=5 for Factor IX, N=3 for Luciferase or Buffer controls) were intramuscularly injected with 50 μl of the Factor IX mmRNA (mRNA sequence shown in SEQ ID NO: 251437; polyA tail of approximately 160 nucleotides not shown in sequence; 5′cap, Cap1), Luciferase (IVT cDNA sequence shown in SEQ ID NO: 251442; mRNA sequence shown in SEQ ID NO: 251443, polyA tail of approximately 160 nucleotides not shown in sequence, 5′cap, Cap1, fully modified with 5-methylcytosine at each cytosine and pseudouridine replacement at each uridine site) or the formulation buffer (F.Buffer) at 2×100 ug/mouse. The mice were bled at 13 hours after the intramuscular injection to determine the concentration of human the polypeptide in serum in pg/mL. The results revealed that administration of Factor IX mmRNA resulted in levels of 1600 pg/mL at 13 hours as compared to less than 100 pg/mL of Factor IX for either Luciferase or buffer control administration.

### Example 51. Multi-Site Administration: Intramuscular and Subcutaneous

[1329] Human G-CSF modified mRNA (mRNA sequence shown in SEQ ID NO: 251433; polyA tail of approximately 160 nucleotides not shown in sequence; 5′cap, Cap1) modified as either Gen1 or Gen2 (5-methylcytosine (5mc) and a pseudouridine (ψ) modification, G-CSF-Gen1; or N1-5-methylcytosine (N1-5mc) and a ψ modification, G-CSF-Gen2) and formulated in formulation buffer were delivered to mice via intramuscular (IM) or subcutaneous (SC) injection. Injection of four doses or 2×50 ug (two sites) daily for three days (24 hrs interval) was performed. The fourth dose was administered 6 hrs before blood collection and CBC analysis. Controls included Luciferase (IVT cDNA sequence shown in SEQ ID NO: 251442; mRNA sequence shown in SEQ ID NO: 251443, polyA tail of approximately 160 nucleotides not shown in sequence, 5′cap, Cap1, fully modified with 5-methylcytosine at each cytosine and pseudouridine replacement at each uridine site) or the formulation buffer (F.Buffer). The mice were bled at 72 hours after the first mRNA injection (6 hours after the last modified mRNA dose) to determine the effect of mRNA-encoded human G-CSF on the neutrophil count. The dosing regimen is shown in Table 71 as are the resulting neutrophil counts (thousands/uL). In Table 71, an asterisk (*) indicates statistical significance at p<0.05.

[1330] For intramuscular administration, the data reveal a four fold increase in neutrophil count above control at day 3 for the Gen1 G-CSF mRNA and a two fold increase for the Gen2 G-CSF mmRNA. For subcutaneous administration, the data reveal a two fold increase in neutrophil count above control at day 3 for the Gen2 G-CSF mRNA.

[1331] These data demonstrate that both 5-methylcytidine/pseudouridine and 5-methylcytidine/N1-methyl-pseudouridine-modified mRNA can be biologically active, as evidenced by specific increases in blood neutrophil counts.

TABLE 71
Dosing Regimen

| | | | | Dose | Dose Vol. | Dosing | Neutrophil |
|---|---|---|---|---|---|---|---|
| Gr. | Treatment | Route | N= | (μg/mouse) | (μl/mouse) | Vehicle | Thous/uL |
| 1 | G-CSF (Gen1) | I.M | 5 | 2 × 50 ug (four | 50 | F. buffer | 840* |
| | | | | doses) | | | |
| 2 | G-CSF (Gen1) | S.C | 5 | 2 × 50 ug (four | 50 | F. buffer | 430 |
| | | | | doses) | | | |
| 3 | G-CSF (Gen2) | I.M | 5 | 2 × 50 ug (four | 50 | F. buffer | 746* |
| | | | | doses) | | | |
| 4 | G-CSF (Gen2) | S.C | 5 | 2 × 50 ug (four | 50 | F. buffer | 683 |
| | | | | doses) | | | |
| 5 | Luc (Gen1) | I.M. | 5 | 2 × 50 ug (four | 50 | F. buffer | 201 |
| | | | | doses) | | | |
| 6 | Luc (Gen1) | S.C. | 5 | 2 × 50 ug (four | 50 | F. buffer | 307 |
| | | | | doses) | | | |
| 7 | Luc (Gen2) | I.M | 5 | 2 × 50 ug (four | 50 | F. buffer | 336 |
| | | | | doses) | | | |
| 8 | Luc (Gen2) | S.C | 5 | 2 × 50 ug (four | 50 | F. buffer | 357 |
| | | | | doses) | | | |
| 9 | F. Buffer | I.M | 4 | 0 (four doses) | 50 | F. buffer | 245 |
| 10 | F. Buffer | S.C. | 4 | 0 (four doses) | 50 | F. buffer | 509 |
| 11 | Untreated | — | 4 | | | — | 312 |

### Example 52. Intravenous Administration

[1332] Human G-CSF modified mRNA (mRNA sequence shown in SEQ ID NO: 251433; polyA tail of approximately 160 nucleotides not shown in sequence; 5′cap, Cap1) modified with 5-methylcytosine (5mc) and a pseudouridine (ψ) modification (Gen 1); or having no modifications and formulated in 10% lipoplex (RNAiMax) were delivered to mice at a dose of 50 ug RNA and in a volume of 100 μl via intravenous (IV) injection at days 0, 2 and 4. Neutrophils were measured at days 1, 5 and 8. Controls included non-specific mammalian RNA or the formulation buffer alone (F.Buffer). The mice were bled at days 1, 5 and 8 to determine the effect of modified mRNA-encoded human G-CSF to increase neutrophil count. The dosing regimen is shown in Table 72 as are the resulting neutrophil counts (thousands/uL; K/uL).

[1333] For intravenous administration, the data reveal a four to five fold increase in neutrophil count above control at day 5 with G-CSF modified mRNA but not with unmodified G-CSF mRNA or non-specific controls. Blood count returned to baseline four days after the final injection. No other changes in leukocyte populations were observed.

[1334] In Table 72, an asterisk (*) indicates statistical significance at p<0.001 compared to buffer.

[1335] These data demonstrate that lipoplex-formulated 5-methylcytidine/pseudouridine-modified mRNA can be biologically active, when delivered through an I.V. route of administration as evidenced by specific increases in blood neutrophil counts. No other cell subsets were significantly altered. Unmodified G-CSF mRNA similarly administered showed no pharmacologic effect on neutrophil counts.

TABLE 72
Dosing Regimen

| | | | | Dose Vol. | Dosing | Neutrophil |
|---|---|---|---|---|---|---|
| Gr. | Day | Treatment | N= | (μl/mouse) | Vehicle | K/uL |
| 1 | 1 | G-CSF (Gen1) | 5 | 100 | 10% lipoplex | 2.91 |
| 2 | 5 | G-CSF (Gen1) | 5 | 100 | 10% lipoplex | 5.32* |
| 3 | 8 | G-CSF (Gen1) | 5 | 100 | 10% lipoplex | 2.06 |
| 4 | 1 | G-CSF (no | 5 | 100 | 10% lipoplex | 1.88 |
| | | modification) | | | | |
| 5 | 5 | G-CSF (no | 5 | 100 | 10% lipoplex | 1.95 |
| | | modification) | | | | |
| 6 | 8 | G-CSF (no | 5 | 100 | 10% lipoplex | 2.09 |
| | | modification) | | | | |
| 7 | 1 | RNA control | 5 | 100 | 10% lipoplex | 2.90 |
| 8 | 5 | RNA control | 5 | 100 | 10% lipoplex | 1.68 |
| 9 | 8 | RNA control | 4 | 100 | 10% lipoplex | 1.72 |
| 10 | 1 | F. Buffer | 4 | 100 | 10% lipoplex | 2.51 |
| 11 | 5 | F. Buffer | 4 | 100 | 10% lipoplex | 1.31 |
| 12 | 8 | F. Buffer | 4 | 100 | 10% lipoplex | 1.92 |

### Example 53. Saline Formulation: Intramuscular Administration

### A. Protein Expression

[1336] Human G-CSF modified mRNA (mRNA sequence shown in SEQ ID NO: 251433; polyA tail of approximately 160 nucleotides not shown in sequence; 5′cap, Cap1) and human EPO mmRNA (mRNA sequence shown in SEQ ID NO: 251436; poly A tail of approximately 160 nucleotides not shown in sequence; 5′cap, Cap1); G-CSF modified mRNA (modified with 5-methylcytosine (5mc) and pseudouridine (ψ)) and EPO modified mRNA (modified with N1-5-methylcytosine (N1-5mc) and ψ modification), were formulated in formulation buffer (150 mM sodium chloride, 2 mM calcium chloride, 2 mM phosphate, 0.5 mM EDTA at a pH of 6.5) and delivered to mice via intramuscular (IM) injection at a dose of 100 ug.

[1337] Controls included Luciferase (IVT cDNA sequence shown in SEQ ID NO: 251442; mRNA sequence shown in SEQ ID NO: 251443, polyA tail of approximately 160 nucleotides not shown in sequence, 5′cap, Cap1, fully modified with 5-methylcytosine at each cytosine and pseudouridine replacement at each uridine site) or the formulation buffer (F.Buffer). The mice were bled at 13 hours after the injection to determine the concentration of the human polypeptide in serum in pg/mL. (G-CSF groups measured human G-CSF in mouse serum and EPO groups measured human EPO in mouse serum). The data are shown in Table 73.

TABLE 73
Dosing Regimen

| | | | Dose | | Average |
|---|---|---|---|---|---|
| | | | Vol. | Dosing | Protein Product |
| Group | Treatment | N= | (μl/mouse) | Vehicle | pg/mL, serum |
| G-CSF | G-CSF | 5 | 50 | Saline | 19.8 |
| G-CSF | Luciferase | 5 | 50 | Saline | 0.5 |
| G-CSF | F. buffer | 5 | 50 | F. buffer | 0.5 |
| EPO | EPO | 5 | 50 | Saline | 191.5 |
| EPO | Luciferase | 5 | 50 | Saline | 15.0 |
| EPO | F. buffer | | | F. buffer | 4.8 |

### B. Dose Response

[1338] Human EPO modified mRNA (mRNA sequence shown in SEQ ID NO: 251436; polyA tail of approximately 160 nucleotides not shown in sequence; 5′cap, Cap1; fully modified with 5-methylcytosine and pseudouridine) were formulated in formulation buffer and delivered to mice via intramuscular (IM) injection.

[1339] Controls included Luciferase (mRNA sequence shown in SEQ ID NO: 251443, polyA tail of approximately 160 nucleotides not shown in sequence, 5′cap, Cap1, fully modified with 5-methylcytosine and pseudouridine) or the formulation buffer (F.Buffer). The mice were bled at 13 hours after the injection to determine the concentration of the human polypeptide in serum in pg/mL. The dose and expression are shown in Table 74.

TABLE 74
Dosing Regimen and Expression

| | | Average |
|---|---|---|
| | Dose Vol. | Protein Product |
| Treatment | (μl/mouse) | pg/mL, serum |
| EPO | 100 | 96.2 |
| EPO | 50 | 63.5 |
| EPO | 25 | 18.7 |
| EPO | 10 | 25.9 |
| EPO | 1 | 2.6 |
| Luciferase | 100 | 0.0 |
| F. buffer | 100 | 1.0 |

### Example 54. EPO Multi-Dose/Multi-Administration

[1340] Studies utilizing multiple intramuscular injection sites at one time point were designed and performed.

[1341] The design of a single multi-dose experiment involved using human erythropoietin (EPO) mmRNA (mRNA sequence shown in SEQ ID NO: 251436; polyA tail of approximately 160 nucleotides not shown in sequence; 5′cap, Cap1) or G-CSF mmRNA (mRNA sequence shown in SEQ ID NO: 251433; polyA tail of approximately 160 nucleotides not shown in sequence; 5′cap, Cap1) administered in formulation buffer. The dosing vehicle (F. buffer) was used as a control. The EPO and G-CSF modified mRNA were modified with 5-methylcytosine at each cytosine and pseudouridine replacement at each uridine site.

[1342] Animals (n=5), Sprague-Dawley rats, were injected IM (intramuscular) for the single unit dose of 100 ug (delivered to one thigh). For multi-dosing 6 doses of 100 ug (delivered to two thighs) were used for both EPO and G-CSF mmRNA. Control dosing involved use of buffer at a single dose. Human EPO blood levels were evaluated 13 hrs post injection.

[1343] Human EPO protein was measured in rat serum 13 hrs post intramuscular injection. Five groups of rats were treated and evaluated. The results are shown in Table 75.

TABLE 75
Multi-dose study

| | | | | Avg. Pg/mL |
|---|---|---|---|---|
| | | Dose of | Total | human EPO, |
| Group | Treatment | mmRNA | Dose | serum |
| 1 | Human EPO | 1 × 100 ug | 100 ug | 143 |
| | mmRNA | | | |
| 2 | Human EPO | 6 × 100 ug | 600 ug | 256 |
| | mmRNA | | | |
| 3 | G-CSF mmRNA | 1 × 100 ug | 100 ug | 43 |
| 4 | G-CSF mmRNA | 6 × 100 ug | 600 ug | 58 |
| 5 | Buffer Alone | — | — | 20 |

### Example 55. Signal Sequence Exchange Study

[1344] Several variants of mmRNAs encoding human Granulocyte colony stimulating factor (G-CSF) (mRNA sequence shown in SEQ ID NO: 251433; polyA tail of approximately 160 nucleotides not shown in sequence; 5′cap, Cap1) were synthesized using modified nucleotides pseudouridine and 5-methylcytosine (pseudo-U/5mC). These variants included the G-CSF constructs encoding either the wild-type N terminal secretory signal peptide sequence (MAGPATQSPMKLMALQLLLWHSALWTVQEA; SEQ ID NO: 95), no secretory signal peptide sequence, or secretory signal peptide sequences taken from other mRNAs. These included sequences where the wild type G-CSF signal peptide sequence was replaced with the signal peptide sequence of either: human α-1-anti trypsin (AAT) (MMPSSVSWGILLLAGLCCLVPVSLA; SEQ ID NO: 94), human Factor IX (FIX) (MQRVNMIMAESPSLITICLLGYLLSAECTVFLDHENANKILNRPKR; SEQ ID NO: 96), human Prolactin (Prolac) (MKGSLLLLLVSNLLLCQSVAP; SEQ ID NO: 97), or human Albumin (Alb) (MKWVTFISLLFLFSSAYSRGVFRR; SEQ ID NO: 98).

[1345] 250 ng of modified mRNA encoding each G-CSF variant was transfected into HEK293A (293A in the table), mouse myoblast (MM in the table) (C2C12, CRL-1772, ATCC) and rat myoblast (RM in the table) (L6 line, CRL-1458, ATCC) cell lines in a 24 well plate using 1 μl of Lipofectamine 2000 (Life Technologies), each well containing 300,000 cells. The supernatants were harvested after 24 hrs and the secreted G-CSF protein was analyzed by ELISA using the Human G-CSF ELISA kit (Life Technologies). The data shown in Table 76 reveal that cells transfected with G-CSF mmRNA encoding the Albumin signal peptide secrete at least 12 fold more G-CSF protein than its wild type counterpart.

TABLE 76
Signal Peptide Exchange

| | 293A | MM | RM |
|---|---|---|---|
| Signal peptides | (pg/ml) | (pg/ml) | (pg/ml) |
| G-CSF Natural | 9650 | 3450 | 6050 |
| α-1-anti trypsin | 9950 | 5000 | 8475 |
| Factor IX | 11675 | 6175 | 11675 |
| Prolactin | 7875 | 1525 | 9800 |
| Albumin | 122050 | 81050 | 173300 |
| No Signal peptide | 0 | 0 | 0 |

### Example 56. Cytokine Study: PBMC

### A. PBMC Isolation and Culture

[1346] 50 mL of human blood from two donors was received from Research Blood Components (lots KP30928 and KP30931) in sodium heparin tubes. For each donor, the blood was pooled and diluted to 70 mL with DPBS (SAFC Bioscience 59331C, lot 071M8408) and split evenly between two 50 ml conical tubes. 10 mL of Ficoll Paque (GE Healthcare 17-5442-03, lot 10074400) was gently dispensed below the blood layer. The tubes were centrifuged at 2000 rpm for 30 minutes with low acceleration and braking. The tubes were removed and the buffy coat PBMC layers were gently transferred to a fresh 50 mL conical and washed with DPBS. The tubes were centrifuged at 1450 rpm for 10 minutes.

[1347] The supernatant was aspirated and the PBMC pellets were resuspended and washed in 50 mL of DPBS. The tubes were centrifuged at 1250 rpm for 10 minutes. This wash step was repeated, and the PBMC pellets were resuspended in 19 mL of Optimem I (Gibco 11058, lot 1072088) and counted. The cell suspensions were adjusted to a concentration of 3.0×10\hat{ }6 cells/mL live cells.

[1348] These cells were then plated on five 96 well tissue culture treated round bottom plates (Costar 3799) per donor at 50 μL per well. Within 30 minutes, transfection mixtures were added to each well at a volume of 50 μL per well. After 4 hours post transfection, the media was supplemented with 10 μL of Fetal Bovine Serum (Gibco 10082, lot 1012368)

### B. Transfection Preparation

[1349] mmRNA encoding human G-CSF (mRNA sequence shown in SEQ ID NO: 251433; polyA tail of approximately 160 nucleotides not shown in sequence; 5′cap, Cap1) (containing either (1) natural NTPs, (2) 100% substitution with 5-methyl cytidine and pseudouridine, or (3) 100% substitution with 5-methyl cytidine and N1-methyl-pseudouridine; mmRNA encoding luciferase (IVT cDNA sequence shown in SEQ ID NO: 251442; mRNA sequence shown in SEQ ID NO: 251443, polyA tail of approximately 160 nucleotides not shown in sequence, 5′cap, Cap1, fully modified with 5-methylcytosine at each cytosine and pseudouridine replacement at each uridine site) (containing either (1) natural NTPs or (2) 100% substitution with 5-methyl cytidine and pseudouridine) and TLR agonist R848 (Invivogen tlrl-r848) were diluted to 38.4 ng/uL in a final volume of 2500 μL Optimem I.

[1350] Separately, 432 μL of Lipofectamine 2000 (Invitrogen 11668-027, lot 1070962) was diluted with 13.1 mL Optimem I. In a 96 well plate nine aliquots of 135 μL of each mmRNA, positive control (R-848) or negative control (Optimem I) was added to 135 μL of the diluted Lipofectamine 2000. The plate containing the material to be transfected was incubated for 20 minutes. The transfection mixtures were then transferred to each of the human PBMC plates at 50 μL per well. The plates were then incubated at 37 C. At 2, 4, 8, 20, and 44 hours each plate was removed from the incubator, and the supernatants were frozen.

[1351] After the last plate was removed, the supernatants were assayed using a human G-CSF ELISA kit (Invitrogen KHC2032) and human IFN-alpha ELISA kit (Thermo Scientific 41105-2). Each condition was done in duplicate.

### C. Results

[1352] The ability of unmodified and modified mRNA (mmRNAs) to produce the encoded protein was assessed (G-CSF production) over time as was the ability of the mRNA to trigger innate immune recognition as measured by interferon-alpha production. Use of in vitro PBMC cultures is an accepted way to measure the immunostimulatory potential of oligonucleotides (Robbins et al., Oligonucleotides 2009 19:89-102; herein incorporated by reference in its entirety).

[1353] Results were interpolated against the standard curve of each ELISA plate using a four parameter logistic curve fit. Shown in Tables 77 and 78 are the average from 2 separate PBMC donors of the G-CSF and IFN-alpha production over time as measured by specific ELISA.

[1354] In the G-CSF ELISA, background signal from the Lipofectamine 2000 untreated condition was subtracted at each timepoint. The data demonstrated specific production of human G-CSF protein by human peripheral blood mononuclear is seen with G-CSF mRNA containing natural NTPs, 100% substitution with 5-methyl cytidine and pseudouridine, or 100% substitution with 5-methyl cytidine and N1-methyl-pseudouridine. Production of G-CSF was significantly increased through the use of modified mRNA relative to unmodified mRNA, with the 5-methyl cytidine and N1-methyl-pseudouridine containing G-CSF mmRNA showing the highest level of G-CSF production. With regards to innate immune recognition, unmodified mRNA resulted in substantial IFN-alpha production, while the modified mRNA largely prevented interferon-alpha production. G-CSF mRNA fully modified with 5-methyl cytidine and N1-methyl-pseudouridine did not significantly increase cytokines whereas G-CSF mRNA fully modified with 5-methyl cytidine and pseudouridine induced IFN-alpha, TNF-alpha and IP10. Many other cytokines were not affected by either modification.

TABLE 77
G-CSF Signal
G-CSF signal - 2 Donor Average

| pg/mL | 2 Hr | 4 Hr | 8 Hr | 20 Hr | 44 Hr |
|---|---|---|---|---|---|
| G-CSF (5mC/pseudouridine) | 120.3 | 136.8 | 421.0 | 346.1 | 431.8 |
| G-CSF (5mC/N1-methyl- | 256.3 | 273.7 | 919.3 | 1603.3 | 1843.3 |
| pseudouridine) | | | | | |
| GCSF(Natural-no modification) | 63.5 | 92.6 | 129.6 | 258.3 | 242.4 |
| Luciferase (5mC/pseudouridine) | 4.5 | 153.7 | 33.0 | 186.5 | 58.0 |

TABLE 78
IFN-alpha signal
IFN-alpha signal - 2 donor average

| pg/mL | 2 Hr | 4 Hr | 8 Hr | 20 Hr | 44 Hr |
|---|---|---|---|---|---|
| G-CSF (5mC/pseudouridine) | 21.1 | 2.9 | 3.7 | 22.7 | 4.3 |
| G-CSF (5mC/N1-methyl- | 0.5 | 0.4 | 3.0 | 2.3 | 2.1 |
| pseudouridine) | | | | | |
| G-CSF(Natural) | 0.0 | 2.1 | 23.3 | 74.9 | 119.7 |
| Luciferase (5mC/pseudouridine) | 0.4 | 0.4 | 4.7 | 1.0 | 2.4 |
| R-848 | 39.1 | 151.3 | 278.4 | 362.2 | 208.1 |
| Lpf. 2000 control | 0.8 | 17.2 | 16.5 | 0.7 | 3.1 |

### Example 57. Chemical Modification Ranges of Modified mRNA

[1355] Modified nucleotides such as, but not limited to, the chemical modifications 5-methylcytosine and pseudouridine have been shown to lower the innate immune response and increase expression of RNA in mammalian cells. Surprisingly, and not previously known, the effects manifested by the chemical modifications can be titrated when the amount of chemical modification is less than 100%. Previously, it was believed that full modification was necessary and sufficient to elicit the beneficial effects of the chemical modifications and that less than 100% modification of an mRNA had little effect. However, it has now been shown that the benefits of chemical modification can be derived using less than complete modification and that the effects are target, concentration and modification dependent.

### A. Modified RNA Transfected in PBMC

[1356] 960 ng of G-CSF mRNA modified with 5-methylcytosine (5mC) and pseudouridine (pseudoU) or unmodified G-CSF mRNA was transfected with 0.8 μL of Lipofectamine 2000 into peripheral blood mononuclear cells (PBMC) from three normal blood donors (D1, D2, D3). The G-CSF mRNA (mRNA sequence shown in SEQ ID NO: 251433; polyA tail of approximately 160 nucleotides not shown in sequence; 5′cap, Cap1) was completely modified with 5mC and pseudoU (100% modification), not modified with 5mC and pseudoU (0% modification) or was partially modified with 5mC and pseudoU so the mRNA would contain 50% modification, 25% modification, 10% modification, %5 modification, 1% modification or 0.1% modification. A control sample of Luciferase (mRNA sequence shown in SEQ ID NO: 251443; polyA tail of approximately 160 nucleotides not shown in sequence; 5′cap, Cap1; fully modified 5meC and pseudoU) was also analyzed for G-CSF expression. For TNF-alpha and IFN-alpha control samples of Lipofectamine2000, LPS, R-848, Luciferase (mRNA sequence shown in SEQ ID NO: 251443; polyA tail of approximately 160 nucleotides not shown in sequence; 5′cap, Cap1; fully modified 5mC and pseudo), and P(I)P(C) were also analyzed. The supernatant was harvested and run by ELISA 22 hours after transfection to determine the protein expression. The expression of G-CSF is shown in Table 79 and the expression of IFN-alpha and TNF-alpha is shown in Table 80. The expression of IFN-alpha and TNF-alpha may be a secondary effect from the transfection of the G-CSF mRNA. Tables 79 and 80 show that the amount of chemical modification of G-CSF, IFN-alpha and TNF-alpha is titratable when the mRNA is not fully modified and the titratable trend is not the same for each target.

TABLE 79
G-CSF Expression

| | G-CSF Expression | | |
|---|---|---|---|
| | (pg/ml) | | |
| | D1 | D2 | D3 |
| 100% modification | 270.3 | 151.6 | 162.2 |
| 50% modification | 45.6 | 19.8 | 26.3 |
| 25% modification | 23.6 | 10.8 | 8.9 |
| 10% modification | 39.4 | 12.9 | 12.9 |
| 5% modification | 70.9 | 26.8 | 26.3 |
| 1% modification | 70.3 | 26.9 | 66.9 |
| 0.1% modification | 67.5 | 25.2 | 28.7 |
| Luciferase | 14.5 | 3.1 | 10.0 |

TABLE 80
IFN-alpha and TNF-alpha Expression

| | IFN-alpha Expression | | | TNF-alpha Expression | | |
|---|---|---|---|---|---|---|
| | (pg/ml) | | | (pg/ml) | | |
| | D1 | D2 | D3 | D1 | D2 | D3 |
| 100% modification | 76.8 | 6.8 | 15.1 | 5.6 | 1.4 | 21.4 |
| 50% modification | 22.0 | 5.5 | 257.3 | 4.7 | 1.7 | 12.1 |
| 25% modification | 64.1 | 14.9 | 549.7 | 3.9 | 0.7 | 10.1 |
| 10% modification | 150.2 | 18.8 | 787.8 | 6.6 | 0.9 | 13.4 |
| 5% modification | 143.9 | 41.3 | 1009.6 | 2.5 | 1.8 | 12.0 |
| 1% modification | 189.1 | 40.5 | 375.2 | 9.1 | 1.2 | 25.7 |
| 0.1% modification | 261.2 | 37.8 | 392.8 | 9.0 | 2. | 13.7 |
| 0% modification | 230.3 | 45.1 | 558.3 | 10.9 | 1.4 | 10.9 |
| LF 200 | 0 | 0 | 1.5 | 45.8 | 2.8 | 53.6 |
| LPS | 0 | 0 | 1.0 | 114.5 | 70.0 | 227.0 |
| R-848 | 39.5 | 11.9 | 183.5 | 389.3 | 256.6 | 410.6 |
| Luciferase | 9.1 | 0 | 3.9 | 4.5 | 2.7 | 13.6 |
| P(I)P(C) | 1498.1 | 216.8 | 238.8 | 61.2 | 4.4 | 69.1 |

### B. Modified RNA Transfected in HEK293

[1357] Human embryonic kidney epithelial (HEK293) cells were seeded on 96-well plates at a density of 30,000 cells per well in 100 ul cell culture medium. 250 ng of modified G-CSF mRNA (mRNA sequence shown in SEQ ID NO: 251433; polyA tail of approximately 160 nucleotides not shown in sequence; 5′cap, Cap1) formulated with RNAiMAX™ (Invitrogen, Carlsbad, CA) was added to a well. The G-CSF was completely modified with 5mC and pseudoU (100% modification), not modified with 5mC and pseudoU (0% modification) or was partially modified with 5mC and pseudoU so the mRNA would contain 75% modification, 50% modification or 25% modification. Control samples (AK 5/2, mCherry mRNA (mRNA sequence shown in SEQ ID NO: 251434; polyA tail of approximately 160 nucleotides not shown in sequence; 5′cap, Cap1; fully modified 5mC and pseudoU) and untreated) were also analyzed. The half-life of G-CSF mRNA fully modified with 5-methylcytosine and pseudouridine is approximately 8-10 hours. The supernatants were harvested after 16 hours and the secreted G-CSF protein was analyzed by ELISA. Table 81 shows that the amount of chemical modification of G-CSF is titratable when the mRNA is not fully modified.

TABLE 81
G-CSF Expression

| | G-CSF Expression |
|---|---|
| | (ng/ml) |
| 100% modification | 118.4 |
| 75% modification | 101.9 |
| 50% modification | 105.7 |
| 25% modification | 231.1 |
| 0% modification | 270.9 |
| AK 5/2 | 166.8 |
| mCherry | 0 |
| Untreated | 0 |

### Example 58: In Vivo Delivery of Modified mRNA (mmRNA)

[1358] Modified RNA was delivered to C57/BL6 mice intramuscularly, subcutaneously, or intravenously to evaluate the bio-distribution of modified RNA using luciferase. A formulation buffer used with all delivery methods contained 150 mM sodium chloride, 2 mM calcium chloride, 2 mM Na+-phosphate which included 1.4 mM monobasic sodium phosphate and 0.6 mM of dibasic sodium phosphate, and 0.5 mM ethylenediaminetetraacetic acid (EDTA) was adjusted using sodium hydroxide to reach a final pH of 6.5 before being filtered and sterilized. A 1× concentration was used as the delivery buffer. To create the lipoplexed solution delivered to the mice, in one vial 50 μg of RNA was equilibrated for 10 minutes at room temperature in the delivery buffer and in a second vial 10 μl RNAiMAX™ was equilibrated for 10 minutes at room temperature in the delivery buffer. After equilibrium, the vials were combined and delivery buffer was added to reach a final volume of 100 μl which was then incubated for 20 minutes at room temperature. Luciferin was administered by intraperitoneal injection (IP) at 150 mg/kg to each mouse prior to imaging during the plateau phase of the luciferin exposure curve which was between 15 and 30 minutes. To create luciferin, 1 g of D-luciferin potassium or sodium salt was dissolved in 66.6 ml of distilled phosphate buffer solution (DPBS), not containing Mg2+ or Ca2+, to make a 15 mg/ml solution. The solution was gently mixed and passed through a 0.2 μm syringe filter, before being purged with nitrogen, aliquoted and frozen at −80° C. while being protected from light as much as possible. The solution was thawed using a waterbath if luciferin was not dissolved, gently mixed and kept on ice on the day of dosing.

[1359] Whole body images were taken of each mouse 2, 8 and 24 hours after dosing. Tissue images and serum was collected from each mouse 24 hours after dosing. Mice administered doses intravenously had their liver, spleen, kidneys, lungs, heart, peri-renal adipose tissue and thymus imaged. Mice administered doses intramuscularly or subcutaneously had their liver, spleen, kidneys, lungs, peri-renal adipose tissue, and muscle at the injection site. From the whole body images the bioluminescence was measured in photon per second for each route of administration and dosing regimen.

### A. Intramuscular Administration

[1360] Mice were intramuscularly (I.M.) administered either modified luciferase mRNA fully modified with 5-methylcytosine and pseudouridine (Naked-Luc), lipoplexed modified luciferase mRNA fully modified with 5-methylcytosine and pseudouridine (Lipoplex-luc) (IVT cDNA sequence shown in SEQ ID NO: 251442; mRNA sequence shown in SEQ ID NO: 251443, polyA tail of approximately 160 nucleotides not shown in sequence, 5′cap, Cap1, fully modified with 5-methylcytosine at each cytosine and pseudouridine replacement at each uridine site), lipoplexed modified granulocyte colony-stimulating factor (G-CSF) mRNA (mRNA sequence shown in SEQ ID NO: 251433; polyA tail of approximately 160 nucleotides not shown in sequence; 5′cap, Cap1; fully modified with 5-methylcytosine and pseudouridine) (Lipoplex-Cytokine) or the formation buffer at a single dose of 50 μg of modified RNA in an injection volume of 50 μl for each formulation in the right hind limb and a single dose of 5 μg of modified RNA in an injection volume of 50 μl in the left hind limb. The bioluminescence average for the luciferase expression signals for each group at 2, 8 and 24 hours after dosing are shown in Table 82. The bioluminescence showed a positive signal at the injection site of the 5 μg and 50 μg modified RNA formulations containing and not containing lipoplex.

TABLE 82
In vivo Biophotoic Imaging (I.M. Injection Route)

| | Dose | Bioluminescence (photon/sec) | | |
|---|---|---|---|---|
| Formulation | (ug) | 2 hours | 8 hours | 24 hours |
| Naked-Luc | 5 | 224,000 | 683,000 | 927,000 |
| Lipolplex-Luc | 5 | 579,000 | 639,000 | 186,000 |
| Lipoplex-G-CSF | 5 | 64,600 | 85,600 | 75,100 |
| Formulation Buffer | 5 | 102,000 | 86,000 | 90,700 |
| Naked-Luc | 50 | 446,000 | 766,000 | 509,000 |
| Lipolplex-Luc | 50 | 374,000 | 501,000 | 332,000 |
| Lipoplex-G-CSF | 50 | 49,400 | 74,800 | 74,200 |
| Formulation Buffer | 50 | 59,300 | 69,200 | 63,600 |

### B. Subcutaneous Administration

[1361] Mice were subcutaneously (S.C.) administered either modified luciferase mRNA (Naked-Luc), lipoplexed modified luciferase mRNA (Lipoplex-luc), lipoplexed modified G-CSF mRNA (Lipoplex-G-CSF) or the formation buffer at a single dose of 50 μg of modified mRNA in an injection volume of 100 μl for each formulation. The bioluminescence average for the luciferase expression signals for each group at 2, 8 and 24 hours after dosing are shown in Table 83. The bioluminescence showed a positive signal at the injection site of the 50 μg modified mRNA formulations containing and not containing lipoplex.

TABLE 83
In vivo Biophotoic Imaging (S.C. Injection Route)

| | Bioluminescence (photon/sec) | | |
|---|---|---|---|
| Formulation | 2 hours | 8 hours | 24 hours |
| Naked-Luc | 3,700,000 | 8,060,000 | 2,080,000 |
| Lipolplex-Luc | 3,960,000 | 1,700,000 | 1,290,000 |
| Lipoplex-G-CSF | 123,000 | 121,000 | 117,000 |
| Formulation Buffer | 116,000 | 127,000 | 123,000 |

### C. Intravenous Administration

[1362] Mice were intravenously (I.V.) administered either modified luciferase mRNA (Naked-Luc), lipoplexed modified luciferase mRNA (Lipoplex-luc), lipoplexed modified G-CSF mRNA (Lipoplex-G-CSF) or the formation buffer at a single dose of 50 μg of modified mRNA in an injection volume of 100 μl for each formulation. The bioluminescence average for the luciferase expression signal in the spleen from each group at 2 hours after dosing is shown in Table 84. The bioluminescence showed a positive signal in the spleen of the 50 μg modified mRNA formulations containing lipoplex.

TABLE 84
In vivo Biophotoic Imaging (I.V. Injection Route)

| | Bioluminescence |
|---|---|
| | (photon/sec) |
| Formulation | of the Spleen |
| Naked-Luc | 58,400 |
| Lipolplex-Luc | 65,000 |
| Lipoplex-G-CSF | 57,100 |
| Formulation Buffer | 58,300 |

### Example 59. Buffer Formulation Studies

[1363] G-CSF modified mRNA (mRNA sequence shown in SEQ ID NO: 251433; polyA tail of approximately 160 nucleotides not shown in sequence; 5′cap, Cap1; fully modified with N1-pseudouridine and 5-methylcytosine) or Factor IX modified mRNA (mRNA sequence shown in SEQ ID NO: 251437; polyA tail of approximately 160 nucleotides not shown in sequence; 5′cap, Cap1; fully modified with N1-pseudouridine and 5-methylcytosine) in a buffer solution is administered intramuscularly to rats in an injection volume of 50 μl (n=5) at a modified mRNA dose of 200 ug per rat as described in Table 85. The modified mRNA is lyophilized in water for 1-2 days. It is then reconstituted in the buffers listed below to a target concentration of 6 mg/ml. Concentration is determined by OD 260. Samples are diluted to 4 mg/ml in the appropriate buffer before dosing.

[1364] To precipitate the modified mRNA, 3M sodium acetate, pH 5.5 and pure ethanol are added at 1/10^{th} the total volume and 4 times the total volume of modified mRNA, respectively. The material is placed at −80 C for a minimum of 1 hour. The material is then centrifuged for 30 minutes at 4000 rpm, 4 C. The supernatant is removed and the pellet is centrifuged and washed 3× with 75% ethanol. Finally, the pellet is reconstituted with buffer to a target concentration of 6 mg/ml. Concentration is determined by OD 260. Samples are diluted to 4 mg/ml in the appropriate buffer before dosing. All samples are prepared by lyophilization unless noted below.

TABLE 85
Buffer Dosing Groups

| Group | Treatment | Buffer | Dose (ug/rat) |
|---|---|---|---|
| 1 | G-CSF | 0.9% Saline | 200 |
| | Factor IX | 0.9% Saline | 200 |
| 2 | G-CSF | 0.9% Saline + 2 mM Calcium | 200 |
| | Factor IX | 0.9% Saline + 2 mM Calcium | 200 |
| 3 | G-CSF | Lactated Ringer's | 200 |
| | Factor IX | Lactated Ringer's | 200 |
| 4 | G-CSF | 5% Sucrose | 200 |
| | Factor IX | 5% Sucrose | 200 |
| 5 | G-CSF | 5% Sucrose + 2 mM Calcium | 200 |
| | Factor IX | 5% Sucrose + 2 mM Calcium | 200 |
| 6 | G-CSF | 5% Mannitol | 200 |
| | Factor IX | 5% Mannitol | 200 |
| 7 | G-CSF | 5% Mannitol + 2 mM Calcium | 200 |
| | Factor IX | 5% Mannitol + 2 mM Calcium | 200 |
| 8 | G-CSF | 0.9% saline (precipitation) | 200 |
| | Factor IX | 0.9% saline (precipitation) | 200 |

[1365] Serum samples are collected from the rats at various time intervals and analyzed for G-CSF or Factor IX protein expression using G-CSF or Factor IX ELISA.

### Example 60. Multi-Dose Study

[1366] Sprague-Dawley rats (n=8) are injected intravenously eight times (twice a week) over 28 days. The rats are injected with 0.5 mg/kg, 0.05 mg/kg, 0.005 mg/kg or 0.0005 mg/kg of human G-CSF modified mRNA of luciferase modified mRNA formulated in a lipid nanoparticle, 0.5 mg/kg of human G-CSF modified mRNA in saline, 0.2 mg/kg of the human G-CSF protein Neupogen or non-translatable human G-CSF modified mRNA formulated in a lipid nanoparticle. Serum is collected during pre-determined time intervals to evaluate G-CSF protein expression (8, 24 and 72 hours after the first dose of the week), complete blood count and white blood count (24 and 72 hours after the first dose of the week) and clinical chemistry (24 and 72 hours after the first dose of the week). The rats are sacrificed at day 29, 4 days after the final dosing, to determine the complete blood count, white blood count, clinical chemistry, protein expression and to evaluate the effect on the major organs by histopathology and necropsy. Further, an antibody assay is performed on the rats on day 29.

### Example 61. LNP In Vivo Study

[1367] Luciferase modified mRNA (mRNA sequence shown in SEQ ID NO: 251443;
[1368] polyA tail of approximately 160 nucleotides not shown in sequence, 5′ cap, Cap1; fully modified with 5-methylcytosine and pseudouridine was formulated as a lipid nanoparticle (LNP) using the syringe pump method. The LNP was formulated at a 20:1 weight ratio of total lipid to modified mRNA with a final lipid molar ratio of 50:10:38.5:1.5 (DLin-KC2-DMA:DSPC:Cholesterol:PEG-DMG). As shown in Table 86, the luciferase LNP formulation was characterized by particle size, zeta potential, and encapsulation.

TABLE 86
Luciferase Formulation

| Formulation | NPA-098-1 | |
|---|---|---|
| Modified mRNA | Luciferase | |
| Mean size | 135 | nm |
| | PDI: 0.08 | |
| Zeta at pH 7.4 | −0.6 | mV |

| | |
|---|---|
| Encaps. (RiboGr) | 91% |

[1369] As outlined in Table 87, the luciferase LNP formulation was administered to Balb-C mice (n=3) intramuscularly, intravenously and subcutaneously and a luciferase modified RNA formulated in PBS was administered to mice intravenously.

TABLE 87
Luciferase Formulations

| | | | | | Amount of | |
|---|---|---|---|---|---|---|
| | | | Concen- | Injection | modified | |
| | | | tration | Volume | RNA | Dose |
| Formulation | Vehicle | Route | (mg/ml) | (ul) | (ug) | (mg/kg) |
| Luc-LNP | PBS | IV | 0.20 | 50 | 10 | 0.50 |
| Luc-LNP | PBS | IM | 0.20 | 50 | 10 | 0.50 |
| Luc-LNP | PBS | SC | 0.20 | 50 | 10 | 0.50 |
| Luc-PBS | PBS | IV | 0.20 | 50 | 10 | 0.50 |

[1370] The mice administered the luciferase LNP formulation intravenously and intramuscularly were imaged at 2, 8, 24, 48, 120 and 192 hours and the mice administered the luciferase LNP formulation subcutaneously were imaged at 2, 8, 24, 48 and 120 hours to determine the luciferase expression as shown in Table 88. In Table 88, “NT” means not tested. Twenty minutes prior to imaging, mice were injected intraperitoneally with a D-luciferin solution at 150 mg/kg. Animals were then anesthetized and images were acquired with an IVIS Lumina II imaging system (Perkin Elmer). Bioluminescence was measured as total flux (photons/second) of the entire mouse.

TABLE 88
Luciferase Expression

| | Route of | Average Expression (photon/second) | | | | | |
|---|---|---|---|---|---|---|---|
| Form. | Administration | 2 hours | 8 hours | 24 hours | 48 hours | 120 hours | 192 hours |
| Luc-LNP | IV | 1.62E+08 | 3.00E+09 | 7.77E+08 | 4.98E+08 | 1.89E+08 | 6.08E+07 |
| Luc-LNP | IM | 4.85E+07 | 4.92E+08 | 9.02E+07 | 3.17E+07 | 1.22E+07 | 2.38E+06 |
| Luc-LNP | SC | 1.85E+07 | 9.79E+08 | 3.09E+08 | 4.94E+07 | 1.98E+06 | NT |
| Luc-PBS | IV | 3.61E+05 | 5.64E+05 | 3.19E+05 | NT | NT | NT |

[1371] One mouse administered the LNP formulation intravenously was sacrificed at 8 hours to determine the luciferase expression in the liver and spleen. Also, one mouse administered the LNP formulation intramuscular was sacrificed at 8 hours to determine the luciferase expression of the muscle around the injection site and in the liver and spleen. As shown in Table 89, expression was seen in the both the liver and spleen after intravenous and intramuscular administration and in the muscle around the intramuscular injection site.

TABLE 89
Luciferase Expression in Tissue

| | Expression |
|---|---|
| | (photon/second) |
| Luciferase LNP: IV | |
| Administration | |
| Liver | 7.984E+08 |
| Spleen | 3.951E+08 |
| Luciferase LNP: IM | |
| Administration | |
| Muscle around the | 3.688E+07 |
| injection site | |
| Liver | 1.507E+08 |
| Spleen | 1.096E+07 |

### Example 62. Cytokine Study: PBMC

### A. PBMC Isolation and Culture

[1372] 50 mL of human blood from two donors was received from Research Blood Components (lots KP30928 and KP30931) in sodium heparin tubes. For each donor, the blood was pooled and diluted to 70 mL with DPBS (SAFC Bioscience 59331C, lot 071M8408) and split evenly between two 50 mL conical tubes. 10 mL of Ficoll Paque (GE Healthcare 17-5442-03, lot 10074400) was gently dispensed below the blood layer. The tubes were centrifuged at 2000 rpm for 30 minutes with low acceleration and braking. The tubes were removed and the buffy coat PBMC layers were gently transferred to a fresh 50 ml conical and washed with DPBS. The tubes were centrifuged at 1450 rpm for 10 minutes.

[1373] The supernatant was aspirated and the PBMC pellets were resuspended and washed in 50 mL of DPBS. The tubes were centrifuged at 1250 rpm for 10 minutes. This wash step was repeated, and the PBMC pellets were resuspended in 19 mL of Optimem I (Gibco 11058, lot 1072088) and counted. The cell suspensions were adjusted to a concentration of 3.0×10\hat{ }6 cells/mL live cells.

[1374] These cells were then plated on five 96 well tissue culture treated round bottom plates (Costar 3799) per donor at 50 μL per well. Within 30 minutes, transfection mixtures were added to each well at a volume of 50 μL per well. After 4 hours post transfection, the media was supplemented with 10 μL of Fetal Bovine Serum (Gibco 10082, lot 1012368).

### B. Transfection Preparation

[1375] Modified mRNA encoding human G-CSF (mRNA sequence shown in SEQ ID NO: 251433; polyA tail of approximately 160 nucleotides not shown in sequence; 5′cap, Cap1) (containing either (1) natural NTPs, (2) 100% substitution with 5-methyl cytidine and pseudouridine, or (3) 100% substitution with 5-methyl cytidine and N1-methyl-pseudouridine; mRNA encoding luciferase (IVT cDNA sequence shown in SEQ ID NO: 251442; mRNA sequence shown in SEQ ID NO: 251443, poly A tail of approximately 160 nucleotides not shown in sequence, 5′cap, Cap1, fully modified with 5-methylcytosine at each cytosine and pseudouridine replacement at each uridine site) (containing either (1) natural NTPs or (2) 100% substitution with 5-methyl cytidine and pseudouridine) and TLR agonist R848 (Invivogen tlrl-r848) were diluted to 38.4 ng/uL in a final volume of 2500 μL Optimem I.

[1376] Separately, 110 μL of Lipofectamine 2000 (Invitrogen 11668-027, lot 1070962) was diluted with 6.76 mL Optimem I. In a 96 well plate nine aliquots of 135 μL of each mRNA, positive control (R-848) or negative control (Optimem I) was added to 135 μL of the diluted Lipofectamine 2000. The plate containing the material to be transfected was incubated for 20 minutes. The transfection mixtures were then transferred to each of the human PBMC plates at 50 μL per well. The plates were then incubated at 37° C. At 2, 4, 8, 20, and 44 hours each plate was removed from the incubator, and the supernatants were frozen.

[1377] After the last plate was removed, the supernatants were assayed using a human G-CSF ELISA kit (Invitrogen KHC2032) and human IFN-alpha ELISA kit (Thermo Scientific 41105-2). Each condition was done in duplicate.

### C. Protein and Innate Immune Response Analysis

[1378] The ability of unmodified and modified mRNA to produce the encoded protein was assessed (G-CSF production) over time as was the ability of the mRNA to trigger innate immune recognition as measured by interferon-alpha production. Use of in vitro PBMC cultures is an accepted way to measure the immunostimulatory potential of oligonucleotides (Robbins et al., Oligonucleotides 2009 19:89-102).

[1379] Results were interpolated against the standard curve of each ELISA plate using a four parameter logistic curve fit. Shown in Tables 90 and 91 are the average from 3 separate PBMC donors of the G-CSF, interferon-alpha (IFN-alpha) and tumor necrosis factor alpha (TNF-alpha) production over time as measured by specific ELISA.

[1380] In the G-CSF ELISA, background signal from the Lipofectamine 2000 (LF2000) untreated condition was subtracted at each time point. The data demonstrated specific production of human G-CSF protein by human peripheral blood mononuclear is seen with G-CSF mRNA containing natural NTPs, 100% substitution with 5-methyl cytidine and pseudouridine, or 100% substitution with 5-methyl cytidine and N1-methyl-pseudouridine. Production of G-CSF was significantly increased through the use of 5-methyl cytidine and N1-methyl-pseudouridine modified mRNA relative to 5-methyl cytidine and pseudouridine modified mRNA.

[1381] With regards to innate immune recognition, while both modified mRNA chemistries largely prevented IFN-alpha and TNF-alpha production relative to positive controls (R848, p(I)p(C)), significant differences did exist between the chemistries. 5-methyl cytidine and pseudouridine modified mRNA resulted in low but detectable levels of IFN-alpha and TNF-alpha production, while 5-methyl cytidine and N1-methyl-pseudouridine modified mRNA resulted in no detectable IFN-alpha and TNF-alpha production.

[1382] Consequently, it has been determined that, in addition to the need to review more than one cytokine marker of the activation of the innate immune response, it has surprisingly been found that combinations of modifications provide differing levels of cellular response (protein production and immune activation). The modification, N1-methyl-pseudouridine, in this study has been shown to convey added protection over the standard combination of 5-methylcytidine/pseudouridine explored by others resulting in twice as much protein and almost 150 fold reduction in immune activation (TNF-alpha).

[1383] Given that PBMC contain a large array of innate immune RNA recognition sensors and are also capable of protein translation, it offers a useful system to test the interdependency of these two pathways. It is known that mRNA translation can be negatively affected by activation of such innate immune pathways (Kariko et al. Immunity (2005) 23:165-175; Warren et al. Cell Stem Cell (2010) 7:618-630). Using PBMC as an in vitro assay system it is possible to establish a correlation between translation (in this case G-CSF protein production) and cytokine production (in this case exemplified by IFN-alpha and TNF-alpha protein production). Better protein production is correlated with lower induction of innate immune activation pathway, and new chemistries can be judged favorably based on this ratio (Table 92).

[1384] In this study, the PC Ratio for the two chemical modifications, pseudouridine and N1-methyl-pseudouridine, both with 5-methy cytosine was 4742/141-34 as compared to 9944/1-9944 for the cytokine IFN-alpha. For the cytokine, TNF-alpha, the two chemistries had PC Ratios of 153 and 1243, respectively suggesting that for either cytokine, the N1-methyl-pseudouridine is the superior modification. In Tables 90 and 91, “NT” means not tested.

TABLE 90
G-CSF
G-CSF: 3 Donor Average (pg/ml)

| | |
|---|---|
| G-CSF | 4742 |
| 5-methylcytosine/ | |
| pseudouridine | |
| G-CSF | 9944 |
| 5-methylcytosine/N1- | |
| methyl-pseudouridine | |
| Luciferase | 18 |
| LF2000 | 16 |

TABLE 91
IFN-alpha and TNF-alpha

| | IFN-alpha: 3 | TNF-alpha: 3 |
|---|---|---|
| | Donor Average | Donor Average |
| | (pg/ml) | (pg/ml) |
| G-CSF | 141 | 31 |
| 5-methylcytosine/ | | |
| pseudouridine | | |
| G-CSF | 1 | 8 |
| 5-methylcytosine/N1- | | |
| methyl-pseudouridine | | |
| P(I)P(C) | 1104 | NT |
| R-848 | NT | 1477 |
| LF2000 | 17 | 25 |

TABLE 92
G-CSF to Cytokine Ratios

| | G-CSF/IFN-alpha (ratio) | | G-CSF/TNF-alpha (ratio) | |
|---|---|---|---|---|
| | | 5-methyl- | | 5-methyl- |
| | 5-methyl- | cytosine/N1- | 5-methyl- | cytosine/N1- |
| | cytosine/pseu- | methyl-pseu- | cytosine/pseu- | methyl-pseu- |
| | douridine | douridine | douridine | douridine |
| PC Ratio | 34 | 9944 | 153 | 1243 |

### Example 63. In Vitro PBMC Studies: Percent Modification

[1385] 480 ng of G-CSF mRNA modified with 5-methylcytosine (5mC) and pseudouridine (pseudoU) or unmodified G-CSF mRNA was transfected with 0.4 μL of Lipofectamine 2000 into peripheral blood mononuclear cells (PBMC) from three normal blood donors (D1, D2, and D3). The G-CSF mRNA (mRNA sequence shown in SEQ ID NO: 251433; polyA tail of approximately 160 nucleotides not shown in sequence; 5′cap, Cap1) was completely modified with 5mC and pseudoU (100% modification), not modified with 5mC and pseudoU (0% modification) or was partially modified with 5mC and pseudoU so the mRNA would contain 75% modification, 50% modification or 25% modification. A control sample of Luciferase (mRNA sequence shown in SEQ ID NO: 251443; polyA tail of approximately 160 nucleotides not shown in sequence; 5′cap, Cap1; fully modified 5meC and pseudoU) was also analyzed for G-CSF expression. For TNF-alpha and IFN-alpha control samples of Lipofectamine2000, LPS, R-848, Luciferase (mRNA sequence shown in SEQ ID NO: 251443; polyA tail of approximately 160 nucleotides not shown in sequence; 5′cap, Cap1; fully modified 5mC and pseudo), and P(I)P(C) were also analyzed. The supernatant was harvested and run by ELISA 22 hours after transfection to determine the protein expression. The expression of G-CSF is shown in Table 93 and the expression of IFN-alpha and TNF-alpha is shown in Table 94. The expression of IFN-alpha and TNF-alpha may be a secondary effect from the transfection of the G-CSF mRNA. Tables 93 and 94 show that the amount of chemical modification of G-CSF, interferon alpha (IFN-alpha) and tumor necrosis factor-alpha (TNF-alpha) is titratable when the mRNA is not fully modified and the titratable trend is not the same for each target.

[1386] By using PBMC as an in vitro assay system it is possible to establish a correlation between translation (in this case G-CSF protein production) and cytokine production (in this case exemplified by IFN-alpha protein production). Better protein production is correlated with lower induction of innate immune activation pathway, and the percentage modification of a chemistry can be judged favorably based on this ratio (Table 95). As calculated from Tables 93 and 94 and shown in Table 95, full modification with 5-methylcytidine and pseudouridine shows a much better ratio of protein/cytokine production than without any modification (natural G-CSF mRNA) (100-fold for IFN-alpha and 27-fold for TNF-alpha). Partial modification shows a linear relationship with increasingly less modification resulting in a lower protein/cytokine ratio.

TABLE 93
G-CSF Expression

| | G-CSF Expression (pg/ml) | | |
|---|---|---|---|
| | D1 | D2 | D3 |
| 100% modification | 1968.9 | 2595.6 | 2835.7 |
| 75% modification | 566.7 | 631.4 | 659.5 |
| 50% modification | 188.9 | 187.2 | 191.9 |
| 25% modification | 139.3 | 126.9 | 102.0 |
| 0% modification | 194.8 | 182.0 | 183.3 |
| Luciferase | 90.2 | 0.0 | 22.1 |

TABLE 94
IFN-alpha and TNF-alpha Expression

| | IFN-alpha Expression | | | TNF-alpha Expression | | |
|---|---|---|---|---|---|---|
| | (pg/ml) | | | (pg/ml) | | |
| | D1 | D2 | D3 | D1 | D2 | D3 |
| 100% modification | 336.5 | 78.0 | 46.4 | 115.0 | 15.0 | 11.1 |
| 75% modification | 339.6 | 107.6 | 160.9 | 107.4 | 21.7 | 11.8 |
| 50% modification | 478.9 | 261.1 | 389.7 | 49.6 | 24.1 | 10.4 |
| 25% modification | 564.3 | 400.4 | 670.7 | 85.6 | 26.6 | 19.8 |
| 0% modification | 1421.6 | 810.5 | 1260.5 | 154.6 | 96.8 | 45.9 |
| LPS | 0.0 | 0.6 | 0.0 | 0.0 | 12.6 | 4.3 |
| R-848 | 0.5 | 3.0 | 14.1 | 655.2 | 989.9 | 420.4 |
| P(I)P(C) | 130.8 | 297.1 | 585.2 | 765.8 | 2362.7 | 1874.4 |
| Lipid only | 1952.2 | 866.6 | 855.8 | 248.5 | 82.0 | 60.7 |

TABLE 95
PC Ratio and Effect of Percentage of Modification

| | Average | Average | Average | G-CSF/IFN- | G-CSF/TNF- |
|---|---|---|---|---|---|
| | G-CSF | IFN-a | TNF-a | alpha | alpha |
| % Modification | (pg/ml) | (pg/ml) | (pg/ml) | (PC ratio) | (PC ratio) |
| 100 | 2466 | 153 | 47 | 16 | 52 |
| 75 | 619 | 202 | 47 | 3.1 | 13 |
| 50 | 189 | 376 | 28 | 0.5 | 6.8 |
| 25 | 122 | 545 | 44 | 0.2 | 2.8 |
| 0 | 186 | 1164 | 99 | 0.16 | 1.9 |

### Example 64. Modified RNA Transfected in PBMC

[1387] 500 ng of G-CSF mRNA modified with 5-methylcytosine (5mC) and pseudouridine (pseudoU) or unmodified G-CSF mRNA was transfected with 0.4 μL of Lipofectamine 2000 into peripheral blood mononuclear cells (PBMC) from three normal blood donors (D1, D2, and D3). The G-CSF mRNA (mRNA sequence shown in SEQ ID NO: 251433; polyA tail of approximately 160 nucleotides not shown in sequence; 5′cap, Cap1) was completely modified with 5mC and pseudoU (100% modification), not modified with 5mC and pseudoU (0% modification) or was partially modified with 5mC and pseudoU so the mRNA would contain 50% modification, 25% modification, 10% modification, %5 modification, 1% modification or 0.1% modification. A control sample of mCherry (mRNA sequence shown in SEQ ID NO: 251434; polyA tail of approximately 160 nucleotides not shown in sequence; 5′cap, Cap1; fully modified 5meC and pseudouridine), G-CSF fully modified with 5-methylcytosine and pseudouridine (Control G-CSF) and an untreated control was also analyzed for expression of G-CSF, tumor necrosis factor-alpha (TNF-alpha) and interferon-alpha (IFN-alpha). The supernatant was harvested 6 hours and 18 hours after transfection and run by ELISA to determine the protein expression. The expression of G-CSF, IFN-alpha, and TNF-alpha for Donor 1 is shown in Table 96, Donor 2 is shown in Table 97 and Donor 3 is shown in Table 98.

[1388] Full 100% modification with 5-methylcytidine and pseudouridine resulted in the most protein translation (G-CSF) and the least amount of cytokine produced across all three human PBMC donors. Decreasing amounts of modification results in more cytokine production (IFN-alpha and TNF-alpha), thus further highlighting the importance of fully modification to reduce cytokines and to improve protein translation (as evidenced here by G-CSF production).

TABLE 96
Donor 1

| | G-CSF | | IFN-alpha | | TNF-alpha | |
|---|---|---|---|---|---|---|
| | (pg/mL) | | (pg/mL) | | (pg/mL) | |
| | 6 | 18 | 6 | 18 | 6 | 18 |
| | hours | hours | hours | hours | hours | hours |
| 100% Mod | 1815 | 2224 | 1 | 13 | 0 | 0 |
| 75% Mod | 591 | 614 | 0 | 89 | 0 | 0 |
| 50% Mod | 172 | 147 | 0 | 193 | 0 | 0 |
| 25% Mod | 111 | 92 | 2 | 219 | 0 | 0 |
| 10% Mod | 138 | 138 | 7 | 536 | 18 | 0 |
| 1% Mod | 199 | 214 | 9 | 660 | 18 | 3 |
| 0.1% Mod | 222 | 208 | 10 | 597 | 0 | 6 |
| 0% Mod | 273 | 299 | 10 | 501 | 10 | 0 |
| Control G-CSF | 957 | 1274 | 3 | 123 | 18633 | 1620 |
| mCherry | 0 | 0 | 0 | 10 | 0 | 0 |
| Untreated | N/A | N/A | 0 | 0 | 1 | 1 |

TABLE 97
Donor 2

| | G-CSF | | IFN-alpha | | TNF-alpha | |
|---|---|---|---|---|---|---|
| | (pg/mL) | | (pg/mL) | | (pg/mL) | |
| | 6 | 18 | 6 | 18 | 6 | 18 |
| | hours | hours | hours | hours | hours | hours |
| 100% Mod | 2184 | 2432 | 0 | 7 | 0 | 11 |
| 75% Mod | 935 | 958 | 3 | 130 | 0 | 0 |
| 50% Mod | 192 | 253 | 2 | 625 | 7 | 23 |
| 25% Mod | 153 | 158 | 7 | 464 | 6 | 6 |
| 10% Mod | 203 | 223 | 25 | 700 | 22 | 39 |
| 1% Mod | 288 | 275 | 27 | 962 | 51 | 66 |
| 0.1% Mod | 318 | 288 | 33 | 635 | 28 | 5 |
| 0% Mod | 389 | 413 | 26 | 748 | 1 | 253 |
| Control G-CSF | 1461 | 1634 | 1 | 59 | 481 | 814 |
| mCherry | 0 | 7 | 0 | 1 | 0 | 0 |
| Untreated | N/A | N/A | 1 | 0 | 0 | 0 |

TABLE 98
Donor 3

| | G-CSF | | IFN-alpha | | TNF-alpha | |
|---|---|---|---|---|---|---|
| | (pg/mL) | | (pg/mL) | | (pg/mL) | |
| | 6 | 18 | 6 | 18 | 6 | 18 |
| | hours | hours | hours | hours | hours | hours |
| 100% Mod | 6086 | 7549 | 7 | 658 | 11 | 11 |
| 75% Mod | 2479 | 2378 | 23 | 752 | 4 | 35 |
| 50% Mod | 667 | 774 | 24 | 896 | 22 | 18 |
| 25% Mod | 480 | 541 | 57 | 1557 | 43 | 115 |
| 10% Mod | 838 | 956 | 159 | 2755 | 144 | 123 |
| 1% Mod | 1108 | 1197 | 235 | 3415 | 88 | 270 |
| 0.1% Mod | 1338 | 1177 | 191 | 2873 | 37 | 363 |
| 0% Mod | 1463 | 1666 | 215 | 3793 | 74 | 429 |
| Control G-CSF | 3272 | 3603 | 16 | 1557 | 731 | 9066 |
| mCherry | 0 | 0 | 2 | 645 | 0 | 0 |
| Untreated | N/A | N/A | 1 | 1 | 0 | 8 |

### Example 65. Innate Immune Response Study in BJ Fibroblasts

### A. Single Transfection

[1389] Human primary foreskin fibroblasts (BJ fibroblasts) were obtained from American Type Culture Collection (ATCC) (catalog #CRL-2522) and grown in Eagle's Minimum Essential Medium (ATCC, catalog #30-2003) supplemented with 10% fetal bovine serum at 37° C., under 5% CO₂. BJ fibroblasts were seeded on a 24-well plate at a density of 300,000 cells per well in 0.5 ml of culture medium. 250 ng of modified G-CSF mRNA (mRNA sequence shown in SEQ ID NO: 251433; polyA tail of approximately 140 nucleotides not shown in sequence; 5′cap, Cap1) fully modified with 5-methylcytosine and pseudouridine (Gen1) or fully modified with 5-methylcytosine and N1-methyl-pseudouridine (Gen2) having Cap0, Cap1 or no cap was transfected using Lipofectamine 2000 (Invitrogen, catalog #11668-019), following manufacturer's protocol. Control samples of poly I:C (PIC), Lipofectamine 2000 (Lipo), natural luciferase mRNA (mRNA sequence shown in SEQ ID NO: 251443; polyA tail of approximately 160 nucleotides not shown in sequence; 5′cap, Cap1) and natural G-CSF mRNA were also transfected. The cells were harvested after 18 hours, the total RNA was isolated and DNASE® treated using the RNeasy micro kit (catalog #74004) following the manufacturer's protocol. 100 ng of total RNA was used for cDNA synthesis using High Capacity cDNA Reverse Transcription kit (catalog #4368814) following the manufacturer's protocol. The cDNA was then analyzed for the expression of innate immune response genes by quantitative real time PCR using SybrGreen in a Biorad CFX 384 instrument following manufacturer's protocol. Table 99 shows the expression level of innate immune response transcripts relative to house-keeping gene HPRT (hypoxanthine phosphoribosytransferase) and is expressed as fold-induction relative to HPRT. In the table, the panel of standard metrics includes: RIG-I is retinoic acid inducible gene 1, IL6 is interleukin-6, OAS-1 is oligoadenylate synthetase 1, IFNb is interferon-beta, AIM2 is absent in melanoma-2, IFIT-1 is interferon-induced protein with tetratricopeptide repeats 1, PKR is protein kinase R, TNFa is tumor necrosis factor alpha and IFNa is interferon alpha.

TABLE 99
Innate Immune Response Transcript Levels

| Formulation | RIG-I | IL6 | OAS-1 | IFNb | AIM2 | IFIT-1 | PKR | TNFa | IFNa |
|---|---|---|---|---|---|---|---|---|---|
| Natural | 71.5 | 20.6 | 20.778 | 11.404 | 0.251 | 151.218 | 16.001 | 0.526 | 0.067 |
| Luciferase | | | | | | | | | |
| Natural | 73.3 | 47.1 | 19.359 | 13.615 | 0.264 | 142.011 | 11.667 | 1.185 | 0.153 |
| G-CSF | | | | | | | | | |
| PIC | 30.0 | 2.8 | 8.628 | 1.523 | 0.100 | 71.914 | 10.326 | 0.264 | 0.063 |
| G-CSF | 0.81 | 0.22 | 0.080 | 0.009 | 0.008 | 2.220 | 1.592 | 0.090 | 0.027 |
| Gen1-UC | | | | | | | | | |
| G-CSF | 0.54 | 0.26 | 0.042 | 0.005 | 0.008 | 1.314 | 1.568 | 0.088 | 0.038 |
| Gen1-Cap0 | | | | | | | | | |
| G-CSF | 0.58 | 0.30 | 0.035 | 0.007 | 0.006 | 1.510 | 1.371 | 0.090 | 0.040 |
| Gen1-Cap1 | | | | | | | | | |
| G-CSF | 0.21 | 0.20 | 0.002 | 0.007 | 0.007 | 0.603 | 0.969 | 0.129 | 0.005 |
| Gen2-UC | | | | | | | | | |
| G-CSF | 0.23 | 0.21 | 0.002 | 0.0014 | 0.007 | 0.648 | 1.547 | 0.121 | 0.035 |
| Gen2-Cap0 | | | | | | | | | |
| G-CSF | 0.27 | 0.26 | 0.011 | 0.004 | 0.005 | 0.678 | 1.557 | 0.099 | 0.037 |
| Gen2-Cap1 | | | | | | | | | |
| Lipo | 0.27 | 0.53 | 0.001 | 0 | 0.007 | 0.954 | 1.536 | 0.158 | 0.064 |

### B. Repeat Transfection

[1390] Human primary foreskin fibroblasts (BJ fibroblasts) were obtained from American Type Culture Collection (ATCC) (catalog #CRL-2522) and grown in Eagle's Minimum Essential Medium (ATCC, catalog #30-2003) supplemented with 10% fetal bovine serum at 37° C., under 5% CO₂. BJ fibroblasts were seeded on a 24-well plate at a density of 300,000 cells per well in 0.5 ml of culture medium. 250 ng of modified G-CSF mRNA (mRNA sequence shown in SEQ ID NO: 251433; polyA tail of approximately 140 nucleotides not shown in sequence; 5′cap, Cap1) unmodified, fully modified with 5-methylcytosine and pseudouridine (Gen1) or fully modified with 5-methylcytosine and N1-methyl-pseudouridine (Gen2) was transfected daily for 5 days following manufacturer's protocol. Control samples of Lipofectamine 2000 (L2000) and mCherry mRNA (mRNA sequence shown in SEQ ID NO: 251434; polyA tail of approximately 160 nucleotides not shown in sequence; 5′cap, Cap1; fully modified with 5-methylcytidine and pseudouridine) were also transfected daily for 5 days. The results are shown in Table 100.

[1391] Unmodified mRNA showed a cytokine response in interferon-beta (IFN-beta) and interleukin-6 (IL-6) after one day. mRNA modified with at least pseudouridine showed a cytokine response after 2-3 days whereas mRNA modified with 5-methylcytosine and N1-methyl-pseudouridine showed a reduced response after 3-5 days.

TABLE 100
Cytokine Response

| Formulation | Transfection | IFN-beta (pg/ml) | IL-6 (pg/ml) |
|---|---|---|---|
| G-CSF unmodified | 6 hours | 0 | 3596 |
| | Day 1 | 1363 | 15207 |
| | Day 2 | 238 | 12415 |
| | Day 3 | 225 | 5017 |
| | Day 4 | 363 | 4267 |
| | Day 5 | 225 | 3094 |
| G-CSF Gen 1 | 6 hours | 0 | 3396 |
| | Day 1 | 38 | 3870 |
| | Day 2 | 1125 | 16341 |
| | Day 3 | 100 | 25983 |
| | Day 4 | 75 | 18922 |
| | Day 5 | 213 | 15928 |
| G-CSF Gen 2 | 6 hours | 0 | 3337 |
| | Day 1 | 0 | 3733 |
| | Day 2 | 150 | 974 |
| | Day 3 | 213 | 4972 |
| | Day 4 | 1400 | 4122 |
| | Day 5 | 350 | 2906 |
| mCherry | 6 hours | 0 | 3278 |
| | Day 1 | 238 | 3893 |
| | Day 2 | 113 | 1833 |
| | Day 3 | 413 | 25539 |
| | Day 4 | 413 | 29233 |
| | Day 5 | 213 | 20178 |
| L2000 | 6 hours | 0 | 3270 |
| | Day 1 | 13 | 3933 |
| | Day 2 | 388 | 567 |
| | Day 3 | 338 | 1517 |
| | Day 4 | 475 | 1594 |
| | Day 5 | 263 | 1561 |

### Example 66. In Vivo Detection of Innate Immune Response

[1392] In an effort to distinguish the importance of different chemical modification of mRNA on in vivo protein production and cytokine response in vivo, female BALB/C mice (n=5) are injected intramuscularly with G-CSF mRNA (G-CSF mRNA unmod) (mRNA sequence shown in SEQ ID NO: 251433; polyA tail of approximately 160 nucleotides not shown in sequence;) with a 5′cap of Cap1, G-CSF mRNA fully modified with 5-methylcytosine and pseudouridine (G-CSF mRNA 5mc/pU), G-CSF mRNA fully modified with 5-methylcytosine and N1-methyl-pseudouridine with (G-CSF mRNA 5mc/N1pU) or without a 5′ cap (G-CSF mRNA 5mc/N1 pU no cap) or a control of either R848 or 5% sucrose as described in Table 101.

TABLE 101
Dosing Chart

| Formulation | Route | Dose (ug/mouse) | Dose (ul) |
|---|---|---|---|
| G-CSF mRNA | I.M. | 200 | 50 |
| unmod | | | |
| G-CSF mRNA | I.M. | 200 | 50 |
| 5mc/pU | | | |
| G-CSF mRNA | I.M. | 200 | 50 |
| 5mc/N1pU | | | |
| G-CSF mRNA | I.M. | 200 | 50 |
| 5mc/N1pU no cap | | | |
| R848 | I.M. | 75 | 50 |
| 5% sucrose | I.M. | — | 50 |
| Untreated | I.M. | — | — |

[1393] Blood is collected at 8 hours after dosing. Using ELISA the protein levels of G-CSF, TNF-alpha and IFN-alpha is determined by ELISA. 8 hours after dosing, muscle is collected from the injection site and quantitative real time polymerase chain reaction (QPCR) is used to determine the mRNA levels of RIG-I, PKR, AIM-2, IFIT-1, OAS-2, MDA-5, IFN-beta, TNF-alpha, IL-6, G-CSF, CD45 in the muscle.

### Example 67. In Vivo Detection of Innate Immune Response Study

[1394] Female BALB/C mice (n=5) were injected intramuscularly with G-CSF mRNA (G-CSF mRNA unmod) (mRNA sequence shown in SEQ ID NO: 251433; polyA tail of approximately 160 nucleotides not shown in sequence;) with a 5′cap of Cap1, G-CSF mRNA fully modified with 5-methylcytosine and pseudouridine (G-CSF mRNA 5mc/pU), G-CSF mRNA fully modified with 5-methylcytosine and N1-methyl-pseudouridine with (G-CSF mRNA 5mc/N1pU) or without a 5′ cap (G-CSF mRNA 5mc/N1 pU no cap) or a control of either R848 or 5% sucrose as described in Table 102. Blood is collected at 8 hours after dosing and using ELISA the protein levels of G-CSF and interferon-alpha (IFN-alpha) is determined by ELISA and are shown in Table 102.

[1395] As shown in Table 102, unmodified, 5mc/pU, and 5mc/N1pU modified G-CSF mRNA resulted in human G-CSF expression in mouse serum. The uncapped 5mC/N1pU modified G-CSF mRNA showed no human G-CSF expression in serum, highlighting the importance of having a 5′ cap structure for protein translation.

[1396] As expected, no human G-CSF protein was expressed in the R848, 5% sucrose only, and untreated groups. Importantly, significant differences were seen in cytokine production as measured by mouse IFN-alpha in the serum. As expected, unmodified G-CSF mRNA demonstrated a robust cytokine response in vivo (greater than the R848 positive control). The 5mc/pU modified G-CSF mRNA did show a low but detectable cytokine response in vivo, while the 5mc/N1pU modified mRNA showed no detectable IFN-alpha in the serum (and same as vehicle or untreated animals).

[1397] Also, the response of 5mc/N1pU modified mRNA was the same regardless of whether it was capped or not. These in vivo results reinforce the conclusion that 1) that unmodified mRNA produce a robust innate immune response, 2) that this is reduced, but not abolished, through 100% incorporation of 5mc/pU modification, and 3) that incorporation of 5mc/N1pU modifications results in no detectable cytokine response.

[1398] Lastly, given that these injections are in 5% sucrose (which has no effect by itself), these result should accurately reflect the immunostimulatory potential of these modifications.

[1399] From the data it is evident that N1pU modified molecules produce more protein while concomitantly having little or no effect on IFN-alpha expression. It is also evident that capping is required for protein production for this chemical modification. The Protein: Cytokine Ratio of 748 as compared to the PC Ratio for the unmodified mRNA (PC=9) means that this chemical modification is far superior as related to the effects or biological implications associated with IFN-alpha.

TABLE 102
Human G-CSF and Mouse IFN-alpha in serum

| | | Dose | | G-CSF | IFN-alpha | |
|---|---|---|---|---|---|---|
| | | (ug/ | Dose | protein | expression | PC |
| Formulation | Route | mouse) | (ul) | (pg/ml) | (pg/ml) | Ratio |
| G-CSF | I.M. | 200 | 50 | 605.6 | 67.01 | 9 |
| mRNA unmod | | | | | | |
| G-CSF | I.M. | 200 | 50 | 356.5 | 8.87 | 40 |
| mRNA 5mc/pU | | | | | | |
| G-CSF | I.M. | 200 | 50 | 748.1 | 0 | 748 |
| mRNA5mc/N1pU | | | | | | |
| G-CSF | I.M. | 200 | 50 | 6.5 | 0 | 6.5 |
| mRNA5mc/N1pU | | | | | | |
| no cap | | | | | | |
| R848 | I.M. | 75 | 50 | 3.4 | 40.97 | .08 |
| 5% sucrose | I.M. | — | 50 | 0 | 1.49 | 0 |
| Untreated | I.M. | — | — | 0 | 0 | 0 |

### Example 68: In Vivo Delivery of Modified RNA

[1400] Protein production of modified mRNA was evaluated by delivering modified G-CSF mRNA or modified Factor IX mRNA to female Sprague Dawley rats (n=6). Rats were injected with 400 μg in 100 ul of G-CSF mRNA (mRNA sequence shown in SEQ ID NO: 251433; polyA tail of approximately 160 nucleotides not shown in sequence; 5′cap, Cap1) fully modified with 5-methylcytosine and pseudouridine (G-CSF Gen1), G-CSF mRNA fully modified with 5-methylcytosine and N1-methyl-pseudouridine (G-CSF Gen2) or Factor IX mRNA (mRNA sequence shown in SEQ ID NO: 251437; polyA tail of approximately 160 nucleotides not shown in sequence; 5′cap, Cap1) fully modified with 5-methylcytosine and pseudouridine (Factor IX Gen1) reconstituted from the lyophilized form in 5% sucrose. Blood was collected 8 hours after injection and the G-CSF protein level in serum was measured by ELISA. Table 103 shows the G-CSF protein levels in serum after 8 hours.

[1401] These results demonstrate that both G-CSF Gen 1 and G-CSF Gen 2 modified mRNA can produce human G-CSF protein in a rat following a single intramuscular injection, and that human G-CSF protein production is improved when using Gen 2 chemistry over Gen 1 chemistry.

TABLE 103
G-CSF Protein in Rat Serum (I.M. Injection Route)

| Formulation | G-CSF protein (pg/ml) |
|---|---|
| G-CSF Gen1 | 19.37 |
| G-CSF Gen2 | 64.72 |
| Factor IX Gen 1 | 2.25 |

### Example 69. Chemical Modification: In Vitro Studies

### A. In Vitro Screening in PBMC

[1402] 500 ng of G-CSF (mRNA sequence shown in SEQ ID NO: 251433; poly A tail of approximately 160 nucleotides not shown in sequence; 5′cap, Cap1) mRNA fully modified with the chemical modification outlined Tables 104 and 105 was transfected with 0.4 μL Lipofectamine 2000 into peripheral blood mononuclear cells (PBMC) from three normal blood donors. Control samples of LPS, R848, P(I)P(C) and mCherry (mRNA sequence shown in SEQ ID NO: 251434; polyA tail of approximately 160 nucleotides not shown in sequence, 5′cap, Cap1; fully modified with 5-methylcytosine and pseudouridine) were also analyzed. The supernatant was harvested and stored frozen until analyzed by ELISA to determine the G-CSF protein expression, and the induction of the cytokines interferon-alpha (IFN-α) and tumor necrosis factor alpha (TNF-α). The protein expression of G-CSF is shown in Table 104, the expression of IFN-α and TNF-α is shown in Table 105.

[1403] The data in Table 104 demonstrates that many, but not all, chemical modifications can be used to productively produce human G-CSF in PBMC. Of note, 100% N1-methyl-pseudouridine substitution demonstrates the highest level of human G-CSF production (almost 10-fold higher than pseudouridine itself). When N1-methyl-pseudouridine is used in combination with 5-methylcytidine a high level of human G-CSF protein is also produced (this is also higher than when pseudouridine is used in combination with 5 methylcytidine).

[1404] Given the inverse relationship between protein production and cytokine production in PBMC, a similar trend is also seen in Table 105, where 100% substitution with N1-methyl-pseudouridine results no cytokine induction (similar to transfection only controls) and pseudouridine shows detectable cytokine induction which is above background.

[1405] Other modifications such as N6-methyladenosine and alpha-thiocytidine appear to increase cytokine stimulation.

TABLE 104
Chemical Modifications and G-CSF Protein Expression

| | G-CSF Protein Expression (pg/ml) | | |
|---|---|---|---|
| | Donor | Donor | Donor |
| Chemical Modifications | 1 | 2 | 3 |
| Pseudouridine | 2477 | 1,909 | 1,498 |
| 5-methyluridine | 318 | 359 | 345 |
| N1-methyl-pseudouridine | 21,495 | 16,550 | 12,441 |
| 2-thiouridine | 932 | 1,000 | 600 |
| 4-thiouridine | 5 | 391 | 218 |
| 5-methoxyuridine | 2,964 | 1,832 | 1,800 |
| 5-methylcytosine and | 2,632 | 1,955 | 1,373 |
| pseudouridine (1^{st} set) | | | |
| 5-methylcytosine and N1-methyl- | 10,232 | 7,245 | 6,214 |
| pseudouridine (1^{st} set) | | | |
| 2′Fluoroguanosine | 59 | 186 | 177 |
| 2′Fluorouridine | 118 | 209 | 191 |
| 5-methylcytosine and | 1,682 | 1,382 | 1,036 |
| pseudouridine (2^{nd} set) | | | |
| 5-methylcytosine and N1-methyl- | 9,564 | 8,509 | 7,141 |
| pseudouridine (2^{nd} set) | | | |
| 5-bromouridine | 314 | 482 | 291 |
| 5-(2-carbomethoxyvinyl)uridine | 77 | 286 | 177 |
| 5-[3(1-E-propenylamino)uridine | 541 | 491 | 550 |
| α-thiocytidine | 105 | 264 | 245 |
| 5-methylcytosine and | 1,595 | 1,432 | 955 |
| pseudouridine (3^{rd} set) | | | |
| N1-methyladenosine | 182 | 177 | 191 |
| N6-methyladenosine | 100 | 168 | 200 |
| 5-methylcytidine | 291 | 277 | 359 |
| N4-acetylcytidine | 50 | 136 | 36 |
| 5-formylcytidine | 18 | 205 | 23 |
| 5-methylcytosine and | 264 | 350 | 182 |
| pseudouridine (4^{th} set) | | | |
| 5-methylcytosine and N1-methyl- | 9,505 | 6,927 | 5,405 |
| pseudouridine (4^{th} set) | | | |
| LPS | 1,209 | 786 | 636 |
| mCherry | 5 | 168 | 164 |
| R848 | 709 | 732 | 636 |
| P(I)P(C) | 5 | 186 | 182 |

TABLE 105
Chemical Modifications and Cytokine Expression

| Chemical | IFN-α Expression (pg/ml) | | | TNF-α Expression (pg/ml) | | |
|---|---|---|---|---|---|---|
| Modifications | Donor 1 | Donor 2 | Donor 3 | Donor 1 | Donor 2 | Donor 3 |
| Pseudouridine | 120 | 77 | 171 | 36 | 81 | 126 |
| 5-methyluridine | 245 | 135 | 334 | 94 | 100 | 157 |
| N1-methyl- | 26 | 75 | 138 | 101 | 106 | 134 |
| pseudouridine | | | | | | |
| 2-thiouridine | 100 | 108 | 154 | 133 | 133 | 141 |
| 4-thiouridine | 463 | 258 | 659 | 169 | 126 | 254 |
| 5 -methoxyuridine | 0 | 64 | 133 | 39 | 74 | 111 |
| 5-methylcytosine and | 88 | 94 | 148 | 64 | 89 | 121 |
| pseudouridine (1^{st} set) | | | | | | |
| 5-methylcytosine and | 0 | 60 | 136 | 54 | 79 | 126 |
| N1-methyl- | | | | | | |
| pseudouridine (1^{st} set) | | | | | | |
| 2′Fluoroguanosine | 107 | 97 | 194 | 91 | 94 | 141 |
| 2′Fluorouridine | 158 | 103 | 178 | 164 | 121 | 156 |
| 5-methylcytosine and | 133 | 92 | 167 | 99 | 111 | 150 |
| pseudouridine (2^{nd} set) | | | | | | |
| 5-methylcytosine and | 0 | 66 | 140 | 54 | 97 | 149 |
| N1-methyl- | | | | | | |
| pseudouridine (2^{nd} set) | | | | | | |
| 5-bromouridine | 95 | 86 | 181 | 87 | 106 | 157 |
| 5-(2- | 0 | 61 | 130 | 40 | 81 | 116 |
| carbomethoxyvinyl)uridine | | | | | | |
| 5-[3(1-E- | 0 | 58 | 132 | 71 | 90 | 119 |
| propenylamino)uridine | | | | | | |
| α-thiocytidine | 1,138 | 565 | 695 | 300 | 273 | 277 |
| 5-methylcytosine and | 88 | 75 | 150 | 84 | 89 | 130 |
| pseudouridine (3^{rd} set) | | | | | | |
| N1-methyladenosine | 322 | 255 | 377 | 256 | 157 | 294 |
| N6-methyladenosine | 1,935 | 1,065 | 1,492 | 1,080 | 630 | 857 |
| 5-methylcytidine | 643 | 359 | 529 | 176 | 136 | 193 |
| N4-acetylcytidine | 789 | 593 | 431 | 263 | 67 | 207 |
| 5-formylcytidine | 180 | 93 | 88 | 136 | 30 | 40 |
| 5-methylcytosine and | 131 | 28 | 18 | 53 | 24 | 29 |
| pseudouridine (4^{th} set) | | | | | | |
| 5-methylcytosine and | 0 | 0 | 0 | 36 | 14 | 13 |
| N1-methyl- | | | | | | |
| pseudouridine (4^{th} set) | | | | | | |
| LPS | 0 | 67 | 146 | 7,004 | 3,974 | 4,020 |
| mCherry | 100 | 75 | 143 | 67 | 100 | 133 |
| R848 | 674 | 619 | 562 | 11,179 | 8,546 | 9,907 |
| P(I)P(C) | 470 | 117 | 362 | 249 | 177 | 197 |

### B. In Vitro Screening in Hela Cells

[1406] The day before transfection, 20,000 HeLa cells (ATCC no. CCL-2; Manassas, VA) were harvested by treatment with Trypsin-EDTA solution (LifeTechnologies, Grand Island, NY) and seeded in a total volume of 100 μl EMEM medium (supplemented with 10% FCS and 1× Glutamax) per well in a 96-well cell culture plate (Corning, Manassas, VA). The cells were grown at 37oG in 5% CO₂ atmosphere overnight. Next day, 83 ng of Luciferase modified RNA (mRNA sequence shown in SEQ ID NO: 251443; polyA tail of approximately 160 nucleotides not shown in sequence; 5′cap, Cap1) with the chemical modification described in Table 106, were diluted in 10 ul final volume of OPTI-MEM (LifeTechnologies, Grand Island, NY).

[1407] Lipofectamine 2000 (LifeTechnologies, Grand Island, NY) was used as transfection reagent and 0.2 ul were diluted in 10 ul final volume of OPTI-MEM. After 5 minutes of incubation at room temperature, both solutions were combined and incubated an additional 15 minute at room temperature. Then the 20 ul combined solution was added to the 100 ul cell culture medium containing the HeLa cells and incubated at room temperature.

[1408] After 18 to 22 hours of incubation cells expressing luciferase were lysed with 100 μl of Passive Lysis Buffer (Promega, Madison, WI) according to manufacturer instructions. Aliquots of the lysates were transferred to white opaque polystyrene 96-well plates (Corning, Manassas, VA) and combined with 100 μl complete luciferase assay solution (Promega, Madison, WI). The lysate volumes were adjusted or diluted until no more than 2 mio relative light units (RLU) per well were detected for the strongest signal producing samples and the RLUs for each chemistry tested are shown in Table 106. The plate reader was a BioTek Synergy H1 (BioTek, Winooski, VT). The background signal of the plates without reagent was about 200 relative light units per well.

[1409] These results demonstrate that many, but not all, chemical modifications can be used to productively produce human G-CSF in Hela cells. Of note, 100% N1-methyl-pseudouridine substitution demonstrates the highest level of human G-CSF production.

TABLE 106
Relative Light Units of Luciferase

| Chemical Modification | RLU |
|---|---|
| N6-methyladenosine (m6a) | 534 |
| 5-methylcytidine (m5c) | 138,428 |
| N4-acetylcytidine (ac4c) | 235,412 |
| 5-formylcytidine (f5c) | 436 |
| 5-methylcytosine/pseudouridine, test A1 | 48,659 |
| 5-methylcytosine/N1-methyl-pseudouridine, test A1 | 190,924 |
| Pseudouridine | 655,632 |
| 1-methylpseudouridine (m1u) | 1,517,998 |
| 2-thiouridine (s2u) | 3387 |
| 5-methoxyuridine (mo5u) | 253,719 |
| 5-methylcytosine/pseudouridine, test B1 | 317,744 |
| 5-methylcytosine/N1-methyl-pseudouridine, test B1 | 265,871 |
| 5-Bromo-uridine | 43,276 |
| 5 (2 carbovinyl) uridine | 531 |
| 5 (3-1E propenyl Amino) uridine | 446 |
| 5-methylcytosine/pseudouridine, test A2 | 295,824 |
| 5-methylcytosine/N1-methyl-pseudouridine, test A2 | 233,921 |
| 5-methyluridine | 50,932 |
| α-Thio-cytidine | 26,358 |
| 5-methylcytosine/pseudouridine, test B2 | 481,477 |
| 5-methylcytosine/N1-methyl-pseudouridine, test B2 | 271,989 |
| 5-methylcytosine/pseudouridine, test A3 | 438,831 |
| 5-methylcytosine/N1-methyl-pseudouridine, test A3 | 277,499 |
| Unmodified Luciferase | 234,802 |

### C. In Vitro Screening in Rabbit Reticulocyte Lysates

[1410] Luciferase mRNA (mRNA sequence shown in SEQ ID NO: 251443; polyA tail of approximately 160 nucleotides not shown in sequence; 5′cap, Cap1) was modified with the chemical modification listed in Table 107 and were diluted in sterile nuclease-free water to a final amount of 250 ng in 10 ul. The diluted luciferase was added to 40 ul of freshly prepared Rabbit Reticulocyte Lysate and the in vitro translation reaction was done in a standard 1.5 mL polypropylene reaction tube (Thermo Fisher Scientific, Waltham, MA) at 30° C. in a dry heating block. The translation assay was done with the Rabbit Reticulocyte Lysate (nuclease-treated) kit (Promega, Madison, WI) according to the manufacturer's instructions. The reaction buffer was supplemented with a one-to-one blend of provided amino acid stock solutions devoid of either Leucine or Methionine resulting in a reaction mix containing sufficient amounts of both amino acids to allow effective in vitro translation.

[1411] After 60 minutes of incubation, the reaction was stopped by placing the reaction tubes on ice. Aliquots of the in vitro translation reaction containing luciferase modified RNA were transferred to white opaque polystyrene 96-well plates (Corning, Manassas, VA) and combined with 100 ul complete luciferase assay solution (Promega, Madison, WI). The volumes of the in vitro translation reactions were adjusted or diluted until no more than 2 mio relative light units (RLUs) per well were detected for the strongest signal producing samples and the RLUs for each chemistry tested are shown in Table 107. The plate reader was a BioTek Synergy H1 (BioTek, Winooski, VT). The background signal of the plates without reagent was about 200 relative light units per well.

[1412] These cell-free translation results very nicely correlate with the protein production results in HeLa, with the same modifications generally working or not working in both systems. One notable exception is 5-formylcytidine modified luciferase mRNA which worked in the cell-free translation system, but not in the HeLa cell-based transfection system. A similar difference between the two assays was also seen with 5-formylcytidine modified G-CSF mRNA.

TABLE 107
Relative Light Units of Luciferase

| Chemical Modification | RLU |
|---|---|
| N6-methyladenosine (m6a) | 398 |
| 5-methylcytidine (m5c) | 152,989 |
| N4-acetylcytidine (ac4c) | 60,879 |
| 5-formylcytidine (f5c) | 55,208 |
| 5-methylcytosine/pseudouridine, test A1 | 349,398 |
| 5-methylcytosine/N1-methyl-pseudouridine, test A1 | 205,465 |
| Pseudouridine | 587,795 |
| 1-methylpseudouridine (m1u) | 589,758 |
| 2-thiouridine (s2u) | 708 |
| 5-methoxyuridine (mo5u) | 288,647 |
| 5-methylcytosine/pseudouridine, test B1 | 454,662 |
| 5-methylcytosine/N1-methyl-pseudouridine, test B1 | 223,732 |
| 5-Bromo-uridine | 221,879 |
| 5 (2 carbovinyl) uridine | 225 |
| 5 (3-1E propenyl Amino) uridine | 211 |
| 5-methylcytosine/pseudouridine, test A2 | 558,779 |
| 5-methylcytosine/N1-methyl-pseudouridine, test A2 | 333,082 |
| 5-methyluridine | 214,680 |
| α-Thio-cytidine | 123,878 |
| 5-methylcytosine/pseudouridine, test B2 | 487,805 |
| 5-methylcytosine/N1-methyl-pseudouridine, test B2 | 154,096 |
| 5-methylcytosine/pseudouridine, test A3 | 413,535 |
| 5-methylcytosine/N1-methyl-pseudouridine, test A3 | 292,954 |
| Unmodified Luciferase | 225,986 |

### Example 70. Chemical Modification: In Vivo Studies

A. In Vivo Screening of G-CSF Modified mRNA

[1413] Balb-C mice (n=4) are intramuscularly injected in each leg with modified G-CSF mRNA (mRNA sequence shown in SEQ ID NO: 251433; polyA tail of approximately 160 nucleotides not shown in sequence; 5′cap, Cap1), fully modified with the chemical modifications outlined in Table 108, is formulated in 1×PBS. A control of luciferase modified mRNA (mRNA sequence shown in SEQ ID NO: 251443; polyA tail of approximately 160 nucleotides not shown in sequence; 5′cap, Cap1; fully modified with pseudouridine and 5-methylcytosine) and a control of PBS are also tested. After 8 hours serum is collected to determine G-CSF protein levels cytokine levels by ELISA.

TABLE 108
G-CSF

| mRNA | Chemical Modifications |
|---|---|
| G-CSF | Pseudouridine |
| G-CSF | 5-methyluridine |
| G-CSF | 2-thiouridine |
| G-CSF | 4-thiouridine |
| G-CSF | 5-methoxyuridine |
| G-CSF | 2′-fluorouridine |
| G-CSF | 5-bromouridine |
| G-CSF | 5-[3(1-E-propenylamino)uridine) |
| G-CSF | alpha-thio-cytidine |
| G-CSF | 5-methylcytidine |
| G-CSF | N4-acetylcytidine |
| G-CSF | Pseudouridine and 5-methylcytosine |
| G-CSF | N1-methyl-pseudouridine and 5-methylcytosine |
| Luciferase | Pseudouridine and 5-methylcytosine |
| PBS | None |

B. In Vivo Screening of Luciferase Modified mRNA

[1414] Balb-C mice (n=4) were subcutaneously injected with 200 μl containing 42 to 103 μg of modified luciferase mRNA (mRNA sequence shown in SEQ ID NO: 251443; polyA tail of approximately 160 nucleotides not shown in sequence; 5′cap, Cap1), fully modified with the chemical modifications outlined in Table 109, was formulated in 1×PBS. A control of PBS was also tested. The dosages of the modified luciferase mRNA is also outlined in Table 109. 8 hours after dosing the mice were imaged to determine luciferase expression. Twenty minutes prior to imaging, mice were injected intraperitoneally with a D-luciferin solution at 150 mg/kg. Animals were then anesthetized and images were acquired with an IVIS Lumina II imaging system (Perkin Elmer). Bioluminescence was measured as total flux (photons/second) of the entire mouse.

[1415] As demonstrated in Table 109, all luciferase mRNA modified chemistries demonstrated in vivo activity, with the exception of 2′-fluorouridine. In addition 1-methylpseudouridine modified mRNA demonstrated very high expression of luciferase (5-fold greater expression than pseudouridine containing mRNA).

TABLE 109
Luciferase Screening

| | | Dose | Dose | Luciferase |
|---|---|---|---|---|
| | Chemical | (ug) of | volume | expression |
| mRNA | Modifications | mRNA | (ml) | (photon/second) |
| Luciferase | 5-methylcytidine | 83 | 0.72 | 1.94E+07 |
| Luciferase | N4-acetylcytidine | 76 | 0.72 | 1.11E07 |
| Luciferase | Pseudouridine | 95 | 1.20 | 1.36E+07 |
| Luciferase | 1-methylpseudouridine | 103 | 0.72 | 7.40E+07 |
| Luciferase | 5-methoxyuridine | 95 | 1.22 | 3.32+07 |
| Luciferase | 5-methyluridine | 94 | 0.86 | 7.42E+06 |
| Luciferase | 5-bromouridine | 89 | 1.49 | 3.75E+07 |
| Luciferase | 2′-fluoroguanosine | 42 | 0.72 | 5.88E+05 |
| Luciferase | 2′-fluorocytidine | 47 | 0.72 | 4.21E+05 |
| Luciferase | 2′-flurorouridine | 59 | 0.72 | 3.47E+05 |
| PBS | None | — | 0.72 | 3.16E+05 |

### Example 71. In Vivo Screening of Combination Luciferase Modified mRNA

[1416] Balb-C mice (n=4) were subcutaneously injected with 200 μl of 100 ug of modified luciferase mRNA (mRNA sequence shown in SEQ ID NO: 251443; polyA tail of approximately 160 nucleotides not shown in sequence; 5′cap, Cap1), fully modified with the chemical modifications outlined in Table 110, was formulated in 1×PBS. A control of PBS was also tested. 8 hours after dosing the mice were imaged to determine luciferase expression. Twenty minutes prior to imaging, mice were injected intraperitoneally with a D-luciferin solution at 150 mg/kg. Animals were then anesthetized and images were acquired with an IVIS Lumina II imaging system (Perkin Elmer). Bioluminescence was measured as total flux (photons/second) of the entire mouse.

[1417] As demonstrated in Table 110, all luciferase mRNA modified chemistries (in combination) demonstrated in vivo activity. In addition the presence of N1-methyl-pseudouridine in the modified mRNA (with N4-acetylcytidine or 5 methylcytidine) demonstrated higher expression than when the same combinations where tested using with pseudouridine. Taken together, these data demonstrate that N1-methyl-pseudouridine containing luciferase mRNA results in improved protein expression in vivo whether used alone (Table 109) or when used in combination with other modified nucleotides (Table 110).

TABLE 110
Luciferase Screening Combinations

| | | Luciferase |
|---|---|---|
| | | expression |
| mRNA | Chemical Modifications | (photon/second) |
| Luciferase | N4-acetylcytidine/pseudouridine | 4.18E+06 |
| Luciferase | N4-acetylcytidine/N1-methyl- | 2.88E+07 |
| | pseudouridine | |
| Luciferase | 5-methylcytidine/5-methoxyuridine | 3.48E+07 |
| Luciferase | 5-methylcytidine/5-methyluridine | 1.44E+07 |
| Luciferase | 5-methylcytidine/where 50% of the | 2.39E+06 |
| | uridine is replaced with 2-thiouridine | |
| Luciferase | 5-methylcytidine/pseudouridine | 2.36E+07 |
| Luciferase | 5-methylcytidine/N1-methyl- | 4.15E+07 |
| | pseudouridine | |
| PBS | None | 3.59E+05 |

### Example 72. Innate Immune Response in BJ Fibroblasts

[1418] Human primary foreskin fibroblasts (BJ fibroblasts) are obtained from American Type Culture Collection (ATCC) (catalog #CRL-2522) and grown in Eagle's Minimum Essential Medium (ATCC, cat #30-2003) supplemented with 10% fetal bovine serum at 37° C., under 5% CO2. BJ fibroblasts are seeded on a 24-well plate at a density of 130,000 cells per well in 0.5 ml of culture medium. 250 ng of modified G-CSF mRNA (mRNA sequence shown in SEQ ID NO: 251433; polyA tail of approximately 160 nucleotides not shown in sequence; 5′cap, Cap1) fully modified with 5-methylcytosine and pseudouridine (Gen1) or fully modified with 5-methylcytosine and N1-methyl-pseudouridine (Gen2) is transfected using Lipofectamine 2000 (Invitrogen, cat #11668-019), following manufacturer's protocol. Control samples of Lipofectamine 2000 and unmodified G-CSF mRNA (natural G-CSF) are also transfected. The cells are transfected for five consecutive days. The transfection complexes are removed four hours after each round of transfection.

[1419] The culture supernatant is assayed for secreted G-CSF (R&D Systems, catalog #DCS50), tumor necrosis factor-alpha (TNF-alpha) and interferon alpha (IFN-alpha by ELISA every day after transfection following manufacturer's protocols. The cells are analyzed for viability using CELL TITER GLO® (Promega, catalog #G7570) 6 hrs and 18 hrs after the first round of transfection and every alternate day following that. At the same time from the harvested cells, total RNA is isolated and treated with DNASE® using the RNAEASY micro kit (catalog #74004) following the manufacturer's protocol. 100 ng of total RNA is used for cDNA synthesis using the High Capacity cDNA Reverse Transcription kit (Applied Biosystems, cat #4368814) following the manufacturer's protocol. The cDNA is then analyzed for the expression of innate immune response genes by quantitative real time PCR using SybrGreen in a Biorad CFX 384 instrument following the manufacturer's protocol.

### Example 73. In Vitro Transcription with Wild-Type T7 Polymerase

[1420] Luciferase mRNA (mRNA sequence shown in SEQ ID NO: 251443; poly A tail of approximately 160 nucleotides not shown in sequence; 5′cap, Cap1) and G-CSF mRNA (mRNA sequence shown in SEQ ID NO: 251433; polyA tail of approximately 160 nucleotides not shown in sequence; 5′cap, Cap1) were fully modified with different chemistries and chemistry combinations listed in Tables 111-114 using wild-type T7 polymerase as previously described.

[1421] The yield of the translation reactions was determined by spectrophometric measurement (OD260) and the yield for Luciferase is shown in Table 111 and G-CSF is shown in Table 113.

[1422] The luciferase and G-CSF modified mRNA were also subjected to an enzymatic capping reaction and each modified mRNA capping reaction was evaluated for yield by spectrophometic measurement (OD260) and correct size assessed using bioanalyzer. The yield from the capping reaction for luciferase is shown in Table 112 and G-CSF is shown in Table 114.

TABLE 111
In vitro transcription chemistry for Luciferase

| Chemical Modification | Yield (mg) |
|---|---|
| N6-methyladenosine | 0.99 |
| 5-methylcytidine | 1.29 |
| N4-acetylcytidine | 1.0 |
| 5-formylcytidine | 0.55 |
| Pseudouridine | 2.0 |
| N1-methyl-pseudouridine | 1.43 |
| 2-thiouridine | 1.56 |
| 5-methoxyuridine | 2.35 |
| 5-methyluridine | 1.01 |
| α-Thio-cytidine | 0.83 |
| 5-Br-uridine (5Bru) | 1.96 |
| 5 (2 carbomethoxyvinyl) uridine | 0.89 |
| 5 (3-1E propenyl Amino) uridine | 2.01 |
| N4-acetylcytidine/pseudouridine | 1.34 |
| N4-acetylcytidine/N1-methyl-pseudouridine | 1.26 |
| 5-methylcytidine/5-methoxyuridine | 1.38 |
| 5-methylcytidine/5-bromouridine | 0.12 |
| 5-methylcytidine/5-methyluridine | 2.97 |
| 5-methylcytidine/half of the uridines are | 1.59 |
| modified with 2-thiouridine | |
| 5-methylcytidine/2-thiouridine | 0.90 |
| 5-methylcytidine/pseudouridine | 1.83 |
| 5-methylcytidine/N1-methyl-pseudouridine | 1.33 |

TABLE 112
Capping chemistry and yield for Luciferase modified mRNA

| Chemical Modification | Yield (mg) |
|---|---|
| 5-methylcytidine | 1.02 |
| N4-acetylcytidine | 0.93 |
| 5-formylcytidine | 0.55 |
| Pseudouridine | 2.07 |
| N1-methyl-pseudouridine | 1.27 |
| 2-thiouridine | 1.44 |
| 5-methoxyuridine | 2 |
| 5-methyluridine | 0.8 |
| α-Thio-cytidine | 0.74 |
| 5-Br-uridine (5Bru) | 1.29 |
| 5 (2 carbomethoxyvinyl) uridine | 0.54 |
| 5 (3-1E propenyl Amino) uridine | 1.39 |
| N4-acetylcytidine/pseudouridine | 0.99 |
| N4-acetylcytidine/N1-methyl-pseudouridine | 1.08 |
| 5-methylcytidine/5-methoxyuridine | 1.13 |
| 5-methylcytidine/5-methyluridine | 1.08 |
| 5-methylcytidine/half of the uridines are | 1.2 |
| modified with 2-thiouridine | |
| 5-methylcytidine/2-thiouridine | 1.27 |
| 5-methylcytidine/pseudouridine | 1.19 |
| 5-methylcytidine/N1-methyl-pseudouridine | 1.04 |

TABLE 113
In vitro transcription chemistry
and yield for G-CSF modified mRNA

| Chemical Modification | Yield (mg) |
|---|---|
| N6-methyladenosine | 1.57 |
| 5-methylcytidine | 2.05 |
| N4-acetylcytidine | 3.13 |
| 5-formylcytidine | 1.41 |
| Pseudouridine | 4.1 |
| N1-methyl-pseudouridine | 3.24 |
| 2-thiouridine | 3.46 |
| 5-methoxyuridine | 2.57 |
| 5-methyluridine | 4.27 |
| 4-thiouridine | 1.45 |
| 2′-F-uridine | 0.96 |
| α-Thio-cytidine | 2.29 |
| 2′-F-guanosine | 0.6 |
| N-1-methyladenosine | 0.63 |
| 5-Br-uridine (5Bru) | 1.08 |
| 5 (2 carbomethoxyvinyl) uridine | 1.8 |
| 5 (3-1E propenyl Amino) uridine | 2.09 |
| N4-acetylcytidine/pseudouridine | 1.72 |
| N4-acetylcytidine/N1-methyl-pseudouridine | 1.37 |
| 5-methylcytidine/5-methoxyuridine | 1.85 |
| 5-methylcytidine/5-methyluridine | 1.56 |
| 5-methylcytidine/half of the uridines are | 1.84 |
| modified with 2-thiouridine | |
| 5-methylcytidine/2-thiouridine | 2.53 |
| 5-methylcytidine/pseudouridine | 0.63 |
| N4-acetylcytidine/2-thiouridine | 1.3 |
| N4-acetylcytidine/5-bromouridine | 1.37 |
| 5-methylcytidine/N1-methyl-pseudouridine | 1.25 |
| N4-acetylcytidine/pseudouridine | 2.24 |

TABLE 114
Capping chemistry and yield for G-CSF modified mRNA

| Chemical Modification | Yield (mg) |
|---|---|
| N6-methyladenosine | 1.04 |
| 5-methylcytidine | 1.08 |
| N4-acetylcytidine | 2.73 |
| 5-formylcytidine | 0.95 |
| Pseudouridine | 3.88 |
| N1-methyl-pseudouridine | 2.58 |
| 2-thiouridine | 2.57 |
| 5-methoxyuridine | 2.05 |
| 5-methyluridine | 3.56 |
| 4-thiouridine | 0.91 |
| 2′-F-uridine | 0.54 |
| α-Thio-cytidine | 1.79 |
| 2′-F-guanosine | 0.14 |
| 5-Br-uridine (5Bru) | 0.79 |
| 5 (2 carbomethoxyvinyl) uridine | 1.28 |
| 5 (3-1E propenyl Amino) uridine | 1.78 |
| N4-acetylcytidine/pseudouridine | 0.29 |
| N4-acetylcytidine/N1-methyl-pseudouridine | 0.33 |
| 5-methylcytidine/5-methoxyuridine | 0.91 |
| 5-methylcytidine/5-methyluridine | 0.61 |
| 5-methylcytidine/half of the uridines are | 1.24 |
| modified with 2-thiouridine | |
| 5-methylcytidine/pseudouridine | 1.08 |
| N4-acetylcytidine/2-thiouridine | 1.34 |
| N4-acetylcytidine/5-bromouridine | 1.22 |
| 5-methylcytidine/N1-methyl-pseudouridine | 1.56 |

### Example 74. In Vitro Transcription with Mutant T7 Polymerase

[1423] Luciferase mRNA (mRNA sequence shown in SEQ ID NO: 251443; polyA tail of approximately 160 nucleotides not shown in sequence; 5′cap, Cap1) and G-CSF mRNA (mRNA sequence shown in SEQ ID NO: 251433; polyA tail of approximately 160 nucleotides not shown in sequence; 5′cap, Cap1) were fully modified with different chemistries and chemistry combinations listed in Tables 115-118 using a mutant T7 polymerase (Durascribe® T7 Transcription kit (Cat. No. DS010925) (Epicentre®, Madison, WI).

[1424] The yield of the translation reactions was determined by spectrophometric measurement (OD260) and the yield for Luciferase is shown in Tables 115 and G-CSF is shown in Tables 117.

[1425] The luciferase and G-CSF modified mRNA were also subjected to an enzymatic capping reaction and each modified mRNA capping reaction was evaluated for yield by spectrophometic measurement (OD260) and correct size assessed using bioanalyzer. The yield from the capping reaction for luciferase is shown in Table 116 and G-CSF is shown in Table 118.

TABLE 115
In vitro transcription chemistry and
yield for Luciferase modified mRNA

| Chemical Modification | Yield (ug) |
|---|---|
| 2′Fluorocytosine | 71.4 |
| 2′Fluorouridine | 57.5 |
| 5-methylcytosine/pseudouridine, test A | 26.4 |
| 5-methylcytosine/N1-methyl-pseudouridine, test A | 73.3 |
| N1-acetylcytidine/2-fluorouridine | 202.2 |
| 5-methylcytidine/2-fluorouridine | 131.9 |
| 2-fluorocytosine/pseudouridine | 119.3 |
| 2-fluorocytosine/N1-methyl-pseudouridine | 107.0 |
| 2-fluorocytosine/2-thiouridine | 34.7 |
| 2-fluorocytosine/5-bromouridine | 81.0 |
| 2-fluorocytosine/2-fluorouridine | 80.4 |
| 2-fluoroguanine/5-methylcytosine | 61.2 |
| 2-fluoroguanine/5-methylcytosine/pseudouridine | 65.0 |
| 2-fluoroguanine/5-methylcytidine/N1-methyl-pseudouridine | 41.2 |
| 2-fluoroguanine/pseudouridine | 79.1 |
| 2-fluoroguanine/N1-methyl-pseudouridine | 74.6 |
| 5-methylcytidine/pseudouridine, test B | 91.8 |
| 5-methylcytidine/N1-methyl-pseudouridine, test B | 72.4 |
| 2′fluoroadenosine | 190.98 |

TABLE 116
Capping chemistry and yield for Luciferase modified mRNA

| Chemical Modification | Yield (ug) |
|---|---|
| 2′Fluorocytosine | 19.2 |
| 2′Fluorouridine | 16.7 |
| 5-methylcytosine/pseudouridine, test A | 7.0 |
| 5-methylcytosine/N1-methyl-pseudouridine, test A | 21.5 |
| N1-acetylcytidine/2-fluorouridine | 47.5 |
| 5-methylcytidine/2-fluorouridine | 53.2 |
| 2-fluorocytosine/pseudouridine | 58.4 |
| 2-fluorocytosine/N1-methyl-pseudouridine | 26.2 |
| 2-fluorocytosine/2-thiouridine | 12.9 |
| 2-fluorocytosine/5-bromouridine | 26.5 |
| 2-fluorocytosine/2-fluorouridine | 35.7 |
| 2-fluoroguanine/5-methylcytosine | 24.7 |
| 2-fluoroguanine/5-methylcytosine/pseudouridine | 32.3 |
| 2-fluoroguanine/5-methylcytidine/N1-methyl-pseudouridine | 31.3 |
| 2-fluoroguanine/pseudouridine | 20.9 |
| 2-fluoroguanine/N1-methyl-pseudouridine | 29.8 |
| 5-methylcytidine/pseudouridine, test B | 58.2 |
| 5-methylcytidine/N1-methyl-pseudouridine, test B | 44.4 |

TABLE 117
In vitro transcription chemistry
and yield for G-CSF modified mRNA

| Chemical Modification | Yield (ug) |
|---|---|
| 2′Fluorocytosine | 56.5 |
| 2′Fluorouridine | 79.4 |
| 5-methylcytosine/pseudouridine, test A | 21.2 |
| 5-methylcytosine/N1-methyl-pseudouridine, test A | 77.1 |
| N1-acetylcytidine/2-fluorouridine | 168.6 |
| 5-methylcytidine/2-fluorouridine | 134.7 |
| 2-fluorocytosine/pseudouridine | 97.8 |
| 2-fluorocytosine/N1-methyl-pseudouridine | 103.1 |
| 2-fluorocytosine/2-thiouridine | 58.8 |
| 2-fluorocytosine/5-bromouridine | 88.8 |
| 2-fluorocytosine/2-fluorouridine | 93.9 |
| 2-fluoroguanine/5-methylcytosine | 97.3 |
| 2-fluoroguanine/5-methylcytosine/pseudouridine | 96.0 |
| 2-fluoroguanine/5-methylcytidine/N1-methyl-pseudouridine | 82.0 |
| 2-fluoroguanine/pseudouridine | 68.0 |
| 2-fluoroguanine/N1-methyl-pseudouridine | 59.3 |
| 5-methylcytidine/pseudouridine, test B | 58.7 |
| 5-methylcytidine/N1-methyl-pseudouridine, test B | 78.0 |

TABLE 118
Capping chemistry and yield for G-CSF modified mRNA

| Chemical Modification | Yield (ug) |
|---|---|
| 2′Fluorocytosine | 16.9 |
| 2′Fluorouridine | 17.0 |
| 5-methylcytosine/pseudouridine, test A | 10.6 |
| 5-methylcytosine/N1-methyl-pseudouridine, test A | 22.7 |
| N1-acetylcytidine/2-fluorouridine | 19.9 |
| 5-methylcytidine/2-fluorouridine | 21.3 |
| 2-fluorocytosine/pseudouridine | 65.2 |
| 2-fluorocytosine/N1-methyl-pseudouridine | 58.9 |
| 2-fluorocytosine/2-thiouridine | 41.2 |
| 2-fluorocytosine/5-bromouridine | 35.8 |
| 2-fluorocytosine/2-fluorouridine | 36.7 |
| 2-fluoroguanine/5-methylcytosine | 36.6 |
| 2-fluoroguanine/5-methylcytosine/pseudouridine | 37.3 |
| 2-fluoroguanine/5-methylcytidine/N1-methyl-pseudouridine | 30.7 |
| 2-fluoroguanine/pseudouridine | 29.0 |
| 2-fluoroguanine/N1-methyl-pseudouridine | 22.7 |
| 5-methylcytidine/pseudouridine, test B | 60.4 |
| 5-methylcytidine/N1-methyl-pseudouridine, test B | 33.0 |

### Example 75. 2′O-methyl and 2′Fluoro Compounds

[1426] Luciferase mRNA (mRNA sequence shown in SEQ ID NO: 251443; poly A tail of approximately 160 nucleotides not shown in sequence; 5′cap, Cap1) were produced as fully modified versions with the chemistries in Table 119 and transcribed using mutant T7 polymerase (Durascribe® T7 Transcription kit (Cat. No. DS010925) (Epicentre®, Madison, WI). 2′ fluoro-containing mRNA were made using Durascribe T7, however, 2′Omethyl-containing mRNA could not be transcribed using Durascribe T7

[1427] Incorporation of 2′Omethyl modified mRNA might possibly be accomplished using other mutant T7 polymerases (Nat Biotechnol. (2004) 22:1155-1160; Nucleic Acids Res. (2002) 30: e138) or U.S. Pat. No. 7,309,570, the contents of each of which are incorporated herein by reference in their entirety. Alternatively, 2′OMe modifications could be introduced post-transcriptionally using enzymatic means.

[1428] Introduction of modifications on the 2′ group of the sugar has many potential advantages. 2′OMe substitutions, like 2′ fluoro substitutions are known to protect against nucleases and also have been shown to abolish innate immune recognition when incorporated into other nucleic acids such as siRNA and anti-sense (incorporated in its entirety, Crooke, ed. Antisense Drug Technology, 2nd edition; Boca Raton: CR^{C′} press).

[1429] The 2′Fluoro-modified mRNA were then transfected into HeLa cells to assess protein production in a cell context and the same mRNA were also assessed in a cell-free rabbit reticulocyte system. A control of unmodified luciferase (natural luciferase) was used for both transcription experiments, a control of untreated and mock transfected (Lipofectamine 2000 alone) were also analyzed for the HeLa transfection and a control of no RNA was analyzed for the rabbit reticulysates.

[1430] For the HeLa transfection experiments, the day before transfection, 20,000 HeLa cells (ATCC no. CCL-2; Manassas, VA) were harvested by treatment with Trypsin-EDTA solution (LifeTechnologies, Grand Island, NY) and seeded in a total volume of 100 ul EMEM medium (supplemented with 10% FCS and 1× Glutamax) per well in a 96-well cell culture plate (Corning, Manassas, VA). The cells were grown at 37oG in 5% CO₂ atmosphere overnight. Next day, 83 ng of the 2′fluoro-containing luciferase modified RNA (mRNA sequence shown in SEQ ID NO: 251443; polyA tail of approximately 160 nucleotides not shown in sequence; 5′cap, Cap1) with the chemical modification described in Table 119, were diluted in 10 ul final volume of OPTI-MEM (LifeTechnologies, Grand Island, NY). Lipofectamine 2000 (LifeTechnologies, Grand Island, NY) was used as transfection reagent and 0.2 ul were diluted in 10 ul final volume of OPTI-MEM. After 5 minutes of incubation at room temperature, both solutions were combined and incubated an additional 15 minute at room temperature. Then the 20 ul combined solution was added to the 100 ul cell culture medium containing the Hela cells and incubated at room temperature. After 18 to 22 hours of incubation cells expressing luciferase were lysed with 100 μl of Passive Lysis Buffer (Promega, Madison, WI) according to manufacturer instructions. Aliquots of the lysates were transferred to white opaque polystyrene 96-well plates (Corning, Manassas, VA) and combined with 100 μl complete luciferase assay solution (Promega, Madison, WI). The lysate volumes were adjusted or diluted until no more than 2 mio relative light units (RLU) per well were detected for the strongest signal producing samples and the RLUs for each chemistry tested are shown in Table 119. The plate reader was a BioTek Synergy H1 (BioTek, Winooski, VT). The background signal of the plates without reagent was about 200 relative light units per well.

[1431] For the rabbit reticulocyte lysate assay, 2′-fluoro-containing luciferase mRNA were diluted in sterile nuclease-free water to a final amount of 250 ng in 10 ul and added to 40 ul of freshly prepared Rabbit Reticulocyte Lysate and the in vitro translation reaction was done in a standard 1.5 mL polypropylene reaction tube (Thermo Fisher Scientific, Waltham, MA) at 30° C. in a dry heating block. The translation assay was done with the Rabbit Reticulocyte Lysate (nuclease-treated) kit (Promega, Madison, WI) according to the manufacturer's instructions. The reaction buffer was supplemented with a one-to-one blend of provided amino acid stock solutions devoid of either Leucine or Methionine resulting in a reaction mix containing sufficient amounts of both amino acids to allow effective in vitro translation. After 60 minutes of incubation, the reaction was stopped by placing the reaction tubes on ice.

[1432] Aliquots of the in vitro translation reaction containing luciferase modified RNA were transferred to white opaque polystyrene 96-well plates (Corning, Manassas, VA) and combined with 100 ul complete luciferase assay solution (Promega, Madison, WI). The volumes of the in vitro translation reactions were adjusted or diluted until no more than 2 mio relative light units (RLUs) per well were detected for the strongest signal producing samples and the RLUs for each chemistry tested are shown in Table 120. The plate reader was a BioTek Synergy H1 (BioTek, Winooski, VT). The background signal of the plates without reagent was about 160 relative light units per well.

[1433] As can be seen in Table 119 and 120, multiple 2′Fluoro-containing compounds are active in vitro and produce luciferase protein.

TABLE 119
HeLa Cells

| | Concentration | Volume | Yield | |
|---|---|---|---|---|
| Chemical Modification | (ug/ml) | (ul) | (ug) | RLU |
| 2′Fluoroadenosine | 381.96 | 500 | 190.98 | 388.5 |
| 2′Fluorocytosine | 654.56 | 500 | 327.28 | 2420 |
| 2′Fluoroguanine | 541.795 | 500 | 270.90 | 11,705.5 |
| 2′Flurorouridine | 944.005 | 500 | 472.00 | 6767.5 |
| Natural luciferase | N/A | N/A | N/A | 133,853.5 |
| Mock | N/A | N/A | N/A | 340 |
| Untreated | N/A | N/A | N/A | 238 |

TABLE 120
Rabbit Reticulysates

| Chemical Modification | RLU |
|---|---|
| 2′Fluoroadenosine | 162 |
| 2′Fluorocytosine | 208 |
| 2′Fluoroguanine | 371,509 |
| 2′Flurorouridine | 258 |
| Natural luciferase | 2,159,968 |
| No RNA | 156 |

### Example 76. Luciferase in Hela Cells Using a Combination of Modifications

[1434] To evaluate using of 2′fluoro-modified mRNA in combination with other modification a series of mRNA were transcribed using either wild-type T7 polymerase (non-fluoro-containing compounds) or using mutant T7 polymerases (fluyoro-containing compounds) as described in Example 75. All modified mRNA were tested by in vitro transfection in Hela cells.

[1435] The day before transfection, 20,000 HeLa cells (ATCC no. CCL-2; Manassas, VA) were harvested by treatment with Trypsin-EDTA solution (LifeTechnologies, Grand Island, NY) and seeded in a total volume of 100 ul EMEM medium (supplemented with 10% FCS and 1× Glutamax) per well in a 96-well cell culture plate (Corning, Manassas, VA). The cells were grown at 37 oG in 5% CO₂ atmosphere overnight. Next day, 83 ng of Luciferase modified RNA (mRNA sequence shown in SEQ ID NO: 251443; polyA tail of approximately 160 nucleotides not shown in sequence; 5′cap, Cap1) with the chemical modification described in Table 121, were diluted in 10 ul final volume of OPTI-MEM (LifeTechnologies, Grand Island, NY). Lipofectamine 2000 (LifeTechnologies, Grand Island, NY) was used as transfection reagent and 0.2 ul were diluted in 10 ul final volume of OPTI-MEM. After 5 minutes of incubation at room temperature, both solutions were combined and incubated an additional 15 minute at room temperature. Then the 20 ul combined solution was added to the 100 ul cell culture medium containing the HeLa cells and incubated at room temperature.

[1436] After 18 to 22 hours of incubation cells expressing luciferase were lysed with 100 μl of Passive Lysis Buffer (Promega, Madison, WI) according to manufacturer instructions. Aliquots of the lysates were transferred to white opaque polystyrene 96-well plates (Corning, Manassas, VA) and combined with 100 μl complete luciferase assay solution (Promega, Madison, WI). The lysate volumes were adjusted or diluted until no more than 2 mio relative light units (RLU) per well were detected for the strongest signal producing samples and the RLUs for each chemistry tested are shown in Table 121. The plate reader was a BioTek Synergy H1 (BioTek, Winooski, VT). The background signal of the plates without reagent was about 200 relative light units per well.

[1437] As evidenced in Table 121, most combinations of modifications resulted in mRNA which produced functional luciferase protein, including all the non-flouro containing compounds and many of the combinations containing 2′fluro modifications.

TABLE 121
Luciferase

| Chemical Modification | RLU |
|---|---|
| N4-acetylcytidine/pseudouridine | 113,796 |
| N4-acetylcytidine/N1-methyl-pseudouridine | 316,326 |
| 5-methylcytidine/5-methoxyuridine | 24,948 |
| 5-methylcytidine/5-methyluridine | 43,675 |
| 5-methylcytidine/half of the uridines modified with | 41,601 |
| 50% 2-thiouridine | |
| 5-methylcytidine/2-thiouridine | 1,102 |
| 5-methylcytidine/pseudouridine | 51,035 |
| 5-methylcytidine/N1-methyl-pseudouridine | 152,151 |
| N4-acetylcytidine/2′Fluorouridine triphosphate | 288 |
| 5-methylcytidine/2′Fluorouridine triphosphate | 269 |
| 2′Fluorocytosine triphosphate/pseudouridine | 260 |
| 2′Fluorocytosine triphosphate/N1-methyl- | 412 |
| pseudouridine | |
| 2′Fluorocytosine triphosphate/2-thiouridine | 427 |
| 2′Fluorocytosine triphosphate/5-bromouridine | 253 |
| 2′Fluorocytosine triphosphate/2′Fluorouridine | 184 |
| triphosphate | |
| 2′Fluoroguanine triphosphate/5-methylcytidine | 321 |
| 2′Fluoroguanine triphosphate/5-methylcytidine/ | 207 |
| Pseudouridine | |
| 2′Fluoroguanine/5-methylcytidine/N1-methyl- | 235 |
| psuedouridine | |
| 2′Fluoroguanine/pseudouridine | 218 |
| 2′Fluoroguanine/N1-methyl-psuedouridine | 247 |
| 5-methylcytidine/pseudouridine, test A | 13,833 |
| 5-methylcytidine/N1-methyl-pseudouridine, test A | 598 |
| 2′Fluorocytosine triphosphate | 201 |
| 2′Fluorouridine triphosphate | 305 |
| 5-methylcytidine/pseudouridine, test B | 115,401 |
| 5-methylcytidine/N1-methyl-pseudouridine, test B | 21,034 |
| Natural luciferase | 30,801 |
| Untreated | 344 |
| Mock | 262 |

### Example 77. G-CSF In Vitro Transcription

[1438] To assess the activity of all our different chemical modifications in the context of a second open reading frame, we replicated experiments previously conducted using luciferase mRNA, with human G-CSF mRNA. G-CSF mRNA (mRNA sequence shown in SEQ ID NO: 251433; polyA tail of approximately 160 nucleotides not shown in sequence; 5′cap, Cap1) were fully modified with the chemistries in Tables 122 and 123 using wild-type T7 polymerase (for all non-fluoro-containing compounds) or mutant T7 polymerase (for all fluoro-containing compounds). The mutant T7 polymerase was obtained commercially (Durascribe® T7 Transcription kit (Cat. No. DS010925) (Epicentre®, Madison, WI).

[1439] The modified RNA in Tables 122 and 123 were transfected in vitro in HeLa cells or added to rabbit reticulysates (250 ng of modified mRNA) as indicated. A control of untreated, mock transfected (transfection reagent alone), G-CSF fully modified with 5-methylcytosine and N1-methyl-pseudouridine or luciferase control (mRNA sequence shown in SEQ ID NO: 251443; polyA tail of approximately 160 nucleotides not shown in sequence; 5′cap, Cap1) fully modified with 5-methylcytosine and N1-methyl-pseudouridine were also analyzed. The expression of G-CSF protein was determined by ELISA and the values are shown in Tables 122 and 123. In Table 122, “NT” means not tested.

[1440] As shown in Table 123, many, but not all, chemical modifications resulted in human G-CSF protein production. These results from cell-based and cell-free translation systems correlate very nicely with the same modifications generally working or not working in both systems. One notable exception is 5-formylcytidine modified G-CSF mRNA which worked in the cell-free translation system, but not in the HeLa cell-based transfection system. A similar difference between the two assays was also seen with 5-formylcytidine modified luciferase mRNA.

[1441] As demonstrated in Table 123, many, but not all, G-CSF mRNA modified chemistries (when used in combination) demonstrated in vivo activity. In addition the presence of N1-methyl-pseudouridine in the modified mRNA (with N4-acetylcytidine or 5 methylcytidine) demonstrated higher expression than when the same combinations where tested using with pseudouridine. Taken together, these data demonstrate that N1-methyl-pseudouridine containing G-CSF mRNA results in improved protein expression in vitro.

TABLE 122
G-CSF Expression

| | | G-CSF |
|---|---|---|
| | | protein |
| | G-CSF | (pg/ml) |
| | protein | Rabbit |
| | (pg/ml) | reticulysates |
| Chemical Modification | HeLa cells | cells |
| Pseudouridine | 1,150,909 | 147,875 |
| 5-methyluridine | 347,045 | 147,250 |
| 2-thiouridine | 417,273 | 18,375 |
| N1-methyl-pseudouridine | NT | 230,000 |
| 4-thiouridine | 107,273 | 52,375 |
| 5-methoxyuridine | 1,715,909 | 201,750 |
| 5-methylcytosine/pseudouridine, Test A | 609,545 | 119,750 |
| 5-methylcytosine/N1-methyl- | 1,534,318 | 110,500 |
| pseudouridine, Test A | | |
| 2′-Fluoro-guanosine | 11,818 | 0 |
| 2′-Fluoro-uridine | 60,455 | 0 |
| 5-methylcytosine/pseudouridine, Test B | 358,182 | 57,875 |
| 5-methylcytosine/N1-methyl- | 1,568,636 | 76,750 |
| pseudouridine, Test B | | |
| 5-Bromo-uridine | 186,591 | 72,000 |
| 5-(2carbomethoxyvinyl) uridine | 1,364 | 0 |
| 5-[3(1-E-propenylamino) uridine | 27,955 | 32,625 |
| α-thio-cytidine | 120,455 | 42,625 |
| 5-methylcytosine/pseudouridine, Test C | 882,500 | 49,250 |
| N1-methyl-adenosine | 4,773 | 0 |
| N6-methyl-adenosine | 1,591 | 0 |
| 5-methyl-cytidine | 646,591 | 79,375 |
| N4-acetylcytidine | 39,545 | 8,000 |
| 5-formyl-cytidine | 0 | 24,000 |
| 5-methylcytosine/pseudouridine, Test D | 87,045 | 47,750 |
| 5-methylcytosine/N1-methyl- | 1,168,864 | 97,125 |
| pseudouridine, Test D | | |
| Mock | 909 | 682 |
| Untreated | 0 | 0 |
| 5-methylcytosine/N1-methyl- | 1,106,591 | NT |
| pseudouridine, Control | | |
| Luciferase control | NT | 0 |

TABLE 123
Combination Chemistries in HeLa cells

| | G-CSF protein |
|---|---|
| | (pg/ml) |
| Chemical Modification | HeLa cells |
| N4-acetylcytidine/pseudouridine | 537,273 |
| N4-acetylcytidine/N1-methyl-pseudouridine | 1,091,818 |
| 5-methylcytidine/5-methoxyuridine | 516,136 |
| 5-methylcytidine/5-bromouridine | 48,864 |
| 5-methylcytidine/5-methyluridine | 207,500 |
| 5-methylcytidine/2-thiouridine | 33,409 |
| N4-acetylcytidine/5-bromouridine | 211,591 |
| N4-acetylcytidine/2-thiouridine | 46,136 |
| 5-methylcytosine/pseudouridine | 301,364 |
| 5-methylcytosine/N1-methyl-pseudouridine | 1,017,727 |
| N4-acetylcytidine/2′Fluorouridine triphosphate | 62,273 |
| 5-methylcytidine/2′Fluorouridine triphosphate | 49,318 |
| 2′Fluorocytosine triphosphate/pseudouridine | 7,955 |
| 2′Fluorocytosine triphosphate/N1-methyl- | 1,364 |
| pseudouridine | |
| 2′Fluorocytosine triphosphate/2-thiouridine | 0 |
| 2′Fluorocytosine triphosphate/5-bromouridine | 1,818 |
| 2′Fluorocytosine triphosphate/2′Fluorouridine | 909 |
| triphosphate | |
| 2′Fluoroguanine triphosphate/5-methylcytidine | 0 |
| 2′Fluoroguanine triphosphate/5-methylcytidine/ | 0 |
| pseudouridine | |
| 2′Fluoroguanine triphosphate/5-methylcytidine/ | 1,818 |
| N1-methyl-pseudouridine | |
| 2′Fluoroguanine triphosphate/pseudouridine | 1,136 |
| 2′Fluoroguanine triphosphate/2′Fluorocytosine | 0 |
| triphosphate/N1-methyl-pseudouridine | |
| 5-methylcytidine/pseudouridine | 617,727 |
| 5-methylcytidine/N1-methyl-pseudouridine | 747,045 |
| 5-methylcytidine/pseudouridine | 475,455 |
| 5-methylcytidine/N1-methyl-pseudouridine | 689,091 |
| 5-methylcytosine/N1-methyl-pseudouridine, Control 1 | 848,409 |
| 5-methylcytosine/N1-methyl-pseudouridine, Control 2 | 581,818 |
| Mock | 682 |
| Untreated | 0 |
| Luciferase 2′Fluorocytosine triphosphate | 0 |
| Luciferase 2′Fluorouridine triphosphate | 0 |

### Example 78. Screening of Chemistries

[1442] The tables listed in below (Tables 124-126) summarize much of the in vitro and in vitro screening data with the different compounds presented in the previous examples. A good correlation exists between cell-based and cell-free translation assays. The same chemistry substitutions generally show good concordance whether tested in the context of luciferase or G-CSF mRNA. Lastly, N1-methyl-pseudouridine containing mRNA show a very high level of protein expression with little to no detectable cytokine stimulation in vitro and in vivo, and is superior to mRNA containing pseudouridine both in vitro and in vivo.

[1443] Luciferase mRNA (mRNA sequence shown in SEQ ID NO: 251443; poly A tail of approximately 160 nucleotides not shown in sequence; 5′cap, Cap1) and G-CSF mRNA (mRNA sequence shown in SEQ ID NO: 251433; polyA tail of approximately 160 nucleotides not shown in sequence; 5′cap, Cap1) were modified with naturally and non-naturally occurring chemistries described in Tables 124 and 125 or combination chemistries described in Table 126 and tested using methods described herein.

[1444] In Tables 125 and 126, “*” refers to in vitro transcription reaction using a mutant T7 polymerase (Durascribe® T7 Transcription kit (Cat. No. DS010925) (Epicentre®, Madison, WI); “**” refers to the second result in vitro transcription reaction using a mutant T7 polymerase (Durascribe® T7 Transcription kit (Cat. No. DS010925) (Epicentre®, Madison, WI); “***” refers to production seen in cell free translations (rabbit reticulocyte lysates); the protein production of HeLa is judged by “+,” “+/−” and “−”; when referring to G-CSF PBMC “++++” means greater than 6,000 pg/ml G-CSF, “+++” means greater than 3,000 pg/ml G-CSF, “++” means greater than 1,500 pg/ml G-CSF, “+” means greater than 300 pg/ml G-CSF, “+/−” means 150-300 pg/ml G-CSF and the background was about 110 pg/ml; when referring to cytokine PBMC “++++” means greater than 1,000 pg/ml interferon-alpha (IFN-alpha), “+++” means greater than 600 pg/ml IFN-alpha, “++” means greater than 300 pg/ml IFN-alpha, “+” means greater than 100 pg/ml IFN-alpha, “−” means less than 100 pg/ml and the background was about 70 pg/ml; and “NT” means not tested. In Table 125, the protein production was evaluated using a mutant T7 polymerase (Durascribe® T7 Transcription kit (Cat. No. DS010925) (Epicentre®, Madison, WI).

TABLE 124
Naturally Occurring

| | | | | Protein | Protein | Cytokines | | In Vivo |
|---|---|---|---|---|---|---|---|---|
| | | IVT | Protein | (G- | (G- | (G- | In Vivo | Protein |
| Common Name | IVT | (G- | (Luc; | CSF; | CSF; | CSF; | Protein | (G- |
| (symbol) | (Luc) | CSF) | HeLa) | HeLa) | PBMC) | PBMC) | (Luc) | CSF) |
| 1-methyladenosine | Fail | Pass | NT | − | +/− | ++ | NT | NT |
| (m¹A) | | | | | | | | |
| N⁶-methyladenosine | Pass | Pass | − | − | +/− | ++++ | NT | NT |
| (m⁶A) | | | | | | | | |
| 2′-O- | Fail* | Not | NT | NT | NT | NT | NT | NT |
| methyladenosine | | Done | | | | | | |
| (Am) | | | | | | | | |
| 5-methylcytidine | Pass | Pass | + | + | + | ++ | + | NT |
| (m⁵C) | | | | | | | | |
| 2′-O-methylcytidine | Fail* | Not | NT | NT | NT | NT | NT | NT |
| (Cm) | | Done | | | | | | |
| 2-thiocytidine (s²C) | Fail | Fail | NT | NT | NT | NT | NT | NT |
| N⁴-acetylcytidine | Pass | Pass | + | + | +/− | +++ | + | NT |
| (ac⁴C) | | | | | | | | |
| 5-formylcytidine | Pass | Pass | −*** | −*** | − | + | NT | NT |
| (f⁵C) | | | | | | | | |
| 2′-O- | Fail* | Not | NT | NT | NT | NT | NT | NT |
| methylguanosine | | Done | | | | | | |
| (Gm) | | | | | | | | |
| inosine (I) | Fail | Fail | NT | NT | NT | NT | NT | NT |
| pseudouridine (Y) | Pass | Pass | + | + | ++ | + | + | NT |
| 5-methyluridine | Pass | Pass | + | + | +/− | + | NT | NT |
| (m⁵U) | | | | | | | | |
| 2′-O-methyluridine | Fail* | Not | NT | NT | NT | NT | NT | NT |
| (Um) | | Done | | | | | | |
| 1- | Pass | Pass | + | Not | ++++ | − | + | NT |
| methylpseudouridine | | | | Done | | | | |
| (m¹Y) | | | | | | | | |
| 2-thiouridine (s²U) | Pass | Pass | − | + | + | + | NT | NT |
| 4-thiouridine (s⁴U) | Fail | Pass | | + | +/− | ++ | NT | NT |
| 5-methoxyuridine | Pass | Pass | + | + | ++ | − | + | NT |
| (mo⁵U) | | | | | | | | |
| 3-methyluridine | Fail | Fail | NT | NT | NT | NT | NT | NT |
| (m³U) | | | | | | | | |

TABLE 125
Non-Naturally Occurring

| | | | | | | | | In |
|---|---|---|---|---|---|---|---|---|
| | | | | Protein | Protein | Cytokines | | Vivo |
| | | IVT | Protein | (G- | (G- | (G- | In Vivo | Protein |
| Common | IVT | (G- | (Luc; | CSF; | CSF; | CSF; | Protein | (G- |
| Name | (Luc) | CSF) | HeLa) | HeLa) | PBMC) | PBMC) | (Luc) | CSF) |
| 2′-F-ara- | Fail | Fail | NT | NT | NT | NT | NT | NT |
| guanosine | | | | | | | | |
| 2′-F-ara- | Fail | Fail | NT | NT | NT | NT | NT | NT |
| adenosine | | | | | | | | |
| 2′-F-ara- | Fail | Fail | NT | NT | NT | NT | NT | NT |
| cytidine | | | | | | | | |
| 2′-F-ara- | Fail | Fail | NT | NT | NT | NT | NT | NT |
| uridine | | | | | | | | |
| 2′-F- | Fail/ | Pass/ | +** | +/− | − | + | + | NT |
| guanosine | Pass** | Fail** | | | | | | |
| 2′-F-adenosine | Fail/ | Fail/ | −** | NT | NT | NT | NT | NT |
| | Pass** | Fail** | | | | | | |
| 2′-F-cytidine | Fail/ | Fail/ | +** | NT | NT | NT | + | NT |
| | Pass** | Pass** | | | | | | |
| 2′-F-uridine | Fail/ | Pass/ | +** | + | +/− | + | − | NT |
| | Pass** | Pass** | | | | | | |
| 2′-OH-ara- | Fail | Fail | NT | NT | NT | NT | NT | NT |
| guanosine | | | | | | | | |
| 2′-OH-ara- | Not | Not | NT | NT | NT | NT | NT | NT |
| adenosine | Done | Done | | | | | | |
| 2′-OH-ara- | Fail | Fail | NT | NT | NT | NT | NT | NT |
| cytidine | | | | | | | | |
| 2′-OH-ara- | Fail | Fail | NT | NT | NT | NT | NT | NT |
| uridine | | | | | | | | |
| 5-Br-Uridine | Pass | Pass | + | + | + | + | + | |
| 5-(2- | Pass | Pass | − | − | +/− | − | | |
| carbomethoxy- | | | | | | | | |
| vinyl) Uridine | | | | | | | | |
| 5-[3-(1-E- | Pass | Pass | − | + | + | − | | |
| Propenylamino) | | | | | | | | |
| Uridine | | | | | | | | |
| (aka Chem 5) | | | | | | | | |
| N6-(19- | Fail | Fail | NT | NT | NT | NT | NT | NT |
| Amino- | | | | | | | | |
| pentaoxanonadecyl) | | | | | | | | |
| A | | | | | | | | |
| 2- | Fail | Fail | NT | NT | NT | NT | NT | NT |
| Dimethylamino | | | | | | | | |
| guanosine | | | | | | | | |
| 6-Aza- | Fail | Fail | NT | NT | NT | NT | NT | NT |
| cytidine | | | | | | | | |
| a-Thio- | Pass | Pass | + | + | +/− | +++ | NT | NT |
| cytidine | | | | | | | | |
| Pseudo- | NT | NT | NT | NT | NT | NT | NT | NT |
| isocytidine | | | | | | | | |
| 5-Iodo-uridine | NT | NT | NT | NT | NT | NT | NT | NT |
| a-Thio-uridine | NT | NT | NT | NT | NT | NT | NT | NT |
| 6-Aza-uridine | NT | NT | NT | NT | NT | NT | NT | NT |
| Deoxy- | NT | NT | NT | NT | NT | NT | NT | NT |
| thymidine | | | | | | | | |
| a-Thio | NT | NT | NT | NT | NT | NT | NT | NT |
| guanosine | | | | | | | | |
| 8-Oxo- | NT | NT | NT | NT | NT | NT | NT | NT |
| guanosine | | | | | | | | |
| O6-Methyl- | NT | NT | NT | NT | NT | NT | NT | NT |
| guanosine | | | | | | | | |
| 7-Deaza- | NT | NT | NT | NT | NT | NT | NT | NT |
| guanosine | | | | | | | | |
| 6-Chloro- | NT | NT | NT | NT | NT | NT | NT | NT |
| purine | | | | | | | | |
| a-Thio- | NT | NT | NT | NT | NT | NT | NT | NT |
| adenosine | | | | | | | | |
| 7-Deaza- | NT | NT | NT | NT | NT | NT | NT | NT |
| adenosine | | | | | | | | |
| 5-iodo- | NT | NT | NT | NT | NT | NT | NT | NT |
| cytidine | | | | | | | | |

[1445] In Table 126, the protein production of HeLa is judged by “+,” “+/−” and “−”; when referring to G-CSF PBMC “++++” means greater than 6,000 pg/ml G-CSF, “+++” means greater than 3,000 pg/ml G-CSF, “++” means greater than 1,500 pg/ml G-CSF, “+” means greater than 300 pg/ml G-CSF, “+/−” means 150-300 pg/ml G-CSF and the background was about 110 pg/ml; when referring to cytokine PBMC “++++” means greater than 1,000 pg/ml interferon-alpha (IFN-alpha), “+++” means greater than 600 pg/ml IFN-alpha, “++” means greater than 300 pg/ml IFN-alpha, “+” means greater than 100 pg/ml IFN-alpha, “−” means less than 100 pg/ml and the background was about 70 pg/ml; “WT” refers to the wild type T7 polymerase, “MT” refers to mutant T7 polymerase (Durascribe® T7 Transcription kit (Cat. No. DS010925) (Epicentre®, Madison, WI) and “NT” means not tested.

TABLE 126
Combination Chemistry

| | | | | | | Protein | Protein | Cytokines | In |
|---|---|---|---|---|---|---|---|---|---|
| | | | | IVT | Protein | (G- | (G- | (G- | Vivo |
| Cytidine | Uridine | | IVT | (G- | (Luc; | CSF; | CSF; | CSF; | Protein |
| analog | analog | Purine | Luc | CSF) | HeLa) | HeLa) | PBMC) | PBMC) | (Luc) |
| N4- | pseudouridine | A, G | Pass | Pass | + | + | NT | NT | + |
| acetylcytidine | | | WT | WT | | | | | |
| N4- | N1- | A, G | Pass | Pass | + | + | NT | NT | + |
| acetylcytidine | methyl- | | WT | WT | | | | | |
| | pseudouridine | | | | | | | | |
| 5- | 5- | A, G | Pass | Pass | + | + | NT | NT | + |
| methylcytidine | methoxyuridine | | WT | WT | | | | | |
| 5- | 5- | A, G | Pass | Pass | Not | + | NT | NT | |
| methylcytidine | bromouridine | | WT | WT | Done | | | | |
| 5- | 5- | A, G | Pass | Pass | + | + | NT | NT | + |
| methylcytidine | methyluridine | | WT | WT | | | | | |
| 5- | 50% 2- | A, G | Pass | Pass | + | NT | NT | NT | + |
| methylcytidine | thiouridine; | | WT | WT | | | | | |
| | 50% | | | | | | | | |
| | uridine | | | | | | | | |
| 5- | 100% | A, G | Pass | Pass | − | + | NT | NT | |
| methylcytidine | 2- | | WT | WT | | | | | |
| | thiouridine | | | | | | | | |
| 5- | pseudo- | A, G | Pass | Pass | + | + | ++ | + | + |
| methylcytidine | uridine | | WT | WT | | | | | |
| 5- | N1- | A, G | Pass | Pass | + | + | ++++ | − | + |
| methylcytidine | methyl- | | WT | WT | | | | | |
| | pseudouridine | | | | | | | | |
| N4- | 2- | A, G | Not | Pass | Not | + | NT | NT | NT |
| acetylcytidine | thiouridine | | Done | WT | Done | | | | |
| N4- | 5- | A, G | Not | Pass | Not | + | NT | NT | NT |
| acetylcytidine | bromouridine | | Done | WT | Done | | | | |
| N4- | 2 | A, G | Pass | Pass | − | + | NT | NT | NT |
| acetylcytidine | Fluorouridine | | | | | | | | |
| | triphosphate | | | | | | | | |
| 5- | 2 | A, G | Pass | Pass | − | + | NT | NT | NT |
| methylcytidine | Fluorouridine | | | | | | | | |
| | triphosphate | | | | | | | | |
| 2 | pseudouridine | A, G | Pass | Pass | − | + | NT | NT | NT |
| Fluorocytosine | | | | | | | | | |
| triphosphate | | | | | | | | | |
| 2 | N1- | A, G | Pass | Pass | − | +/− | NT | NT | NT |
| Fluorocytosine | methyl- | | | | | | | | |
| triphosphate | pseudouridine | | | | | | | | |
| 2 | 2- | A, G | Pass | Pass | − | − | NT | NT | NT |
| Fluorocytosine | thiouridine | | | | | | | | |
| triphosphate | | | | | | | | | |
| 2 | 5- | A, G | Pass | Pass | − | +/− | NT | NT | NT |
| Fluorocytosine | bromouridine | | | | | | | | |
| triphosphate | | | | | | | | | |
| 2 | 2 | A, G | Pass | Pass | − | +/− | NT | NT | NT |
| Fluorocytosine | Fluorouridine | | | | | | | | |
| triphosphate | triphosphate | | | | | | | | |
| 5- | uridine | A, 2 | Pass | Pass | − | − | NT | NT | NT |
| methylcytidine | | Fluoro | | | | | | | |
| | | GTP | | | | | | | |
| 5- | pseudouridine | A, 2 | Pass | Pass | − | − | NT | NT | NT |
| methylcytidine | | Fluoro | | | | | | | |
| | | GTP | | | | | | | |
| 5- | N1- | A, 2 | Pass | Pass | − | +/− | NT | NT | NT |
| methylcytidine | methyl- | Fluoro | | | | | | | |
| | pseudouridine | GTP | | | | | | | |
| 2 | pseudouridine | A, 2 | Pass | Pass | − | +/− | NT | NT | NT |
| Fluorocytosine | | Fluoro | | | | | | | |
| triphosphate | | GTP | | | | | | | |
| 2 | N1- | A, 2 | Pass | Pass | − | − | NT | NT | NT |
| Fluorocytosine | methyl- | Fluoro | | | | | | | |
| triphosphate | pseudouridine | GTP | | | | | | | |

### Example 79. 2′Fluoro Chemistries in PBMC

[1446] The ability of G-CSF modified mRNA (mRNA sequence shown in SEQ ID NO: 251433; polyA tail of approximately 160 nucleotides not shown in sequence; 5′cap, Cap1) to trigger innate an immune response was determined by measuring interferon-alpha (IFN-alpha) and tumor necrosis factor-alpha (TNF-alpha) production. Use of in vitro PBMC cultures is an accepted way to measure the immunostimulatory potential of oligonucleotides (Robbins et al., Oligonucleotides 2009 19:89-102) and transfection methods are described herein. Shown in Table 127 are the average from 2 or 3 separate PBMC donors of the interferon-alpha (IFN-alpha) and tumor necrosis factor alpha (TNF-alpha) production over time as measured by specific ELISA. Controls of R848, P(I)P(C), LPS and Lipofectamine 2000 (L2000) were also analyzed.

[1447] With regards to innate immune recognition, while both modified mRNA chemistries largely prevented IFN-alpha and TNF-alpha production relative to positive controls (R848, P(I)P(C)), 2′fluoro compounds reduce IFN-alpha and TNF-alpha production even lower than other combinations and N4-acetylcytidine combinations raised the cytokine profile.

TABLE 127
IFN-alpha and TNF-alpha

| | IFN-alpha: 3 | TNF-alpha: 2 |
|---|---|---|
| | Donor Aver- | Donor Aver- |
| | age (pg/ml) | age (pg/ml) |
| L2000 | 1 | 361 |
| P(I)P(C) | 482 | 544 |
| R848 | 45 | 8,235 |
| LPS | 0 | 6,889 |
| N4-acetylcytidine/pseudouridine | 694 | 528 |
| N4-acetylcytidine/N1-methyl- | 307 | 283 |
| pseudouridine | | |
| 5-methylcytidine/5-methoxyuridine | 0 | 411 |
| 5-methylcytidine/5-bromouridine | 0 | 270 |
| 5-methylcytidine/5-methyluridine | 456 | 428 |
| 5-methylcytidine/2-thiouridine | 274 | 277 |
| N4-acetylcytidine/2-thiouridine | 0 | 285 |
| N4-acetylcytidine/5-bromouridine | 44 | 403 |
| 5-methylcytidine/pseudouridine | 73 | 332 |
| 5-methylcytidine/N1-methyl- | 31 | 280 |
| pseudouridine | | |
| N4-acetylcytidine/2′fluorouridine | 35 | 32 |
| triphosphate | | |
| 5-methylcytodine/2′fluorouridine | 24 | 0 |
| triphosphate | | |
| 2′fluorocytidine triphosphate/N1- | 0 | 11 |
| methyl-pseudouridine | | |
| 2′fluorocytidine triphosphate/ | 0 | 0 |
| 2-thiouridine | | |
| 2′fluorocytidine/triphosphate5- | 12 | 2 |
| bromouridine | | |
| 2′fluorocytidine triphosphate/ | 11 | 0 |
| 2′fluorouridine triphosphate | | |
| 2′fluorocytidine triphosphate/ | 14 | 23 |
| 5-methylcytidine | | |
| 2′fluorocytidine triphosphate/ | 6 | 21 |
| 5-methylcytidine/pseudouridine | | |
| 2′fluorocytidine triphosphate/ | 3 | 15 |
| 5-methylcytidine/N1-methyl- | | |
| pseudouridine | | |
| 2′fluorocytidine triphosphate/ | 0 | 4 |
| pseudouridine | | |
| 2′fluorocytidine triphosphate/ | 6 | 20 |
| N1-methyl-pseudouridine | | |
| 5-methylcytidine/pseudouridine | 82 | 18 |
| 5-methylcytidine/N1-methyl- | 35 | 3 |
| pseudouridine | | |

### Example 80. Modified mRNA with a Tobacco Etch Virus 5′UTR

[1448] A 5′ untranslated region (UTR) may be provided as a flanking region. Multiple 5′ UTRs may be included in the flanking region and may be the same or of different sequences. Any portion of the flanking regions, including none, may be codon optimized and any may independently contain one or more different structural or chemical modifications, before and/or after codon optimization.

[1449] The 5′ UTR may comprise the 5′UTR from the tobacco etch virus (TEV). Variants of 5′ UTRs may be utilized wherein one or more nucleotides are added or removed to the termini, including A, T, C or G.

### Example 81. Expression of PLGA Formulated mRNA

### A. Synthesis and Characterization of Luciferase PLGA Microspheres

[1450] Luciferase mRNA (mRNA sequence shown in SEQ ID NO: 251443; poly A tail of approximately 140 nucleotides not shown in sequence; 5′cap, Cap1) fully modified with 5-methylcytosine and N1-methyl-pseudouridine, modified with 25% of uridine replaced with 2-thiouridine and 25% of cytosine replaced with 5-methylcytosine, fully modified with N1-methyl-pseudouridine, or fully modified with pseudouridine was reconstituted in 1×TE buffer and then formulated in PLGA microspheres. PLGA microspheres were synthesized using the water/oil/water double emulsification methods known in the art using PLGA-ester cap (Lactel, Cat #B6010-2, inherent viscosity 0.55-0.75, 50:50 LA:GA), polyvinylalcohol (PVA) (Sigma, Cat #348406-25G, MW 13-23 k) dichloromethane and water. Briefly, 0.4 ml of mRNA in TE buffer at 4 mg/ml (W1) was added to 2 ml of PLGA dissolved in dichloromethane (DCM) (O1) at a concentration of 200 mg/ml of PLGA. The W1/O1 emulsion was homogenized (IKA Ultra-Turrax Homogenizer, T18) for 30 seconds at speed 5 (˜19,000 rpm). The W1/O1 emulsion was then added to 250 ml 1% PVA (W2) and homogenized for 1 minute at speed 5 (˜19,000 rpm). Formulations were left to stir for 3 hours, then passed through a 100 μm nylon mesh strainer (Fisherbrand Cell Strainer, Cat #22-363-549) to remove larger aggregates, and finally washed by centrifugation (10 min, 9,250 rpm, 4° C.). The supernatant was discarded and the PLGA pellets were resuspended in 5-10 ml of water, which was repeated 2×. After washing and resuspension with water, 100-200 μl of a PLGA microspheres sample was used to measure particle size of the formulations by laser diffraction (Malvern Mastersizer2000). The washed formulations were frozen in liquid nitrogen and then lyophilized for 2-3 days.

[1451] After lyophilization, ˜10 mg of PLGA MS were weighed out in 2 ml eppendorf tubes and deformulated by adding 1 ml of DCM and letting the samples shake for 2-6 hrs. The mRNA was extracted from the deformulated PLGA microspheres by adding 0.5 ml of water and shaking the sample overnight. Unformulated luciferase mRNA in TE buffer (unformulated control) was spiked into DCM and went through the deformulation process (deformulation control) to be used as controls in the transfection assay. The encapsulation efficiency, weight percent loading and particle size are shown in Table 128. Encapsulation efficiency was calculated as mg of mRNA from deformulation of PLGA microspheres divided by the initial amount of mRNA added to the formulation. Weight percent loading in the formulation was calculated as mg of mRNA from deformulation of PLGA microspheres divided by the initial amount of PLGA added to the formulation.

TABLE 128
PLGA Characteristics

| | | | Theoretical | | Particle |
|---|---|---|---|---|---|
| | Sample | Encapsulation | mRNA | Actual mRNA | Size |
| Chemical Modifications | ID | Efficiency (%) | Loading (wt %) | Loading (wt %) | (D50, um) |
| Fully modified with 5- | 43-66A | 45.8 | 0.4 | 0.18 | 33.4 |
| methylcytosine and N1- | 43-66B | 29.6 | | 0.12 | 27.7 |
| methyl pseudouridine | 43-66C | 25.5 | | 0.10 | 27.1 |
| 25% of uridine replaced | 43-67A | 34.6 | 0.4 | 0.14 | 29.9 |
| with 2-thiouridine and | 43-67B | 22.8 | | 0.09 | 30.2 |
| 25% of cytosine replaced | 43-67C | 23.9 | | 0.10 | 25.1 |
| with 5-methylcytosine | | | | | |
| Fully modified with N1- | 43-69A | 55.8 | 0.4 | 0.22 | 40.5 |
| methyl pseudouridine | 43-69B | 31.2 | | 0.12 | 41.1 |
| | 43-69C | 24.9 | | 0.10 | 46.1 |
| Fully modified with | 43-68-1 | 49.3 | 0.4 | 0.20 | 34.8 |
| pseudouridine | 43-68-2 | 37.4 | | 0.15 | 35.9 |
| | 43-68-3 | 45.0 | | 0.18 | 36.5 |

B. Protein Expression of modified mRNA Encapsulated in PLGA Microspheres

[1452] The day before transfection, 20,000 HeLa cells (ATCC no. CCL-2; Manassas, VA) were harvested by treatment with Trypsin-EDTA solution (LifeTechnologies, Grand Island, NY) and seeded in a total volume of 100 ul EMEM medium (supplemented with 10% FCS and 1× Glutamax) per well in a 96-well cell culture plate (Corning, Manassas, VA). The cells were grown at 37° C. in a 5% CO2 atmosphere overnight. The next day, 83 ng of the deformulated luciferase mRNA PLGA microsphere samples, deformulated luciferase mRNA control (Deform control), or unformulated luciferase mRNA control (Unfomul control) was diluted in a 10 ul final volume of OPTI-MEM (LifeTechnologies, Grand Island, NY). Lipofectamine 2000 (LifeTechnologies, Grand Island, NY) was used as a transfection reagent and 0.2 ul was diluted in a 10 ul final volume of OPTI-MEM. After 5 min of incubation at room temperature, both solutions were combined and incubated an additional 15 min at room temperature. Then 20 μl of the combined solution was added to 100 ul of cell culture medium containing the HeLa cells. The plates were then incubated as described before.

[1453] After an 18 to 22 hour incubation, cells expressing luciferase were lysed with 100 ul Passive Lysis Buffer (Promega, Madison, WI) according to manufacturer instructions. Aliquots of the lysates were transferred to white opaque polystyrene 96-well plates (Corning, Manassas, VA) and combined with 100 ul complete luciferase assay solution (Promega, Madison, WI). The background signal of the plates without reagent was about 200 relative light units per well. The plate reader was a BioTek Synergy H1 (BioTek, Winooski, VT).

[1454] Cells were harvested and the bioluminescence (in relative light units, RLU) for each sample is shown in Table 129. Transfection of these samples confirmed that the varied chemistries of luciferase mRNA is still able to express luciferase protein after PLGA microsphere formulation.

TABLE 129
Chemical Modifications

| Chemical | | Biolum. |
|---|---|---|
| Modifications | Sample ID | (RLU) |
| Fully modified with | Deform contol | 164266.5 |
| 5-methylcytosine | Unformul control | 113714 |
| and N1-methyl- | 43-66A | 25174 |
| pseudouridine | 43-66B | 25359 |
| | 43-66C | 20060 |
| 25% of uridine | Deform contol | 90816.5 |
| replaced with 2- | Unformul control | 129806 |
| thiouridine and 25% | 43-67A | 38329.5 |
| of cytosine replaced | 43-67B | 8471.5 |
| with 5- | 43-67C | 10991.5 |
| methylcytosine | | |
| Fully modified with | Deform contol | 928093.5 |
| N1-methyl- | Unformul control | 1512273.5 |
| pseudouridine | 43-69A | 1240299.5 |
| | 43-69B | 748667.5 |
| | 43-69C | 1193314 |
| Fully modified with | Deform contol | 154168 |
| pseudouridine | Unformul control | 151581 |
| | 43-68-1 | 120974.5 |
| | 43-68-2 | 107669 |
| | 43-68-3 | 97226 |

### Example 82. In Vitro Studies of Factor LX

### A. Serum-Free Media

[1455] Human Factor IX mRNA (mRNA sequence shown in SEQ ID NO: 251437; polyA tail of approximately 160 nucleotides not shown in sequence; 5′cap, Cap1; fully modified with 5-methylcytosine and pseudouridine) was transfected in serum-free media. The cell culture supernatant was collected and subjected to trypsin digestion before undergoing 2-dimensional HPLC separation of the peptides. Matrix-assisted laser desorption/ionization was used to detect the peptides. 8 peptides were detected and 7 of the detected peptides are unique to Factor IX. These results indicate that the mRNA transfected in the serum-free media was able to express full-length Factor IX protein.

### B. Human Embryonic Kidney (HEK) 293A Cells

[1456] 250 ng of codon optimized Human Factor IX mRNA (mRNA sequence shown in SEQ ID NO: 251437; fully modified with 5-methylcytosine and pseudouridine; poly A tail of approximately 160 nucleotides not shown in sequence; 5′cap, Cap1) was transfected into HEK 293A cells (150,000 cells/well) using Lipofectamine 2000 in DMEM in presence of 10% FBS. The transfection complexes were removed 3 hours after transfection. Cells were harvested at 3, 6, 9, 12, 24, 48 and 72 hours after transfection. Total RNA was isolated and used for cDNA synthesis. The cDNA was subjected to analysis by quantitative Real-Time PCR using codon optimized Factor IX specific primer set. Human hypoxanthine phosphoribosyltransfersase 1 (HPRT) level was used for normalization. The data is plotted as a percent of detectable mRNA considering the mRNA level as 100% at the 3 hour time point. The half-life of Factor IX modified mRNA fully modified with 5-methylcytosine and pseudouridine in human embryonic kidney 293 (HEK293) cells is about 8-10 hours.

### Example 83. Saline Formulation: Subcutaneous Administration

[1457] Human G-CSF modified mRNA (mRNA sequence shown in SEQ ID NO: 251433; polyA tail of approximately 160 nucleotides not shown in sequence; 5′cap, Cap1; fully modified with 5-methylcytosine and pseudouridine) and human EPO modified mRNA (mRNA sequence shown in SEQ ID NO: 251436; polyA tail of approximately 160 nucleotides not shown in sequence; 5′cap, Cap1; fully modified with 5-methylcytosine and pseudouridine), were formulated in saline and delivered to mice via intramuscular (IM) injection at a dose of 100 ug.

[1458] Controls included Luciferase (mRNA sequence shown in SEQ ID NO: 251443; polyA tail of approximately 160 nucleotides not shown in sequence; 5′cap, Cap1; fully modified with 5-methylcytosine and pseudouridine)) or the formulation buffer (F.Buffer). The mice were bled at 13 hours after the injection to determine the concentration of the human polypeptide in serum in pg/mL. (G-CSF groups measured human G-CSF in mouse serum and EPO groups measured human EPO in mouse serum). The data are shown in Table 130.

[1459] mRNA degrades rapidly in serum in the absence of formulation suggesting the best method to deliver mRNA to last longer in the system is by formulating the mRNA. As shown in Table 130, mRNA can be delivered subcutaneously using only a buffer formulation.

TABLE 130
Dosing Regimen

| | | Dose | | Average |
|---|---|---|---|---|
| | | Vol. | Dosing | Protein Product |
| Group | Treatment | (μl/mouse) | Vehicle | pg/mL, serum |
| G-CSF | G-CSF | 100 | F. buffer | 45 |
| G-CSF | Luciferase | 100 | F. buffer | 0 |
| G-CSF | F. buffer | 100 | F. buffer | 2.2 |
| EPO | EPO | 100 | F. buffer | 72.03 |
| EPO | Luciferase | 100 | F. buffer | 26.7 |
| EPO | F. buffer | 100 | F. buffer | 13.05 |

### Example 84. Intravitreal Delivery

[1460] mCherry modified mRNA (mRNA sequence shown in SEQ ID NO: 251434; polyA tail of approximately 160 nucleotides not shown in sequence; 5′cap, Cap1; fully modified with 5-methylcytosine and pseudouridine) and luciferase modified mRNA (mRNA sequence shown in SEQ ID NO: 251443; polyA tail of approximately 160 nucleotides not shown in sequence; 5′cap, Cap1; fully modified with 5-methylcytosine and pseudouridine) formulated in saline was delivered intravitreally in rats as described in Table 131. The sample was compared against a control of saline only delivered intravitreally.

TABLE 131
Dosing Chart

| | Dose Level | Dose | Treatment | |
|---|---|---|---|---|
| | (μg modified | volume | Right Eye | Left Eye |
| Group No. | RNA/eye) | (μL/eye) | (OD) | (OS) |
| Control | 0 | 5 | Delivery | Delivery |
| | | | buffer only | buffer only |
| Modified RNA in | 10 | 5 | mCherry | Luciferase |
| delivery buffer | | | | |

[1461] The formulation will be administered to the left or right eye of each animal on day 1 while the animal is anesthetized. On the day prior to administration gentamicin ophthalmic ointment or solution was applied to both eyes twice. The gentamicin ophthalmic ointment or solution was also applied immediately following the injection and on the day following the injection. Prior to dosing, mydriatic drops (1% tropicamide and/or 2.5% phenylephrine) are applied to each eye.

[1462] 18 hours post dosing the eyes receiving the dose of mCherry and delivery buffer are enucleated and each eye was separately placed in a tube containing 10 mL 4% paraformaldehyde at room temperature for overnight tissue fixation. The following day, eyes will be separately transferred to tubes containing 10 mL of 30% sucrose and stored at 21° C. until they were processed and sectioned. The slides prepared from different sections were evaluated under F-microscopy. Positive expression was seen in the slides prepared with the eyes administered mCherry modified mRNA and the control showed no expression.

### Example 85. In Vivo Cytokine Expression Study

[1463] Mice were injected intramuscularly with 200 μg of G-CSF modified mRNA (mRNA sequence shown in SEQ ID NO: 251433; polyA tail of approximately 160 nucleotides not shown in sequence) which was unmodified with a 5′cap, Cap1 (unmodified), fully modified with 5-methylcytosine and pseudouridine and a 5′cap, Cap1 (Gen1) or fully modified with 5-methylcytosine and N1-methyl-pseudouridine and a 5′cap, Cap1 (Gen2 cap) or no cap (Gen2 uncapped). Controls of R-848, 5% sucrose and untreated mice were also analyzed. After 8 hours serum was collected from the mice and analyzed for interferon-alpha (IFN-alpha) expression. The results are shown in Table 132.

TABLE 132
IFN-alpha Expression

| Formulation | IFN-alpha (pg/ml) |
|---|---|
| G-CSF unmodified | 67.012 |
| G-CSF Gen1 | 8.867 |
| G-CSF Gen2 cap | 0 |
| G-CSF Gen2 uncapped | 0 |
| R-848 | 40.971 |
| 5% sucrose | 1.493 |
| Untreated | 0 |

### Example 86. In Vitro Expression of VEGF Modified mRNA

[1464] HEK293 cells were transfected with modified mRNA (mmRNA) VEGF-A (mRNA sequence shown in SEQ ID NO: 251446; polyA tail of approximately 160 nucleotides not shown in sequence; 5′cap, Cap1; fully modified with 5-methylcytosine and pseudouridine) which had been complexed with Lipofectamine2000 from Invitrogen (Carlsbad, CA) at the concentration shown in Table 133. The protein expression was detected by ELISA and the protein (pg/ml) is shown in Table 133 and FIG. 7.

TABLE 134
Protein Expression

| | Amount Transfected | | | | | | | |
|---|---|---|---|---|---|---|---|---|
| | 10 | 2.5 | 625 | 156 | 39 | 10 | 2 | 610 |
| | ng | ng | pg | pg | pg | pg | pg | fg |
| Protein | 10495 | 10038 | 2321.23 | 189.6 | 0 | 0 | 0 | 0 |
| (pg/ml) | | | | | | | | |

### Example 87. In Vitro Screening in HeLa Cells of GFP

[1465] The day before transfection, 20,000 HeLa cells (ATCC no. CCL-2; Manassas, VA) were harvested by treatment with Trypsin-EDTA solution (LifeTechnologies, Grand Island, NY) and seeded in a total volume of 100 μl EMEM medium (supplemented with 10% FCS and 1× Glutamax) per well in a 96-well cell culture plate (Corning, Manassas, VA). The cells were grown at 37° C. in 5% CO₂ atmosphere overnight. Next day, 37.5 ng or 75 ng of Green Fluorescent protein (GFP) modified RNA (mRNA sequence shown in SEQ ID NO: 251445; polyA tail of approximately 160 nucleotides not shown in sequence; 5′cap, Cap1) with the chemical modification described in Table 134, were diluted in 10 ul final volume of OPTI-MEM (LifeTechnologies, Grand Island, NY). Lipofectamine 2000 (LifeTechnologies, Grand Island, NY) was used as transfection reagent and 0.2 ul were diluted in 10 ul final volume of OPTI-MEM. After 5 minutes of incubation at room temperature, both solutions were combined and incubated an additional 15 minute at room temperature. Then the 20 ul combined solution was added to the 100 ul cell culture medium containing the HeLa cells and incubated at room temperature.

[1466] After an 18 to 22 hour incubation cells expressing luciferase were lysed with 100 μl of Passive Lysis Buffer (Promega, Madison, WI) according to manufacturer instructions. Aliquots of the lysates were transferred to white opaque polystyrene 96-well plates (Corning, Manassas, VA) and combined with 100 μl complete luciferase assay solution (Promega, Madison, WI). The median fluorescence intensity (MFI) was determined for each chemistry and is shown in Table 134.

[1467] These results demonstrate that GFP fully modified with N1-methyl-pseudouridine and 5-methylcytosine produces more protein in HeLa cells compared to the other chemistry. Additionally the higher dose of GFP administered to the cells resulted in the highest MFI value.

TABLE 134
Mean Fluorescence Intensity

| | 37.5 ng | 75 ng |
|---|---|---|
| Chemistry | MFI | MFI |
| No modifications | 97400 | 89500 |
| 5-methylcytosine/pseudouridine | 324000 | 715000 |
| 5-methylcytosine/N1-methyl-pseudouridine | 643000 | 1990000 |

### Example 88. Homogenization

[1468] Different luciferase mRNA solutions (as described in Table 135 where “X” refers to the solution containing that component) (mRNA sequence shown in SEQ ID NO: 251443; polyA tail of approximately 160 nucleotides not shown in sequence; 5′cap, Cap1; fully modified with 5-methylcytosine and pseudouridine) were evaluated to test the percent yield of the different solutions, the integrity of the mRNA by bioanalyzer, and the protein expression of the mRNA by in vitro transfection. The mRNA solutions were prepared in water, 1×TE buffer at 4 mg/ml as indicated in Table 135, and added to either dichloromethane (DCM) or DCM containing 200 mg/ml of poly(lactic-co-glycolic acid) (PLGA) (Lactel, Cat #B6010-2, inherent viscosity 0.55-0.75, 50:50 LA:GA) to achieve a final mRNA concentration of 0.8 mg/ml. The solutions requiring homogenization were homogenized for 30 seconds at speed 5 (approximately 19,000 rpm) (IKA Ultra-Turrax Homogenizer, T18). The mRNA samples in water, dicloromethane and poly(lactic-co-glycolic acid) (PLGA) were not recoverable (NR). All samples, except the NR samples, maintained integrity of the mRNA as determined by bioanalyzer (Bio-rad Experion).

[1469] The day before transfection, 20,000 HeLa cells (ATCC no. CCL-2; Manassas, VA) were harvested by treatment with Trypsin-EDTA solution (LifeTechnologies, Grand Island, NY) and seeded in a total volume of 100 ul EMEM medium (supplemented with 10% FCS and 1× Glutamax) per well in a 96-well cell culture plate (Corning, Manassas, VA). The cells were grown at 37° C. in a 5% CO2 atmosphere overnight. The next day, 250 ng of luciferase mRNA from the recoverable samples was diluted in a 10 ul final volume of OPTI-MEM (LifeTechnologies, Grand Island, NY). Lipofectamine 2000 (LifeTechnologies, Grand Island, NY) was used as a transfection reagent and 0.2 ul was diluted in a 10 ul final volume of OPTI-MEM. After 5 minutes of incubation at room temperature, both solutions were combined and incubated an additional 15 minutes at room temperature. Then 20 ul of the combined solution was added to 100 ul of cell culture medium containing the HeLa cells. The plates were then incubated as described before. Controls luciferase mRNA (luciferase mRNA formulated in saline) (Control) and untreated cells (Untreat.) were also evaluated. Cells were harvested and the bioluminescence average (in photons/second) (biolum. (p/s)) for each signal is also shown in Table 135. The recoverable samples all showed activity of luciferase mRNA when analyzed.

[1470] After an 18 to 22 hour incubation, cells expressing luciferase were lysed with 100 ul Passive Lysis Buffer (Promega, Madison, WI) according to manufacturer instructions. Aliquots of the lysates were transferred to white opaque polystyrene 96-well plates (Corning, Manassas, VA) and combined with 100 ul complete luciferase assay solution (Promega, Madison, WI). The background signal of the plates without reagent was about 200 relative light units per well. The plate reader was a BioTek Synergy H1 (BioTek, Winooski, VT).

[1471] Cells were harvested and the bioluminescence average (in relative light units, RLU) (biolum. (RLU)) for each signal is also shown in Table 135. The recoverable samples all showed activity of luciferase mRNA when analyzed.

TABLE 135
Solutions

| Solution | | 1x TE | | | | Yield | Biolum. |
|---|---|---|---|---|---|---|---|
| No. | Water | Buffer | DCM | DCM/PLGA | Homogenizer | (%) | (RLU) |
| 1 | X | | | | | 96 | 5423780 |
| 2 | | X | | | X | 95 | 4911950 |
| 3 | X | | | | X | 92 | 2367230 |
| 4 | | X | | | X | 90 | 4349410 |
| 5 | X | | X | | X | 66 | 4145340 |
| 6 | | X | X | | X | 71 | 3834440 |
| 7 | X | | | X | X | NR | n/a |
| 8 | | X | | X | X | 24 | 3182080 |
| 9 | X | | | X | | NR | n/a |
| 10 | | X | | X | | 79 | 3276800 |
| 11 | X | | X | | | 79 | 5563550 |
| 12 | | X | X | | | 79 | 4919100 |
| Control | | | | | | | 2158060 |
| Untreat. | | | | | | | 3530 |

### Example 89. TE Buffer and Water Evaluation

[1472] Luciferase mRNA (mRNA sequence shown in SEQ ID NO: 251443; poly A tail of approximately 160 nucleotides not shown in sequence; 5′cap, Cap1; fully modified with 5-methylcytosine and pseudouridine) was reconstituted in water or TE buffer as outlined in Table 136 and then formulated in PLGA microspheres. PLGA microspheres were synthesized using the water/oil/water double emulsification methods known in the art using PLGA (Lactel, Cat #B6010-2, inherent viscosity 0.55-0.75, 50:50 LA:GA), polyvinylalcohol (PVA) (Sigma, Cat #348406-25G, MW 13-23 k) dichloromethane and water. Briefly, 0.2 to 0.6 ml of mRNA in water or TE buffer at a concentration of 2 to 6 mg/ml (W1) was added to 2 ml of PLGA dissolved in dichloromethane (DCM) (O1) at a concentration of 100 mg/ml of PLGA. The W1/O1 emulsion was homogenized (IKA Ultra-Turrax Homogenizer, T18) for 30 seconds at speed 5 (˜19,000 rpm). The W1/O1 emulsion was then added to 250 ml 1% PVA (W2) and homogenized for 1 minute at speed 5 (˜19,000 rpm).

[1473] Formulations were left to stir for 3 hours, then passed through a 100 μm nylon mesh strainer (Fisherbrand Cell Strainer, Cat #22-363-549) to remove larger aggregates, and finally washed by centrifugation (10 min, 9,250 rpm, 4° C.). The supernatant was discarded and the PLGA pellets were resuspended in 5-10 ml of water, which was repeated 2×. The washed formulations were frozen in liquid nitrogen and then lyophilized for 2-3 days. After lyophilization, ˜10 mg of PLGA MS were weighed out in 2 ml eppendorf tubes and deformulated by adding 1 ml of DCM and letting the samples shake for 2-6 hrs. mRNA was extracted from the deformulated PLGA microspheres by adding 0.5 ml of water and shaking the sample overnight. Unformulated luciferase mRNA in water or TE buffer (deformulation controls) was spiked into DCM and went through the deformulation process to be used as controls in the transfection assay.

[1474] The day before transfection, 20,000 HeLa cells (ATCC no. CCL-2; Manassas, VA) were harvested by treatment with Trypsin-EDTA solution (LifeTechnologies, Grand Island, NY) and seeded in a total volume of 100 ul EMEM medium (supplemented with 10% FCS and 1× Glutamax) per well in a 96-well cell culture plate (Corning, Manassas, VA). The cells were grown at 37° C. in a 5% CO2 atmosphere overnight. The next day, 100 ng of the deformulated luciferase mRNA samples was diluted in a 10 ul final volume of OPTI-MEM (LifeTechnologies, Grand Island, NY). Lipofectamine 2000 (LifeTechnologies, Grand Island, NY) was used as a transfection reagent and 0.2 ul was diluted in a 10 ul final volume of OPTI-MEM. After 5 minutes of incubation at room temperature, both solutions were combined and incubated an additional 15 minutes at room temperature. Then 20 ul of the combined solution was added to 100 ul of cell culture medium containing the HeLa cells. The plates were then incubated as described before.

[1475] After 18 to 22 hour incubation, cells expressing luciferase were lysed with 100 ul Passive Lysis Buffer (Promega, Madison, WI) according to manufacturer instructions. Aliquots of the lysates were transferred to white opaque polystyrene 96-well plates (Corning, Manassas, VA) and combined with 100 ul complete luciferase assay solution (Promega, Madison, WI). The background signal of the plates without reagent was about 200 relative light units per well. The plate reader was a BioTek Synergy H1 (BioTek, Winooski, VT). To determine the activity of the luciferase mRNA from each formulation, the relative light units (RLU) for each formulation was divided by the RLU of the appropriate mRNA deformulation control (mRNA in water or TE buffer). Table 136 shows the activity of the luciferase mRNA. The activity of the luciferase mRNA in the PLGA microsphere formulations (Form.) was substantially improved by formulating in TE buffer versus water.

TABLE 136
Formulations

| | | W1 | | Theoretical | Actual | | Activity (% of |
|---|---|---|---|---|---|---|---|
| | mRNA | Solvent | Total | mRNA | mRNA | W1 | deformulation |
| Form. | conc. (mg/ml) | volume (ul) | mRNA (ug) | Loading (wt %) | Loading (wt %) | Solvent | control) |
| PLGA A | 4 | 400 | 1600 | 0.80 | 0.14 | Water | 12.5% |
| PLGA B | 4 | 200 | 800 | 0.40 | 0.13 | Water | 1.3% |
| PLGA C | 4 | 600 | 2400 | 1.20 | 0.13 | Water | 12.1% |
| PLGA D | 2 | 400 | 800 | 0.40 | 0.07 | Water | 1.3% |
| PLGA E | 6 | 400 | 2400 | 1.20 | 0.18 | TE Buffer | 38.9% |
| PLGA F | 4 | 400 | 1600 | 0.80 | 0.16 | TE Buffer | 39.7% |
| PLGA G | 4 | 400 | 1600 | 0.80 | 0.10 | TE Buffer | 26.6% |

### Example 90. Chemical Modifications on mRNA

[1476] The day before transfection, 20,000 HeLa cells (ATCC no. CCL-2; Manassas, VA) were harvested by treatment with Trypsin-EDTA solution (Life Technologies, Grand Island, NY) and seeded in a total volume of 100 ul EMEM medium (supplemented with 10% FCS and 1× Glutamax) per well in a 96-well cell culture plate (Corning, Manassas, VA). The cells were grown at 37° C. in 5% CO₂ atmosphere overnight. The next day, 83 ng of Luciferase modified RNA (mRNA sequence shown SEQ ID NO: 251443; polyA tail of approximately 140 nucleotides not shown in sequence; 5′cap, Cap1) with the chemical modification described in Table 137, were diluted in 10 ul final volume of OPTI-MEM (LifeTechnologies, Grand Island, NY). Lipofectamine 2000 (LifeTechnologies, Grand Island, NY) was used as transfection reagent and 0.2 ul were diluted in 10 ul final volume of OPTI-MEM. After 5 minutes of incubation at room temperature, both solutions were combined and incubated an additional 15 minute at room temperature. Then the 20 ul combined solution was added to the 100 ul cell culture medium containing the HeLa cells and incubated at room temperature.

[1477] After 18 to 22 hours of incubation cells expressing luciferase were lysed with 100 ul of Passive Lysis Buffer (Promega, Madison, WI) according to manufacturer instructions. Aliquots of the lysates were transferred to white opaque polystyrene 96-well plates (Corning, Manassas, VA) and combined with 100 ul complete luciferase assay solution (Promega, Madison, WI). The lysate volumes were adjusted or diluted until no more than 2 mio relative light units (RLU) per well were detected for the strongest signal producing samples and the RLUs for each chemistry tested are shown in Table 137. The plate reader was a BioTek Synergy H1 (BioTek, Winooski, VT). The background signal of the plates without reagent was about 200 relative light units per well.

TABLE 137
Chemical Modifications

| Sample | RLU |
|---|---|
| Untreated | 336 |
| Unmodified Luciferase | 33980 |
| 5-methylcytosine and pseudouridine | 1601234 |
| 5-methylcytosine and N1-methyl-pseudouridine | 421189 |
| 25% cytosines replaced with 5-methylcytosine | 222114 |
| and 25% of uridines replaced with 2-thiouridine | |
| N1-methyl-pseudouridine | 3068261 |
| Pseudouridine | 140234 |
| N4-Acetylcytidine | 1073251 |
| 5-methoxyuridine | 219657 |
| 5-Bromouridine | 6787 |
| N4-Acetylcytidineand N1-methyl-pseudouridine | 976219 |
| 5-methylcytosine and 5-methoxyuridine | 66621 |
| 5-methylcytosine and 2′fluorouridine | 11333 |

### Example 91. Intramuscular and Subcutaneous Administration of Modified mRNA

[1478] Luciferase modified mRNA (mRNA sequence shown in SEQ ID NO: 251443; poly A tail of approximately 140 nucleotides not shown in sequence; 5′cap, Cap1) fully modified with 5-methylcytosine and pseudouridine (5mC/pU), fully modified with 5-methylcytosine and N1-methyl-pseudouridine (5mC/N1mpU), fully modified with pseudouridine (pU), fully modified with N1-methyl-pseudouridine (N1mpU) or modified where 25% of the cytosines replaced with 5-methylcytosine and 25% of the uridines replaced with 2-thiouridine (5mC/s2U) formulated in PBS (pH 7.4) was administered to Balb-C mice intramuscularly or subcutaneously at a dose of 2.5 mg/kg. The mice were imaged at 2 hours, 8 hours, 24 hours, 48 hours, 72 hours, 96 hours, 120 hours and 144 hours for intramuscular delivery and 2 hours, 8 hours, 24 hours, 48 hours, 72 hours, 96 hours and 120 hours for subcutaneous delivery. Twenty minutes prior to imaging, mice were injected intraperitoneally with a D-luciferin solution at 150 mg/kg. Animals were then anesthetized and images were acquired with an IVIS Lumina II imaging system (Perkin Elmer). Bioluminescence was measured as total flux (photons/second) of the entire mouse. The average total flux (photons/second) for intramuscular administration is shown in Table 138 and the average total flux (photons/second) for subcutaneous administration is shown in Table 139. The background signal was 3.79E+05 (p/s). The peak expression for intramuscular administration was seen between 24 and 48 hours for all chemistry and expression was still detected at 144 hours. For subcutaneous delivery the peak expression was seen at 2-8 hours and expression was detected at 72 hours.

TABLE 138
Intramuscular Administration

| | 5mC/ | 5mC/ | 5mC/ | | |
|---|---|---|---|---|---|
| | pU | N1mpU | s2U | pU | N1mpU |
| | Flux (p/s) | Flux (p/s) | Flux (p/s) | Flux (p/s) | Flux (p/s) |
| 2 hours | 1.98E+07 | 4.65E+06 | 4.68E+06 | 2.33E+06 | 3.66E+07 |
| 8 hours | 1.42E+07 | 3.64E+06 | 3.78E+06 | 8.07E+06 | 7.21E+07 |
| 24 hours | 2.92E+07 | 1.22E+07 | 3.35E+07 | 1.01E+07 | 1.75E+08 |
| 48 hours | 2.64E+07 | 1.01E+07 | 5.06E+07 | 7.46E+06 | 3.42E+08 |
| 72 hours | 2.18E+07 | 8.59E+06 | 3.42E+07 | 4.08E+06 | 5.83E+07 |
| 96 hours | 2.75E+07 | 2.70E+06 | 2.38E+07 | 4.35E+06 | 7.15E+07 |
| 120 hours | 2.19E+07 | 1.60E+06 | 1.54E+07 | 1.25E+06 | 3.87E+07 |
| 144 hours | 9.17E+06 | 2.19E+06 | 1.14E+07 | 1.86E+06 | 5.04E+07 |

TABLE 139
Subcutaneous Administration

| | 5mC/ | 5mC/ | 5mC/ | | |
|---|---|---|---|---|---|
| | pU | N1mpU | s2U | pU | N1mpU |
| | Flux (p/s) | Flux (p/s) | Flux (p/s) | Flux (p/s) | Flux (p/s) |
| 2 hours | 5.26E+06 | 4.54E+06 | 9.34E+06 | 2.43E+06 | 2.80E+07 |
| 8 hours | 2.32E+06 | 8.75E+05 | 8.15E+06 | 2.12E+06 | 3.09E+07 |
| 24 hours | 2.67E+06 | 5.49E+06 | 3.80E+06 | 2.24E+06 | 1.48E+07 |
| 48 hours | 1.22E+06 | 1.77E+06 | 3.07E+06 | 1.58E+06 | 1.24E+07 |
| 72 hours | 1.12E+06 | 8.00E+05 | 8.53E+05 | 4.80E+05 | 2.29E+06 |
| 96 hours | 5.16E+05 | 5.33E+05 | 4.30E+05 | 4.30E+05 | 6.62E+05 |
| 120 hours | 3.80E+05 | 4.09E+05 | 3.21E+05 | 6.82E+05 | 5.05E+05 |

### Example 92. Osmotic Pump Study

[1479] Prior to implantation, an osmotic pump (ALZET® Osmotic Pump 2001D, DURECT Corp. Cupertino, CA) is loaded with the 0.2 ml of 1×PBS (pH 7.4) (PBS loaded pump) or 0.2 ml of luciferase modified mRNA (mRNA sequence shown in SEQ ID NO: 251443; polyA tail of approximately 140 nucleotides not shown in sequence; 5′cap, Cap1; fully modified with 5-methylcytosine and N1-methyl-pseudouridine) at 1 mg/ml in 1×PBS (pH 7.4) (Luciferase loaded pump) and incubated overnight in 1×PBS (pH 7.4) at 37° C.

[1480] Balb-C mice (n=3) are implanted subcutaneously with either the PBS loaded pump or the luciferase loaded pump and imaged at 2 hours, 8 hours and 24 hours. As a control a PBS loaded pump is implanted subcutaneously and the mice are injected subcutaneously with luciferase modified mRNA in 1×PBS (PBS loaded pump; SC Luciferase) or an osmotic pump is not implanted and the mice are injected subcutaneously with luciferase modified mRNA in 1×PBS (SC Luciferase). The luciferase formulations are outlined in Table 140.

TABLE 140
Luciferase Formulations

| | | Conc | Inj. Vol. | Amt | Dose |
|---|---|---|---|---|---|
| Group | Vehicle | (mg/ml) | (ul) | (ug) | (mg/kg) |
| PBS loaded pump; | PBS | 1.00 | 50 | 50 | 2.5 |
| SC Luciferase | | | | | |
| Luciferase loaded | PBS | 1.00 | — | 200 | 10.0 |
| pump | | | | | |
| PBS loaded pump | PBS | — | — | — | — |
| SC Luciferase | PBS | 1.00 | 50 | 50 | 2.5 |

### Example 93. External Osmotic Pump Study

[1481] An external osmotic pump (ALZET® Osmotic Pump 2001D, DURECT Corp. Cupertino, CA) is loaded with the 0.2 ml of 1×PBS (pH 7.4) (PBS loaded pump) or 0.2 ml of luciferase modified mRNA (mRNA sequence shown in SEQ ID NO: 251443; polyA tail of approximately 140 nucleotides not shown in sequence; 5′cap, Cap1; fully modified with 5-methylcytosine and N1-methyl-pseudouridine) at 1 mg/ml in 1×PBS (pH 7.4) (luciferase loaded pump) and incubated overnight in 1×PBS (pH 7.4) at 37° C.

[1482] Using a catheter connected to the external PBS loaded pump or the luciferase loaded pump Balb-C mice (n=3) are administered the formulation. The mice are imaged at 2 hours, 8 hours and 24 hours. As a control an external PBS loaded pump is used and the mice are injected subcutaneously with luciferase modified mRNA in 1×PBS (PBS loaded pump; SC Luciferase) or the external pump is not used and the mice are only injected subcutaneously with luciferase modified mRNA in 1×PBS (SC Luciferase). Twenty minutes prior to imaging, mice are injected intraperitoneally with a D-luciferin solution at 150 mg/kg. Animals are then anesthetized and images are acquired with an IVIS Lumina II imaging system (Perkin Elmer). Bioluminescence is measured as total flux (photons/second) of the entire mouse. The luciferase formulations are outlined in Table 141 and the average total flux (photons/second).

TABLE 141
Luciferase Formulations

| | | Conc | Inj. Vol. | Amt | Dose |
|---|---|---|---|---|---|
| Group | Vehicle | (mg/ml) | (ul) | (ug) | (mg/kg) |
| PBS loaded pump; | PBS | 1.00 | 50 | 50 | 2.5 |
| SC Luciferase | | | | | |
| Luciferase loaded | PBS | 1.00 | — | 200 | 10.0 |
| pump | | | | | |
| PBS loaded pump | PBS | — | — | — | — |
| SC Luciferase | PBS | 1.00 | 50 | 50 | 2.5 |

### Example 94. Fibrin Sealant Study

[1483] Fibrin sealant, such as Tisseel (Baxter Healthcare Corp., Deerfield, IL), is composed of fibrinogen and thrombin in a dual-barreled syringe. Upon mixing, fibrinogen is converted to fibrin to form a fibrin clot in about 10 to 30 seconds. This clot can mimic the natural clotting mechanism of the body. Additionally a fibrin hydrogel is a three dimensional structure that can potentially be used in sustained release delivery. Currently, fibrin sealant is approved for application in hemostasis and sealing to replace conventional surgical techniques such as suture, ligature and cautery.

[1484] The thrombin and fibrinogen components were loaded separately into a dual barreled syringe. Balb-C mice (n=3) were injected subcutaneously with 50 ul of fibrinogen, 50 ul of thrombin and they were also injected at the same site with modified luciferase mRNA (mRNA sequence shown in SEQ ID NO: 251443; polyA tail of approximately 140 nucleotides not shown in sequence; 5′cap, Cap1; fully modified with 5-methylcytosine and N1-methyl-pseudouridine) (Tisseel+Luciferase), 50 ul of fibrinogen and 50 ul thrombin (Tisseel) or modified luciferase mRNA (Luciferase). The injection of fibrinogen and thrombin was done simultaneously using the dual-barreled syringe. The SC injection of luciferase was done 15 minutes after the fibrinogen/thrombin injection to allow the fibrin hydrogel to polymerize (Tisseel+Luciferase group). A control group of untreated mice were also evaluated. The mice were imaged at 5 hours and 24 hours. Twenty minutes prior to imaging, mice were injected intraperitoneally with a D-luciferin solution at 150 mg/kg. Animals were then anesthetized and images were acquired with an IVIS Lumina II imaging system (Perkin Elmer). Bioluminescence was measured as total flux (photons/second) of the entire mouse. The luciferase formulations are outlined in Table 142 and the average total flux (photons/second) is shown in Table 143. The fibrin sealant was found to not interfere with imaging and the injection of luciferase and Tisseel showed expression of luciferase.

TABLE 142
Luciferase Formulations

| | | Conc | Inj. Vol. | Amt | Dose |
|---|---|---|---|---|---|
| Group | Vehicle | (mg/ml) | (ul) | (ug) | (mg/kg) |
| Tisseel + | PBS | 1.00 | 50 | 50 | 2.5 |
| Luciferase | | | | | |
| Tisseel | — | — | — | — | — |
| Luciferase | PBS | 1.00 | 50 | 50 | 2.5 |
| Untreated | — | — | — | — | — |

TABLE 143
Total Flux

| | 5 Hours | 24 Hours |
|---|---|---|
| Group | Flux (p/s) | Flux (p/s) |
| Tisseel + Luciferase | 4.59E+05 | 3.39E+05 |
| Tisseel | 1.99E+06 | 1.06E+06 |
| Luciferase | 9.94E+05 | 7.44E+05 |
| Untreated | 3.90E+05 | 3.79E+05 |

### Example 95. Fibrin Containing mRNA Sealant Study

A. Modified mRNA and Calcium Chloride

[1485] Prior to reconstitution, luciferase mRNA (mRNA sequence shown in SEQ ID NO: 251443; polyA tail of approximately 140 nucleotides not shown in sequence; 5′cap, Cap1) fully modified with 5-methylcytosine and N1-methyl-pseudouridine or fully modified with N1-methyl-pseudouridine is added to calcium chloride. The calcium chloride is then used to reconstitute thrombin. Fibrinogen is reconstituted with fibrinolysis inhibitor solution per the manufacturer's instructions. The reconstituted thrombin containing modified mRNA and fibrinogen is loaded into a dual barreled syringe. Mice are injected subcutaneously with 50 ul of fibrinogen and 50 ul of thrombin containing modified mRNA or they were injected with 50 ul of PBS containing an equivalent dose of modified luciferase mRNA. A control group of untreated mice is also evaluated. The mice are imaged at predetermined intervals to determine the average total flux (photons/second).

B. Lipid Nanoparticle Formulated Modified mRNA and Calcium Chloride

[1486] Prior to reconstitution, luciferase mRNA (mRNA sequence shown in SEQ ID NO: 251443; polyA tail of approximately 140 nucleotides not shown in sequence; 5′cap, Cap1) fully modified with 5-methylcytosine and N1-methyl-pseudouridine or fully modified with N1-methyl-pseudouridine is formulated in a lipid nanoparticle is added to calcium chloride. The calcium chloride is then used to reconstitute thrombin. Fibrinogen is reconstituted with fibrinolysis inhibitor solution per the manufacturer's instructions. The reconstituted thrombin containing modified mRNA and fibrinogen is loaded into a dual barreled syringe. Mice are injected subcutaneously with 50 ul of fibrinogen and 50 ul of thrombin containing modified mRNA or they were injected with 50 ul of PBS containing an equivalent dose of modified luciferase mRNA. A control group of untreated mice is also evaluated. The mice are imaged at predetermined intervals to determine the average total flux (photons/second).

C. Modified mRNA and Fibrinogen

[1487] Prior to reconstitution, luciferase mRNA (mRNA sequence shown in SEQ ID NO: 251443; polyA tail of approximately 140 nucleotides not shown in sequence; 5′cap, Cap1) fully modified with 5-methylcytosine and N1-methyl-pseudouridine or fully modified with N1-methyl-pseudouridine is added to the fibrinolysis inhibitor solution. The fibrinolysis inhibitor solution is then used to reconstitute fibrinogen. Thrombin is reconstituted with the calcium chloride solution per the manufacturer's instructions. The reconstituted fibrinogen containing modified mRNA and thrombin is loaded into a dual barreled syringe. Mice are injected subcutaneously with 50 ul of thrombin and 50 ul of fibrinogen containing modified mRNA or they were injected with 50 ul of PBS containing an equivalent dose of modified luciferase mRNA. A control group of untreated mice is also evaluated. The mice are imaged at predetermined intervals to determine the average total flux (photons/second).

D. Lipid Nanoparticle Formulated Modified mRNA and Fibrinogen

[1488] Prior to reconstitution, luciferase mRNA (mRNA sequence shown in SEQ ID NO: 251443; polyA tail of approximately 140 nucleotides not shown in sequence; 5′cap, Cap1) fully modified with 5-methylcytosine and N1-methyl-pseudouridine or fully modified with N1-methyl-pseudouridine is formulated in a lipid nanoparticle is added to the fibrinolysis inhibitor solution. The fibrinolysis inhibitor solution is then used to reconstitute fibrinogen. Thrombin is reconstituted with the calcium chloride solution per the manufacturer's instructions. The reconstituted fibrinogen containing modified mRNA and thrombin is loaded into a dual barreled syringe. Mice are injected subcutaneously with 50 ul of thrombin and 50 ul of fibrinogen containing modified mRNA or they were injected with 50 ul of PBS containing an equivalent dose of modified luciferase mRNA. A control group of untreated mice is also evaluated. The mice are imaged at predetermined intervals to determine the average total flux (photons/second).

E. Modified mRNA and Thrombin

[1489] Prior to reconstitution, luciferase mRNA (mRNA sequence shown in SEQ ID NO: 251443; polyA tail of approximately 140 nucleotides not shown in sequence; 5′cap, Cap1) fully modified with 5-methylcytosine and N1-methyl-pseudouridine or fully modified with N1-methyl-pseudouridine is added to the reconstituted thrombin after it is reconstituted with the calcium chloride per the manufacturer's instructions. The fibrinolysis inhibitor solution is then used to reconstitute fibrinogen per the manufacturer's instructions. The reconstituted fibrinogen and thrombin containing modified mRNA is loaded into a dual barreled syringe. Mice are injected subcutaneously with 50 ul of thrombin containing modified mRNA and 50 ul of fibrinogen or they were injected with 50 ul of PBS containing an equivalent dose of modified luciferase mRNA. A control group of untreated mice is also evaluated. The mice are imaged at predetermined intervals to determine the average total flux (photons/second).

F. Lipid Nanoparticle Formulated Modified mRNA and Thrombin

[1490] Prior to reconstitution, luciferase mRNA (mRNA sequence shown in SEQ ID NO: 251443; polyA tail of approximately 140 nucleotides not shown in sequence; 5′cap, Cap1) fully modified with 5-methylcytosine and N1-methyl-pseudouridine or fully modified with N1-methyl-pseudouridine is formulated in a lipid nanoparticle is added to the reconstituted thrombin after it is reconstituted with the calcium chloride per the manufacturer's instructions. The fibrinolysis inhibitor solution is then used to reconstitute fibrinogen per the manufacturer's instructions. The reconstituted fibrinogen and thrombin containing modified mRNA is loaded into a dual barreled syringe. Mice are injected subcutaneously with 50 ul of thrombin containing modified mRNA and 50 ul of fibrinogen or they were injected with 50 ul of PBS containing an equivalent dose of modified luciferase mRNA. A control group of untreated mice is also evaluated. The mice are imaged at predetermined intervals to determine the average total flux (photons/second).

### Example 96. Cationic Lipid Formulation of 5-Methylcytosine and N1-Methyl-pseudouridine Modified mRNA

[1491] Luciferase mRNA (mRNA sequence shown in SEQ ID NO: 251443; polyA tail of approximately 140 nucleotides not shown in sequence; 5′cap, Cap1) fully modified with 5-methylcytosine and N1-methyl-pseudouridine was formulated in the cationic lipids described in Table 144. The formulations were administered intravenously (I.V.), intramuscularly (I.M.) or subcutaneously (S.C.) to Balb-C mice at a dose of 0.05 mg/kg.

TABLE 144
Cationic Lipid Formulations

| Formulation | NPA-126-1 | NPA-127-1 | NPA-128-1 | NPA-129-1 | 111612-B |
|---|---|---|---|---|---|
| Lipid | DLin-MC3- | DLin-KC2- | C12-200 | DLinDMA | DODMA |
| | DMA | DMA | | | |
| Lipid/mRNA | 20:1 | 20:1 | 20:1 | 20:1 | 20:1 |
| ratio (wt/wt) | | | | | |
| Mean Size | 122 nm | 114 nm | 153 nm | 137 nm | 223.2 nm |
| | PDI: 0.13 | PDI: 0.10 | PDI: 0.17 | PDI: 0.09 | PDI: 0.142 |
| Zeta at pH 7.4 | −1.4 mV | −0.5 mV | −1.4 mV | 2.0 mV | −3.09 mV |
| Encaps. | 95% | 77% | 69% | 80% | 64% |
| (RiboGr) | | | | | |

[1492] Twenty minutes prior to imaging, mice were injected intraperitoneally with a D-luciferin solution at 150 mg/kg. Animals were then anesthetized and images were acquired with an IVIS Lumina II imaging system (Perkin Elmer). Bioluminescence was measured as total flux (photons/second) of the entire mouse. The mice were imaged at 2 hours, 8 hours and 24 hours after dosing and the average total flux (photons/second) was measured for each route of administration and cationic lipid formulation. The background flux was about 4.17E+05 p/s. The results of the imaging are shown in Table 145. In Table 145, “NT” means not tested.

TABLE 145
Flux

| | | | DLin- | DLin- | | | |
|---|---|---|---|---|---|---|---|
| | | | MC3-DMA | KC2-DMA | C12-200 | DLinDMA | DODMA |
| Route | Time Point | | Flux (p/s) | Flux (p/s) | Flux (p/s) | Flux (p/s) | Flux (p/s) |
| I.V. | 2 | hrs | 1.92E+08 | 2.91E+08 | 1.08E+08 | 2.53E+07 | 8.40E+06 |
| I.V. | 8 | hrs | 1.47E+08 | 2.13E+08 | 3.72E+07 | 3.82E+07 | 5.62E+06 |
| I.V. | 24 | hrs | 1.32E+07 | 2.41E+07 | 5.35E+06 | 4.20E+06 | 8.97E+05 |
| I.M. | 2 | hrs | 8.29E+06 | 2.37E+07 | 1.80E+07 | 1.51E+06 | NT |
| I.M. | 8 | hrs | 5.83E+07 | 2.12E+08 | 2.60E+07 | 1.99E+07 | NT |
| I.M. | 24 | hrs | 4.30E+06 | 2.64E+07 | 3.01E+06 | 9.46E+05 | NT |
| S.C. | 2 | hrs | 1.90E+07 | 5.16E+07 | 8.91E+07 | 4.66E+06 | 9.61E+06 |
| S.C. | 8 | hrs | 7.74E+07 | 2.00E+08 | 4.58E+07 | 9.67E+07 | 1.90E+07 |
| S.C. | 24 | hrs | 7.49E+07 | 2.47E+07 | 6.96E+06 | 6.50E+06 | 1.28E+06 |

### Example 97. Lipid Nanoparticle Intravenous Study

[1493] Luciferase mRNA (mRNA sequence shown in SEQ ID NO: 251443; poly A tail of approximately 160 nucleotides not shown in sequence; 5′cap, Cap1; fully modified with 5-methylcytosine and pseudouridine) was formulated in a lipid nanoparticle containing 50% DLin-MC3-DMA OR DLin-KC2-DMA as described in Table 146, 38.5% cholesterol, 10% DSPC and 1.5% PEG. The formulation was administered intravenously (I.V.) to Balb-C mice at a dose of 0.5 mg/kg, 0.05 mg/kg, 0.005 mg/kg or 0.0005 mg/kg. Twenty minutes prior to imaging, mice were injected intraperitoneally with a D-luciferin solution at 150 mg/kg. Animals were then anesthetized and images were acquired with an IVIS Lumina II imaging system (Perkin Elmer). Bioluminescence was measured as total flux (photons/second) of the entire mouse.

TABLE 146
Formulations

| Formulation | NPA-098-1 | NPA-100-1 |
|---|---|---|
| Lipid | DLin-KC2-DMA | DLin-MC3-DMA |
| Lipid/mRNA | 20:1 | 20:1 |
| ratio (wt/wt) | | |
| Mean Size | 135 nm | 152 nm |
| | PDI: 0.08 | PDI: 0.08 |
| Zeta at pH 7.4 | −0.6 mV | −1.2 mV |
| Encaps. | 91% | 94% |
| (RiboGr) | | |

[1494] For DLin-KC2-DMA the mice were imaged at 2 hours, 8 hours, 24 hours, 72 hours, 96 hours and 168 hours after dosing and the average total flux (photons/second) was measured for each route of administration and cationic lipid formulation. The background flux was about 3.66E+05 p/s. The results of the imaging are shown in Table 147. Organs were imaged at 8 hours and the average total flux (photons/second) was measured for the liver, spleen, lung and kidney. A control for each organ was also analyzed. The results are shown in Table 149. The peak signal for all dose levels was at 8 hours after administration. Also, distribution to the various organs (liver, spleen, lung, and kidney) may be able to be controlled by increasing or decreasing the LNP dose.

TABLE 147
Flux

| | | 0.5 mg/kg | 0.05 mg/kg | 0.005 mg/kg | 0.0005 mg/kg |
|---|---|---|---|---|---|
| Time Point | | Flux (p/s) | Flux (p/s) | Flux (p/s) | Flux (p/s) |
| 2 | hrs | 3.54E+08 | 1.75E+07 | 2.30E+06 | 4.09E+05 |
| 8 | hrs | 1.67E+09 | 1.71E+08 | 9.81E+06 | 7.84E+05 |
| 24 | hrs | 2.05E+08 | 2.67E+07 | 2.49E+06 | 5.51E+05 |
| 72 | hrs | 8.17E+07 | 1.43E+07 | 1.01E+06 | 3.75E+05 |
| 96 | hrs | 4.10E+07 | 9.15E+06 | 9.58E+05 | 4.29E+05 |
| 168 | hrs | 3.42E+07 | 9.15E+06 | 1.47E+06 | 5.29E+05 |

TABLE 148
Organ Flux

| | | Liver | Spleen | Lung | Kidney |
|---|---|---|---|---|---|
| | | Flux (p/s) | Flux (p/s) | Flux (p/s) | Flux (p/s) |
| 0.5 | mg/kg | 1.42E+08 | 4.86E+07 | 1.90E+05 | 3.20E+05 |
| 0.05 | mg/kg | 7.45E+06 | 4.62E+05 | 6.86E+04 | 9.11E+04 |
| 0.005 | mg/kg | 3.32E+05 | 2.97E+04 | 1.42E+04 | 1.15E+04 |
| 0.0005 | mg/kg | 2.34E+04 | 1.08E+04 | 1.87E+04 | 9.78E+03 |

| | | | | |
|---|---|---|---|---|
| Untreated | 1.88E+04 | 1.02E+04 | 1.41E+04 | 9.20E+03 |

[1495] For DLin-MC3-DMA the mice were imaged at 2 hours, 8 hours, 24 hours, 48 hours, 72 hours and 144 hours after dosing and the average total flux (photons/second) was measured for each route of administration and cationic lipid formulation. The background flux was about 4.51E+05 p/s. The results of the imaging are shown in Table 149. Organs were imaged at 8 hours and the average total flux (photons/second) was measured for the liver, spleen, lung and kidney. A control for each organ was also analyzed. The results are shown in Table 150. The peak signal for all dose levels was at 8 hours after administration. Also, distribution to the various organs (liver, spleen, lung, and kidney) may be able to be controlled by increasing or decreasing the LNP dose.

TABLE 149
Flux

| | | 0.5 mg/kg | 0.05 mg/kg | 0.005 mg/kg | 0.0005 mg/kg |
|---|---|---|---|---|---|
| Time Point | | Flux (p/s) | Flux (p/s) | Flux (p/s) | Flux (p/s) |
| 2 | hrs | 1.23E+08 | 7.76E+06 | 7.66E+05 | 4.88E+05 |
| 8 | hrs | 1.05E+09 | 6.79E+07 | 2.75E+06 | 5.61E+05 |
| 24 | hrs | 4.44E+07 | 1.00E+07 | 1.06E+06 | 5.71E+05 |
| 48 | hrs | 2.12E+07 | 4.27E+06 | 7.42E+05 | 4.84E+05 |
| 72 | hrs | 1.34E+07 | 5.84E+06 | 6.90E+05 | 4.38E+05 |
| 144 | hrs | 4.26E+06 | 2.25E+06 | 4.58E+05 | 3.99E+05 |

TABLE 150
Organ Flux

| | | Liver | Spleen | Lung | Kidney |
|---|---|---|---|---|---|
| | | Flux (p/s) | Flux (p/s) | Flux (p/s) | Flux (p/s) |
| 0.5 | mg/kg | 1.19E+08 | 9.66E+07 | 1.19E+06 | 1.85E+05 |
| 0.05 | mg/kg | 1.10E+07 | 1.79E+06 | 7.23E+04 | 5.82E+04 |
| 0.005 | mg/kg | 3.58E+05 | 6.04E+04 | 1.33E+04 | 1.33E+04 |
| 0.0005 | mg/kg | 2.25E+04 | 1.88E+04 | 2.05E+04 | 1.65E+04 |

| | | | | |
|---|---|---|---|---|
| Untreated | 1.91E+04 | 1.66E+04 | 2.63E+04 | 2.14E+04 |

### Example 98. Lipid Nanoparticle Subcutaneous Study

[1496] Luciferase mRNA (mRNA sequence shown in SEQ ID NO: 251443; poly A tail of approximately 160 nucleotides not shown in sequence; 5′cap, Cap1; fully modified with 5-methylcytosine and pseudouridine) was formulated in a lipid nanoparticle containing 50% DLin-KC2-DMA as described in Table 151, 385% cholesterol, 10% DSPC and 1.5% PEG. The formulation was administered subcutaneously (S.C.) to Balb-C mice at a dose of 0.5 mg/kg, 0.05 mg/kg or 0.005 mg/kg.

TABLE 151
DLin-KC2-DMA Formulation

| Formulation | NPA-098-1 |
|---|---|
| Lipid | DLin-KC2-DMA |
| Lipid/mRNA | 20:1 |
| ratio (wt/wt) | |
| Mean Size | 135 nm |
| | PDI: 0.08 |
| Zeta at pH 7.4 | −0.6 mV |
| Encaps. | 91% |
| (RiboGr) | |

[1497] Twenty minutes prior to imaging, mice were injected intraperitoneally with a D-luciferin solution at 150 mg/kg. Animals were then anesthetized and images were acquired with an IVIS Lumina II imaging system (Perkin Elmer). Bioluminescence was measured as total flux (photons/second) of the entire mouse. The mice were imaged at 2 hours, 8 hours, 24 hours, 48 hours, 72 hours and 144 hours after dosing and the average total flux (photons/second) was measured for each route of administration and cationic lipid formulation. The lower limit of detection was about 3E+05 p/s. The results of the imaging are shown in Table 152. Organs were imaged at 8 hours and the average total flux (photons/second) was measured for the liver, spleen, lung and kidney. A control for each organ was also analyzed. The results are shown in Table 153. The peak signal for all dose levels was at 8 hours after administration. Also, distribution to the various organs (liver, spleen, lung, and kidney) may be able to be controlled by increasing or decreasing the LNP dose. At high doses, the LNP formulations migrates outside of the subcutaneous injection site, as high levels of luciferase expression are detected in the liver, spleen, lung, and kidney.

TABLE 152
Flux

| | 0.5 mg/kg | 0.05 mg/kg | 0.005 mg/kg |
|---|---|---|---|
| Time Point | Flux (p/s) | Flux (p/s) | Flux (p/s) |

| | | | | |
|---|---|---|---|---|
| 2 | hrs | 3.18E+07 | 7.46E+06 | 8.94E+05 |
| 8 | hrs | 5.15E+08 | 2.18E+08 | 1.34E+07 |
| 24 | hrs | 1.56E+08 | 5.30E+07 | 7.16E+06 |
| 48 | hrs | 5.22E+07 | 8.75E+06 | 9.06E+05 |
| 72 | hrs | 8.87E+06 | 1.50E+06 | 2.98E+05 |
| 144 | hrs | 4.55E+05 | 3.51E+05 | 2.87E+05 |

TABLE 153
Organ Flux

| | | Liver | Spleen | Lung | Kidney |
|---|---|---|---|---|---|
| | | Flux (p/s) | Flux (p/s) | Flux (p/s) | Flux (p/s) |
| 0.5 | mg/kg | 1.01E+07 | 7.43E+05 | 9.75E+04 | 1.75E+05 |
| 0.05 | mg/kg | 1.61E+05 | 3.94E+04 | 4.04E+04 | 3.29E+04 |
| 0.005 | mg/kg | 2.84E+04 | 2.94E+04 | 2.42E+04 | 9.79E+04 |

| | | | | |
|---|---|---|---|---|
| Untreated | 1.88E+04 | 1.02E+04 | 1.41E+04 | 9.20E+03 |

### Example 99. Cationic Lipid Nanoparticle Subcutaneous Study

[1498] Luciferase mRNA (mRNA sequence shown in SEQ ID NO: 251443; poly A tail of approximately 160 nucleotides not shown in sequence; 5′cap, Cap1; fully modified with 5-methylcytosine and pseudouridine) is formulated in a lipid nanoparticle containing 50% DLin-MC3-DMA, 38.5% cholesterol, 10% DSPC and 1.5% PEG. The formulation is administered subcutaneously (S.C.) to Balb-C mice at a dose of 0.5 mg/kg, 0.05 mg/kg or 0.005 mg/kg.

[1499] The mice are imaged at 2 hours, 8 hours, 24 hours, 48 hours, 72 hours and 144 hours after dosing and the average total flux (photons/second) was measured for each route of administration and cationic lipid formulation. Organs are imaged at 8 hours and the average total flux (photons/second) is measured for the liver, spleen, lung and kidney. A control for each organ is also analyzed.

### Example 100. Luciferase Lipoplex Study

[1500] Lipoplexed luciferase mRNA (mRNA sequence shown in SEQ ID NO: 251443; polyA tail of approximately 140 nucleotides not shown in sequence; 5′cap, Cap1) fully modified with 5-methylcytosine and pseudouridine (5mC/pU), fully modified with 5-methylcytosine and N1-methyl-pseudouridine (5mC/N1mpU) or modified where 25% of the cytosines replaced with 5-methylcytosine and 25% of the uridines replaced with 2-thiouridine (5mC/s2U). The formulation was administered intravenously (I.V.), intramuscularly (I.M.) or subcutaneously (S.C.) to Balb-C mice at a dose of 0.10 mg/kg.

[1501] Twenty minutes prior to imaging, mice were injected intraperitoneally with a D-luciferin solution at 150 mg/kg. Animals were then anesthetized and images were acquired with an IVIS Lumina II imaging system (Perkin Elmer). Bioluminescence was measured as total flux (photons/second) of the entire mouse. The mice were imaged at 8 hours, 24 hours and 48 hours after dosing and the average total flux (photons/second) was measured for each route of administration and chemical modification. The background signal was about 3.91E+05 p/s. The results of the imaging are shown in Table 154. Organs were imaged at 6 hours and the average total flux (photons/second) was measured for the liver, spleen, lung and kidney. A control for each organ was also analyzed. The results are shown in Table 155.

TABLE 154
Flux

| | | | 5mC/pU | 5mC/N1mpU | 5mC/s2U |
|---|---|---|---|---|---|
| Route | Time Point | | Flux (p/s) | Flux (p/s) | Flux (p/s) |
| I.V. | 8 | hrs | 5.76E+06 | 1.78E+06 | 1.88E+06 |
| I.V. | 24 | hrs | 1.02E+06 | 7.13E+05 | 5.28E+05 |
| I.V. | 48 | hrs | 4.53E+05 | 3.76E+05 | 4.14E+05 |
| I.M. | 8 | hrs | 1.90E+06 | 2.53E+06 | 1.29E+06 |
| I.M. | 24 | hrs | 9.33E+05 | 7.84E+05 | 6.48E+05 |
| I.M. | 48 | hrs | 8.51E+05 | 6.59E+05 | 5.49E+05 |
| S.C. | 8 | hrs | 2.85E+06 | 6.48E+06 | 1.14E+06 |
| S.C. | 24 | hrs | 6.66E+05 | 7.15E+06 | 3.93E+05 |
| S.C. | 48 | hrs | 3.24E+05 | 3.20E+06 | 5.45E+05 |

TABLE 155
Organ Flux

| | | Liver | Spleen | Lung | Kidney | Inj. Site |
|---|---|---|---|---|---|---|
| Route | Chemistry | Flux (p/s) | Flux (p/s) | Flux (p/s) | Flux (p/s) | Flux (p/s) |
| I.V. | 5mC/pU | 5.26E+05 | 2.04E+07 | 4.28E+06 | 1.77E+04 | n/a |
| I.V. | 5mC/N1mpU | 1.48E+05 | 5.00E+06 | 1.93E+06 | 1.77E+04 | n/a |
| I.V. | 5mC/s2U | 2.14E+04 | 3.29E+06 | 5.48E+05 | 2.16E+04 | n/a |
| I.M. | 5mC/pU | 2.46E+04 | 1.38E+04 | 1.50E+04 | 1.44E+04 | 1.15E+06 |
| I.M. | 5mC/N1mpU | 1.72E+04 | 1.76E+04 | 1.99E+04 | 1.56E+04 | 1.20E+06 |
| I.M. | 5mC/s2U | 1.28E+04 | 1.36E+04 | 1.33E+04 | 1.07E+04 | 7.60E+05 |
| S.C. | 5mC/pU | 1.55E+04 | 1.67E+04 | 1.45E+04 | 1.69E+04 | 4.46E+04 |
| S.C. | 5mC/N1mpU | 1.20E+04 | 1.46E+04 | 1.38E+04 | 1.14E+04 | 8.29E+04 |
| S.C. | 5mC/s2U | 1.22E+04 | 1.31E+04 | 1.45E+04 | 1.08E+04 | 5.62E+04 |
| | Untreated | 2.59E+04 | 1.34E+04 | 1.26E+04 | 1.22E+04 | n/a |

### Example 101. Cationic Lipid Formulation of Modified mRNA

[1502] Luciferase mRNA (mRNA sequence shown in SEQ ID NO: 251443; poly A tail of approximately 140 nucleotides not shown in sequence; 5′cap, Cap1) modified where 25% of the cytosines replaced with 5-methylcytosine and 25% of the uridines replaced with 2-thiouridine (5mC/s2U) was formulated in the cationic lipids described in Table 156. The formulations were administered intravenously (I.V.), intramuscularly (I.M.) or subcutaneously (S.C.) to Balb-C mice at a dose of 0.05 mg/kg.

TABLE 156
Cationic Lipid Formulations

| Formulation | NPA-130-1 | NPA-131-1 | NPA-132-1 | NPA-133-1 | 111612-C |
|---|---|---|---|---|---|
| Lipid | DLin-MC3- | DLin-KC2- | C12-200 | DLinDMA | DODMA |
| | DMA | DMA | | | |
| Lipid/mRNA | 20:1 | 20:1 | 20:1 | 20:1 | 20:1 |
| ratio (wt/wt) | | | | | |
| Mean Size | 120 nm | 105 nm | 122 nm | 105 nm | 221.3 nm |
| | PDI: 0.10 | PDI: 0.11 | PDI: 0.13 | PDI: 0.14 | PDI: 0.063 |
| Zeta at pH 7.4 | 0.2 mV | −0.6 mV | −0.5 mV | −0.3 mV | −3.10 mV |
| Encaps. | 100% | 100% | 93% | 93% | 60% |
| (RiboGr) | | | | | |

[1503] Twenty minutes prior to imaging, mice were injected intraperitoneally with a D-luciferin solution at 150 mg/kg. Animals were then anesthetized and images were acquired with an IVIS Lumina II imaging system (Perkin Elmer). Bioluminescence was measured as total flux (photons/second) of the entire mouse. The mice were imaged at 2 hours, 8 hours and 24 hours after dosing and the average total flux (photons/second) was measured for each route of administration and cationic lipid formulation. The background flux was about 3.31E+05 p/s. The results of the imaging are shown in Table 157. In Table 157, “NT” means not tested. Untreated mice showed an average flux of 3.14E+05 at 2 hours, 3.33E+05 at 8 hours and 3.46E+05 at 24 hours. Peak expression was seen for all three routes tested at 8 hours. DLin-KC2-DMA has better expression than DLin-MC3-DMA and DODMA showed expression for all routes evaluated.

TABLE 157
Flux

| | | | DLin- | DLin- | | | |
|---|---|---|---|---|---|---|---|
| | Time | | MC3-DMA | KC2-DMA | C12-200 | DLinDMA | DODMA |
| Route | Point | | Flux (p/s) | Flux (p/s) | Flux (p/s) | Flux (p/s) | Flux (p/s) |
| I.V. | 2 | hrs | 9.88E+06 | 6.98E+07 | 9.18E+06 | 3.98E+06 | 5.79E+06 |
| I.V. | 8 | hrs | 1.21E+07 | 1.23E+08 | 1.02E+07 | 5.98E+06 | 6.14E+06 |
| I.V. | 24 | hrs | 2.02E+06 | 1.05E+07 | 1.25E+06 | 1.35E+06 | 5.72E+05 |
| I.M. | 2 | hrs | 6.72E+05 | 3.66E+06 | 3.25E+06 | 7.34E+05 | 4.42E+05 |
| I.M. | 8 | hrs | 7.78E+06 | 2.85E+07 | 4.29E+06 | 2.22E+06 | 1.38E+05 |
| I.M. | 24 | hrs | 4.22E+05 | 8.79E+05 | 5.95E+05 | 8.48E+05 | 4.80E+05 |
| S.C. | 2 | hrs | 2.37E+06 | 4.77E+06 | 4.44E+06 | 1.07E+06 | 1.05E+06 |
| S.C. | 8 | hrs | 3.65E+07 | 1.17E+08 | 3.71E+06 | 9.33E+06 | 2.57E+06 |
| S.C. | 24 | hrs | 4.47E+06 | 1.28E+07 | 6.39E+05 | 8.89E+05 | 4.27E+05 |

### Example 102. Formulation of 5-Methylcytosine and N1-Methyl-pseudouridine Modified mRNA

[1504] Luciferase mRNA (mRNA sequence shown in SEQ ID NO: 251443; poly A tail of approximately 140 nucleotides not shown in sequence; 5′cap, Cap1) fully modified with 5-methylcytosine and N1-methyl-pseudouridine was formulated in PBS (pH of 7.4). The formulations were administered intramuscularly (I.M.) or subcutaneously (S.C.) to Balb-C mice at a dose of 2.5 mg/kg.

[1505] Twenty minutes prior to imaging, mice were injected intraperitoneally with a D-luciferin solution at 150 mg/kg. Animals were then anesthetized and images were acquired with an IVIS Lumina II imaging system (Perkin Elmer). Bioluminescence was measured as total flux (photons/second) of the entire mouse. The mice were imaged at 5 minutes, 30 minutes, 60 minutes and 120 minutes after dosing and the average total flux (photons/second) was measured for each route of administration and cationic lipid formulation. The background flux was about 3.78E+05 p/s. The results of the imaging are shown in Table 158. Expression of luciferase was already seen at 30 minutes with both routes of delivery. Peak expression from subcutaneous administration appears between 30 to 60 minutes. Intramuscular expression was still increasing at 120 minutes.

TABLE 158
Flux

| | | PBS (pH 7.4) |
|---|---|---|
| Route | Time Point | Flux (p/s) |

| | | | |
|---|---|---|---|
| I.M. | 5 | min | 4.38E+05 |
| I.M. | 30 | min | 1.09E+06 |
| I.M. | 60 | min | 1.18E+06 |
| I.M. | 120 | min | 2.86E+06 |
| S.C. | 5 | min | 4.19E+05 |
| S.C. | 30 | min | 6.38E+06 |
| S.C. | 60 | min | 5.61E+06 |
| S.C. | 120 | min | 2.66E+06 |

### Example 103. Intramuscular and Subcutaneous Administration of Chemically Modified mRNA

[1506] Luciferase modified mRNA (mRNA sequence shown in SEQ ID NO: 251443; poly A tail of approximately 140 nucleotides not shown in sequence; 5′cap, Cap1) fully modified with N4-acetylcytidine, fully modified with 5-methoxyuridine, fully modified with N4-acetylcytidine and N1-methyl-pseudouridine or fully modified 5-methylcytosine and 5-methoxyuridine formulated in PBS (pH 7.4) was administered to Balb-C mice intramuscularly or subcutaneously at a dose of 2.5 mg/kg. Twenty minutes prior to imaging, mice were injected intraperitoneally with a D-luciferin solution at 150 mg/kg. Animals were then anesthetized and images were acquired with an IVIS Lumina II imaging system (Perkin Elmer). Bioluminescence was measured as total flux (photons/second) of the entire mouse. The mice were imaged at 2 hours, 8 hours and 24 hours. The average total flux (photons/second) for intramuscular administration is shown in Table 159 and the average total flux (photons/second) for subcutaneous administration is shown in Table 160. The background signal was 3.84E+05 (p/s). The peak expression for intramuscular administration was seen between 24 and 48 hours for all chemistry and expression was still detected at 120 hours. For subcutaneous delivery the peak expression was seen at 2-8 hours and expression was detected at 72 hours.

TABLE 159
Intramuscular Administration

| | 2 hours | 8 hours | 24 hours |
|---|---|---|---|
| | Flux (p/s) | Flux (p/s) | Flux (p/s) |
| N4-acetylcytidine | 1.32E+07 | 2.15E+07 | 4.01E+07 |
| 5-methoxyuridine | 4.93E+06 | 1.80E+07 | 4.53E+07 |
| N4-acetylcytidine/ | 2.02E+07 | 1.93E+07 | 1.63E+08 |
| N1-methyl-pseudouridine | | | |
| 5-methylcytosine/5- | 6.79E+06 | 4.55E+07 | 3.44E+07 |
| methoxyuridine | | | |

TABLE 160
Subcutaneous Administration

| | 2 hours | 8 hours | 24 hours |
|---|---|---|---|
| | Flux (p/s) | Flux (p/s) | Flux (p/s) |
| N4-acetylcytidine | 3.07E+07 | 1.23E+07 | 1.28E+07 |
| 5-methoxyuridine | 7.10E+06 | 9.38E+06 | 1.32E+07 |
| N4-acetylcytidine/ | 7.12E+06 | 3.07E+06 | 1.03E+07 |
| N1-methyl-pseudouridine | | | |
| 5-methylcytosine/5- | 7.15E+06 | 1.25E+07 | 1.11E+07 |
| methoxyuridine | | | |

### Example 104. In Vivo Study

[1507] Luciferase modified mRNA containing at least one chemical modification is formulated as a lipid nanoparticle (LNP) using the syringe pump method and characterized by particle size, zeta potential, and encapsulation.

[1508] As outlined in Table 161, the luciferase LNP formulation is administered to Balb-C mice intramuscularly (I.M.), intravenously (I.V.) and subcutaneously (S.C.). As a control luciferase modified RNA formulated in PBS is administered intravenously to mice.

TABLE 161
Luciferase Formulations

| | | | Concen- | Injection | Amount of | |
|---|---|---|---|---|---|---|
| | | | tration | Volume | modified | Dose |
| Formulation | Vehicle | Route | (mg/ml) | (ul) | RNA (ug) | (mg/kg) |
| Luc-LNP | PBS | S.C. | 0.2000 | 50 | 10 | 0.5000 |
| Luc-LNP | PBS | S.C. | 0.0200 | 50 | 1 | 0.0500 |
| Luc-LNP | PBS | S.C. | 0.0020 | 50 | 0.1 | 0.0050 |
| Luc-LNP | PBS | S.C. | 0.0002 | 50 | 0.01 | 0.0005 |
| Luc-LNP | PBS | I.V. | 0.2000 | 50 | 10 | 0.5000 |
| Luc-LNP | PBS | I.V. | 0.0200 | 50 | 1 | 0.0500 |
| Luc-LNP | PBS | I.V. | 0.0020 | 50 | 0.1 | 0.0050 |
| Luc-LNP | PBS | I.V. | 0.0002 | 50 | 0.01 | 0.0005 |
| Luc-LNP | PBS | I.M. | 0.2000 | 50 | 10 | 0.5000 |
| Luc-LNP | PBS | I.M. | 0.0200 | 50 | 1 | 0.0500 |
| Luc-LNP | PBS | I.M. | 0.0020 | 50 | 0.1 | 0.0050 |
| Luc-LNP | PBS | I.M. | 0.0002 | 50 | 0.01 | 0.0005 |
| Luc-PBS | PBS | I.V. | 0.20 | 50 | 10 | 0.50 |

[1509] The mice are imaged at 2, 8, 24, 48, 120 and 192 hours to determine the bioluminescence (measured as total flux (photons/second) of the entire mouse). At 8 hours or 192 hours the liver, spleen, kidney and injection site for subcutaneous and intramuscular administration are imaged to determine the bioluminescence.

### Example 105. Cationic Lipid Formulation Studies of Chemically Modified mRNA

[1510] Luciferase mRNA (mRNA sequence shown in SEQ ID NO: 251443; polyA tail of approximately 140 nucleotides not shown in sequence; 5′cap, Cap1) fully modified with 5-methylcytosine and pseudouridine (5mC/pU), pseudouridine (pU) or N1-methyl-pseudouridine (N1mpU) was formulated in the cationic lipids described in Table 162. The formulations were administered intravenously (I.V.), intramuscularly (I.M.) or subcutaneously (S.C.) to Balb-C mice at a dose of 0.05 mg/kg.

TABLE 162
Cationic Lipid Formulations

| Formulation | NPA-137-1 | NPA-134-1 | NPA-135-1 | NPA-136-1 | 111612-A |
|---|---|---|---|---|---|
| Lipid | DLin-MC3- | DLin-MC3- | DLin-KC2- | C12-200 | DODMA |
| | DMA | DMA | DMA | | |
| Lipid/mRNA | 20:1 | 20:1 | 20:1 | 20:1 | 20:1 |
| ratio (wt/wt) | | | | | |
| Mean Size | 111 nm | 104 nm | 95 nm | 143 nm | 223.2 nm |
| | PDI: 0.15 | PDI: 0.13 | PDI: 0.11 | PDI: 0.12 | PDI: 0.142 |
| Zeta at pH 7.4 | −4.1 mV | −1.9 mV | −1.0 mV | 0.2 mV | −3.09 mV |
| Encaps. | 97% | 100% | 100% | 78% | 64% |
| (RiboGr) | | | | | |
| Chemistry | pU | N1mpU | N1mpU | N1mpU | 5mC/pU |

[1511] Twenty minutes prior to imaging, mice were injected intraperitoneally with a D-luciferin solution at 150 mg/kg. Animals were then anesthetized and images were acquired with an IVIS Lumina II imaging system (Perkin Elmer). Bioluminescence was measured as total flux (photons/second) of the entire mouse. The mice were imaged at 2 hours, 8 hours and 24 hours after dosing and the average total flux (photons/second) was measured for each route of administration and cationic lipid formulation. The background flux was about 4.11E+05 p/s. The results of the imaging are shown in Table 163. Peak expression was seen for all three routes tested at 8 hours.

TABLE 163
Flux

| | | | DLin- | DLin- | DLin- | | |
|---|---|---|---|---|---|---|---|
| | | | MC3-DMA | MC3-DMA | KC2-DMA | C12-200 | DODMA |
| | Time | | (pU) | (N1mpU) | (N1mpU) | (N1mpU) | (5mC/pU) |
| Route | Point | | Flux (p/s) | Flux (p/s) | Flux (p/s) | Flux (p/s) | Flux (p/s) |
| I.V. | 2 | hrs | 3.21E+08 | 1.24E+09 | 1.01E+09 | 9.00E+08 | 3.90E+07 |
| I.V. | 8 | hrs | 1.60E+09 | 3.22E+09 | 2.38E+09 | 1.11E+09 | 1.17E+07 |
| I.V. | 24 | hrs | 1.41E+08 | 3.68E+08 | 3.93E+08 | 8.06E+07 | 1.11E+07 |
| I.M. | 2 | hrs | 2.09E+07 | 3.29E+07 | 8.32E+07 | 9.43E+07 | 4.66E+06 |
| I.M. | 8 | hrs | 2.16E+08 | 6.14E+08 | 1.00E+09 | 8.77E+07 | 7.05E+06 |
| I.M. | 24 | hrs | 1.23E+07 | 1.40E+08 | 5.09E+08 | 1.36E+07 | 1.14E+06 |
| S.C. | 2 | hrs | 2.32E+07 | 3.60E+07 | 2.14E+08 | 1.01E+08 | 3.11E+07 |
| S.C. | 8 | hrs | 5.55E+08 | 9.80E+08 | 4.93E+09 | 1.01E+09 | 8.04E+07 |
| S.C. | 24 | hrs | 1.81E+08 | 2.74E+08 | 2.12E+09 | 4.74E+07 | 1.34E+07 |

### Example 106. Studies of Chemical Modified mRNA

[1512] Luciferase mRNA (mRNA sequence shown in SEQ ID NO: 251443; polyA tail of approximately 140 nucleotides not shown in sequence; 5′cap, Cap1) fully modified with N4-acetylcytidine (N4-acetyl), fully modified with 5-methoxyuridine (5meth), fully modified with N4-acetylcytidine and N1-methyl-pseudouridine (N4-acetyl/N1mpU) or fully modified with 5-methylcytosine and 5-methoxyuridine (5mC/5-meth) was formulated in DLin-MC3-DMA as described in Table 164.

[1513] The formulations were administered intravenously (I.V.), intramuscularly (I.M.) or subcutaneously (S.C.) to Balb-C mice at a dose of 0.05 mg/kg.

TABLE 164
Cationic Lipid Formulations

| Formulation | NPA-141-1 | NPA-142-1 | NPA-143-1 | NPA-144-1 |
|---|---|---|---|---|
| Lipid | DLin-MC3- | DLin-MC3- | DLin-MC3- | DLin-MC3- |
| | DMA | DMA | DMA | DMA |
| Lipid/mRNA | 20:1 | 20:1 | 20:1 | 20:1 |
| ratio (wt/wt) | | | | |
| Mean Size | 138 nm | 116 nm | 144 nm | 131 nm |
| | PDI: 0.16 | PDI: 0.15 | PDI: 0.15 | PDI: 0.15 |
| Zeta at pH 7.4 | −2.8 mV | −2.8 mV | −4.3 mV | −5.0 mV |
| Encaps. | 97% | 100% | 75% | 72% |
| (RiboGr) | | | | |
| Chemistry | N4-acetyl | 5meth | N4-acetyl/ | 5mC/ |
| | | | N1mpU | 5-meth |

[1514] Twenty minutes prior to imaging, mice were injected intraperitoneally with a D-luciferin solution at 150 mg/kg. Animals were then anesthetized and images were acquired with an IVIS Lumina II imaging system (Perkin Elmer). Bioluminescence was measured as total flux (photons/second) of the entire mouse. The mice were imaged at 2 hours, 6 hours and 24 hours after dosing and the average total flux (photons/second) was measured for each route of administration and cationic lipid formulation. The background flux was about 2.70E+05 p/s. The results of the imaging are shown in Table 165.

TABLE 165
Flux

| | | | | | N4-acetyl/ | 5mC/5- |
|---|---|---|---|---|---|---|
| | | | N4-acetyl | 5meth | N1mpU | meth |
| Route | Time Point | | Flux (p/s) | Flux (p/s) | Flux (p/s) | Flux (p/s) |
| I.V. | 2 | hrs | 9.17E+07 | 3.19E+06 | 4.21E+07 | 1.88E+06 |
| I.V. | 6 | hrs | 7.70E+08 | 9.28E+06 | 2.34E+08 | 7.75E+06 |
| I.V. | 24 | hrs | 6.84E+07 | 1.04E+06 | 3.55E+07 | 3.21E+06 |
| I.M. | 2 | hrs | 8.59E+06 | 7.86E+05 | 5.30E+06 | 5.11E+05 |
| I.M. | 6 | hrs | 1.27E+08 | 8.88E+06 | 3.82E+07 | 3.17E+06 |
| I.M. | 24 | hrs | 4.46E+07 | 1.38E+06 | 2.00E+07 | 1.39E+06 |
| S.C. | 2 | hrs | 1.83E+07 | 9.67E+05 | 4.45E+06 | 1.01E+06 |
| S.C. | 6 | hrs | 2.89E+08 | 1.78E+07 | 8.91E+07 | 1.29E+07 |
| S.C. | 24 | hrs | 6.09E+07 | 6.40E+06 | 2.08E+08 | 6.63E+06 |

### Example 107. Lipid Nanoparticle Containing a Plurality of Modified mRNAs

[1515] EPO mRNA (mRNA sequence shown in SEQ ID NO: 251436; polyA tail of approximately 140 nucleotides not shown in sequence; 5′cap, Cap1; fully modified with 5-methylcytosine and N1-methyl-pseudouridine), G-CSF mRNA (mRNA sequence shown in SEQ ID NO: 251433; polyA tail of approximately 140 nucleotides not shown in sequence; 5′cap, Cap1; fully modified with 5-methylcytosine and N1-methyl-pseudouridine) and Factor IX mRNA (mRNA sequence shown in SEQ ID NO: 251437; polyA tail of approximately 140 nucleotides not shown in sequence; 5′cap, Cap1; fully modified with 5-methylcytosine and N1-methyl-pseudouridine), is formulated in DLin-MC3-DMA as described in Table 166. The formulations are administered intravenously (I.V.), intramuscularly (I.M.) or subcutaneously (S.C.) to Balb-C mice at a dose of 0.05 mg/kg. Control LNP formulations containing only one mRNA are also administered at an equivalent dose.

TABLE 166
DLin-MC3-DMA Formulation

| Formulation | NPA-157-1 |
|---|---|
| Lipid | DLin-MC3- DMA |
| Lipid/mRN | 20:1 |
| Aratio (wt/wt) | |
| Mean Size | 89 nm |
| | PDI: 0.08 |
| Zeta at pH 7.4 | 1.1 mV |
| Encaps. | 97% |
| (RiboGr) | |

[1516] Serum is collected from the mice at 8 hours, 24 hours, 72 hours and/or 7 days after administration of the formulation. The serum is analyzed by ELISA to determine the protein expression of EPO, G-CSF, and Factor IX.

### Example 108. Cationic Lipid Formulation Studies of 5-Methylcytosine and N1-Methyl-pseudouridine Modified mRNA

[1517] EPO mRNA (mRNA sequence shown in SEQ ID NO: 251436; polyA tail of approximately 140 nucleotides not shown in sequence; 5′cap, Cap1; fully modified with 5-methylcytosine and N1-methyl-pseudouridine) or G-CSF mRNA (mRNA sequence shown in SEQ ID NO: 251433; polyA tail of approximately 140 nucleotides not shown in sequence; 5′cap, Cap1; fully modified with 5-methylcytosine and N1-methyl-pseudouridine) is formulated in DLin-MC3-DMA and DLin-KC2-DMA as described in Table 167. The formulations are administered intravenously (I.V), intramuscularly (I.M.) or subcutaneously (S.C.) to Balb-C mice at a dose of 0.05 mg/kg.

TABLE 167
DLin-MC3-DMA and DLin-KC2-DMA Formulations

| Formulation | NPA-147-1 | NPA-148-1 | NPA-150-1 | NPA-151-1 |
|---|---|---|---|---|
| mRNA | EPO | EPO | G-CSF | G-CSF |
| Lipid | DLin-MC3- | DLin-KC2- | DLin-MC3- | DLin-KC2- |
| | DMA | DMA | DMA | DMA |
| Lipid/mRNA | 20:1 | 20:1 | 20:1 | 20:1 |
| ratio (wt/wt) | | | | |
| Mean Size | 117 nm | 82 nm | 119 nm | 88 nm |
| | PDI: 0.14 | PDI: 0.08 | PDI: 0.13 | PDI: 0.08 |
| Zeta at pH 7.4 | −1.7 mV | 0.6 mV | 3.6 mV | 2.2 mV |
| Encaps. | 100% | 96% | 100% | 100% |
| (RiboGr) | | | | |

[1518] Serum is collected from the mice at 8 hours, 24 hours, 72 hours and/or 7 days after administration of the formulation. The serum is analyzed by ELISA to determine the protein expression of EPO and G-CSF.

### Example 109. In Vitro VEGF PBMC Study

[1519] 500 ng of VEGF mRNA (mRNA sequence shown in SEQ ID NO: 251446 poly A tail of approximately 160 nucleotides not shown in sequence; 5′cap, Cap1) fully modified with 5-methylcytosine and pseudouridine (VEGF 5mC/pU), fully modified with 5-methylcytosine and N1-methyl-pseudouridine (VEGF 5mC/N1mpU) or unmodified (VEGF unmod) was transfected with 0.4 uL of Lipofectamine 2000 into peripheral blood mononuclear cells (PBMC) from three normal blood donors (D1, D2, and D3). Cells were also untreated for each donor as a control. The supernatant was harvested and run by ELISA 22 hours after transfection to determine the protein expression and cytokine induction. The expression of VEGF and IFN-alpha induction is shown in Table 168 and FIGS. 8A and 8B.

TABLE 168
Protein and Cytokine levels

| | VEGF Expression | | | IFN-alpha Induction | | |
|---|---|---|---|---|---|---|
| | (pg/ml) | | | (pg/ml) | | |
| | D1 | D2 | D3 | D1 | D2 | D3 |
| VEGF unmod | 2 | 0 | 0 | 5400 | 3537 | 4946 |
| VEGF 5mC/pU | 424 | 871 | 429 | 145 | 294 | 106 |
| VEGF 5mC/N1mpU | 5088 | 10331 | 6183 | 205 | 165 | 6 |

### Example 110. In Vitro Expression of Modified mRNA

[1520] HEK293 cells were transfected EPO modified mRNA (mRNA sequence shown in SEQ ID NO:251436; polyA tail of approximately 160 nucleotides not shown in sequence; 5′cap, Cap1; fully modified with 5-methylcytosine and pseudouridine), HeLa cells were forward transfected with Transforming growth factor beta (TGF-beta) modified mRNA (mRNA sequence shown in SEQ ID NO: 251447; poly A tail of approximately 160 nucleotides not shown in sequence; 5′cap, Cap1; fully modified with 5-methylcytosine and pseudouridine) and HepG2 cells were transfected with bactericidal/permeability-increasing protein (rBPI-21) modified mRNA (mRNA sequence shown in SEQ ID NO: 251448; poly A tail of approximately 160 nucleotides not shown in sequence; 5′cap, Cap1; fully modified with 5-methylcytosine and pseudouridine) which had been complexed with Lipofectamine2000 from Invitrogen (Carlsbad, CA) at the concentrations shown in Table 169, 170 and 171 using the procedures described herein. The protein expression was detected by ELISA and the protein (pg/ml) is also shown in Table 169, 170 and 171. In Table 169, “>” means greater than. For TGF-beta a control of untreated cells and a mock transfection of Lipofectamine2000 was also tested.

TABLE 169
EPO Protein Expression

| | Amount Transfected | | | | | | | |
|---|---|---|---|---|---|---|---|---|
| | 5 | 1 | 200 | 40 | 8 | 1.6 | 320 | 64 |
| | ng | ng | pg | pg | pg | pg | fg | fg |
| Protein | >2000 | 609.486 | 114.676 | 0 | 0 | 0 | 0 | 0 |
| (pg/ml) | | | | | | | | |

TABLE 170
TGF-beta Protein Expression

| | Amount Transfected | | | | |
|---|---|---|---|---|---|
| | 750 ng | 250 ng | 83 ng | Mock | Untreated |
| Protein | 5058 | 4325 | 3210 | 2 | 0 |
| (pg/ml) | | | | | |

TABLE 171
rBPI-21 Protein Expression

| | Amount Transfected | | | | | | | |
|---|---|---|---|---|---|---|---|---|
| | 2 | 400 | 80 | 16 | 3.2 | 640 | 128 | 26 |
| | ug | ng | ng | ng | ng | pg | pg | pg |
| Protein | 20.683 | 9.269 | 4.768 | 0 | 0 | 0 | 0 | 0 |
| (pg/ml) | | | | | | | | |

### Example 111. Bicistronic Modified mRNA

[1521] Human embryonic kidney epithelial (HEK293) were seeded on 96-well plates (Greiner Bio-one GmbH, Frickenhausen, Germany) HEK293 were seeded at a density of 30,000 in 100 μl cell culture medium (DMEM, 10% FCS, adding 2 mM L-Glutamine, 1 mM Sodiumpyruvate and 1× non-essential amino acids (Biochrom AG, Berlin, Germany) and 1.2 mg/ml Sodiumbicarbonate (Sigma-Aldrich, Munich, Germany)) 75 ng of the bi-cistronic modified mRNA (mCherry-2A-GFP) (SEQ ID NO: 251449; poly A tail of approximately 160 nucleotides not shown in sequence; 5′cap, Cap1; fully modified with 5-methylcytosine and pseudouridine), mCherry modified mRNA (mRNA SEQ ID NO: 251434; polyA tail of approximately 160 nucleotides not shown in sequence; 5′cap, Cap1; fully modified with 5-methylcytosine and pseudouridine) or green fluorescent protein (GFP) modified mRNA (mRNA sequence shown in SEQ ID NO: 251445; polyA tail of approximately 160 nucleotides not shown in sequence; 5′cap, Cap1; fully modified with 5-methylcytosine and pseudouridine) were added after seeding the cells and incubated. A control of untreated cells was also evaluated. mCherry-2A-GFP refers to a modified mRNA sequence comprising the coding region of mCherry, the 2A peptide and the coding region of GFP.

[1522] Cells were harvested by transferring the culture media supernatants to a 96-well Pro-Bind U-bottom plate (Beckton Dickinson GmbH, Heidelberg, Germany). Cells were trypsinized with ½ volume Trypsin/EDTA (Biochrom AG, Berlin, Germany), pooled with respective supernatants and fixed by adding one volume PBS/2% FCS (both Biochrom AG, Berlin, Germany)/0.5% formaldehyde (Merck, Darmstadt, Germany). Samples then were submitted to a flow cytometer measurement with a 532 nm excitation laser and the 610/20 filter for PE-Texas Red in a LSRII cytometer (Beckton Dickinson GmbH, Heidelberg, Germany). The mean fluorescence intensity (MFI) of all events is shown in Table 172. Cells transfected with the bi-cistronic modified mRNA were able to express both mCherry and GFP.

TABLE 172
MFI of Modified mRNA

| Modified mRNA | mCherry MFI | GFP MFI |
|---|---|---|
| mCherry | 17746 | 427 |
| GFP | 427 | 20019 |
| mCherry-2A-GFP | 5742 | 6783 |
| Untreated | 427 | 219 |

### Example 112. Cationic Lipid Formulation Studies of 5-Methylcytosine and N1-Methyl-pseudouridine Modified mRNA to Produce an Antibody

[1523] Herceptin heavy chain (HC) mRNA (mRNA sequence shown in SEQ ID NO: 251450; polyA tail of approximately 140 nucleotides not shown in sequence; 5′cap, Cap1; fully modified with 5-methylcytosine and N1-methyl-pseudouridine) and Herceptin light chain (LC) (mRNA sequence shown in SEQ ID NO: 251451; polyA tail of approximately 140 nucleotides not shown in sequence; 5′cap, Cap1; fully modified with 5-methylcytosine and N1-methyl-pseudouridine) are formulated in DLin-MC3-DMA and DLin-KC2-DMA as described in Table 173. The formulations are administered intravenously (I.V) to Balb-C mice at a dose of 0.500, 0.050, and 0.005 mg/kg.

TABLE 173
DLin-MC3-DMA and DLin-KC2-DMA Formulations

| Formulation | NPA-158-1 | NPA-159-1 |
|---|---|---|
| Herceptin HC:LC | 2:1 | 2:1 |
| Ratio (wt/wt) | | |
| Lipid | DLin-MC3- | DLin-KC2- |
| | DMA | DMA |
| Lipid/Total mRNA | 20:1 | 20:1 |
| ratio (wt/wt) | | |
| Mean Size | 129 nm | 100 nm |
| | PDI: 0.14 | PDI: 0.10 |
| Zeta at pH 7.4 | 0.9 mV | 1.9 mV |
| Encaps. (RiboGr) | 100% | 100% |

[1524] Serum was collected from the mice at 8 hours, 24 hours, 72 hours and/or 7 days after administration of the formulation. The serum was analyzed by ELISA to determine the protein expression of Herceptin.

### Example 113. Directed SAR of Pseudouridine and N1-methyl-Pseudouridine

[1525] With the recent focus on the pyrimidine nucleoside pseudouridine, a series of structure-activity studies were designed to investigate mRNA containing modifications to pseudouridine or N1-methyl-pseudouridine.

[1526] The study was designed to explore the effect of chain length, increased lipophilicity, presence of ring structures, and alteration of hydrophobic or hydrophilic interactions when modifications were made at the N1 position, C6 position, the 2-position, the 4-position and on the phosphate backbone. Stability is also investigated.

[1527] To this end, modifications involving alkylation, cycloalkylation, alkyl-cycloalkylation, arylation, alkyl-arylation, alkylation moieties with amino groups, alkylation moieties with carboxylic acid groups, and alkylation moieties containing amino acid charged moieties are investigated. The degree of alkylation is generally C₁-C₆. Examples of the chemistry modifications include those listed in Table 174 and Table 175.

TABLE 174
Pseudouridine and N1-methylPseudouridine SAR

| | Compound | Naturally |
|---|---|---|
| Chemistry Modification | # | occuring |
| N1-Modifications | | |
| N1-Ethyl-pseudo-UTP | 1 | N |
| N1-Propyl-pseudo-UTP | 2 | N |
| N1-iso-propyl-pseudo-UTP | 3 | N |
| N1-(2,2,2-Trifluoroethyl)-pseudo-UTP | 4 | N |
| N1-Cyclopropyl-pseudo-UTP | 5 | N |
| N1-Cyclopropylmethyl-pseudo-UTP | 6 | N |
| N1-Phenyl-pseudo-UTP | 7 | N |
| N1-Benzyl-pseudo-UTP | 8 | N |
| N1-Aminomethyl-pseudo-UTP | 9 | N |
| Pseudo-UTP-N1-2-ethanoic acid | 10 | N |
| N 1-(3-Amino-3-carboxypropyl)pseudo-UTP | 11 | N |
| N1-Methyl-3-(3-amino-3-carboxy- | 12 | Y |
| propyl)pseudo-UTP | | |
| C-6 Modifications | | |
| 6-Methyl-pseudo-UTP | 13 | N |
| 6-Trifluoromethyl-pseudo-UTP | 14 | N |
| 6-Methoxy-pseudo-UTP | 15 | N |
| 6-Phenyl-pseudo-UTP | 16 | N |
| 6-Iodo-pseudo-UTP | 17 | N |
| 6-Bromo-pseudo-UTP | 18 | N |
| 6-Chloro-pseudo-UTP | 19 | N |
| 6-Fluoro-pseudo-UTP | 20 | N |
| 2- or 4-position Modifications | | |
| 4-Thio-pseudo-UTP | 21 | N |
| 2-Thio-pseudo-UTP | 22 | N |
| Phosphate backbone Modifications | | |
| Alpha-thio-pseudo-UTP | 23 | N |
| N1-Me-alpha-thio-pseudo-UTP | 24 | N |

TABLE 175
Pseudouridine and N1-methyl-Pseudouridine SAR

| | Compound | Naturally |
|---|---|---|
| Chemistry Modification | # | occurring |
| N1-Methyl-pseudo-UTP | 1 | Y |
| N1-Butyl-pseudo-UTP | 2 | N |
| N1-tert-Butyl-pseudo-UTP | 3 | N |
| N1-Pentyl-pseudo-UTP | 4 | N |
| N1-Hexyl-pseudo-UTP | 5 | N |
| N1-Trifluoromethyl-pseudo-UTP | 6 | Y |
| N1-Cyclobutyl-pseudo-UTP | 7 | N |
| N1-Cyclopentyl-pseudo-UTP | 8 | N |
| N1-Cyclohexyl-pseudo-UTP | 9 | N |
| N1-Cycloheptyl-pseudo-UTP | 10 | N |
| N1-Cyclooctyl-pseudo-UTP | 11 | N |
| N1-Cyclobutylmethyl-pseudo-UTP | 12 | N |
| N1-Cyclopentylmethyl-pseudo-UTP | 13 | N |
| N1-Cyclohexylmethyl-pseudo-UTP | 14 | N |
| N1-Cycloheptylmethyl-pseudo-UTP | 15 | N |
| N1-Cyclooctylmethyl-pseudo-UTP | 16 | N |
| N1-p-tolyl-pseudo-UTP | 17 | N |
| N1-(2,4,6-Trimethyl-phenyl)pseudo-UTP | 18 | N |
| N1-(4-Methoxy-phenyl)pseudo-UTP | 19 | N |
| N1-(4-Amino-phenyl)pseudo-UTP | 20 | N |
| N1(4-Nitro-phenyl)pseudo-UTP | 21 | N |
| Pseudo-UTP-N1-p-benzoic acid | 22 | N |
| N1-(4-Methyl-benzyl)pseudo-UTP | 24 | N |
| N1-(2,4,6-Trimethyl-benzyl)pseudo-UTP | 23 | N |
| N1-(4-Methoxy-benzyl)pseudo-UTP | 25 | N |
| N1-(4-Amino-benzyl)pseudo-UTP | 26 | N |
| N1-(4-Nitro-benzyl)pseudo-UTP | 27 | N |
| Pseudo-UTP-N1-methyl-p-benzoic acid | 28 | N |
| N1-(2-Amino-ethyl)pseudo-UTP | 29 | N |
| N1-(3-Amino-propyl)pseudo-UTP | 30 | N |
| N1-(4-Amino-butyl)pseudo-UTP | 31 | N |
| N1-(5-Amino-pentyl)pseudo-UTP | 32 | N |
| N1-(6-Amino-hexyl)pseudo-UTP | 33 | N |
| Pseudo-UTP-N1-3-propionic acid | 34 | N |
| Pseudo-UTP-N1-4-butanoic acid | 35 | N |
| Pseudo-UTP-N1-5-pentanoic acid | 36 | N |
| Pseudo-UTP-N1-6-hexanoic acid | 37 | N |
| Pseudo-UTP-N1-7-heptanoic acid | 38 | N |
| N1-(2-Amino-2-carboxyethyl)pseudo-UTP | 39 | N |
| N1-(4-Amino-4-carboxybutyl)pseudo-UTP | 40 | N |
| N3-Alkyl-pseudo-UTP | 41 | N |
| 6-Ethyl-pseudo-UTP | 42 | N |
| 6-Propyl-pseudo-UTP | 43 | N |
| 6-iso-Propyl-pseudo-UTP | 44 | N |
| 6-Butyl-pseudo-UTP | 45 | N |
| 6-tert-Butyl-pseudo-UTP | 46 | N |
| 6-(2,2,2-Trifluoroethyl)-pseudo-UTP | 47 | N |
| 6-Ethoxy-pseudo-UTP | 48 | N |
| 6-Trifluoromethoxy-pseudo-UTP | 49 | N |
| 6-Phenyl-pseudo-UTP | 50 | N |
| 6-(Substituted-Phenyl)-pseudo-UTP | 51 | N |
| 6-Cyano-pseudo-UTP | 52 | N |
| 6-Azido-pseudo-UTP | 53 | N |
| 6-Amino-pseudo-UTP | 54 | N |
| 6-Ethylcarboxylate-pseudo-UTP | 54b | N |
| 6-Hydroxy-pseudo-UTP | 55 | N |
| 6-Methylamino-pseudo-UTP | 55b | N |
| 6-Dimethylamino-pseudo-UTP | 57 | N |
| 6-Hydroxyamino-pseudo-UTP | 59 | N |
| 6-Formyl-pseudo-UTP | 60 | N |
| 6-(4-Morpholino)-pseudo-UTP | 61 | N |
| 6-(4-Thiomorpholino)-pseudo-UTP | 62 | N |
| N1-Me-4-thio-pseudo-UTP | 63 | N |
| N1-Me-2-thio-pseudo-UTP | 64 | N |
| 1,6-Dimethyl-pseudo-UTP | 65 | N |
| 1-Methyl-6-trifluoromethyl-pseudo-UTP | 66 | N |
| 1-Methyl-6-ethyl-pseudo-UTP | 67 | N |
| 1-Methyl-6-propyl-pseudo-UTP | 68 | N |
| 1-Methyl-6-iso-propyl-pseudo-UTP | 69 | N |
| 1-Methyl-6-butyl-pseudo-UTP | 70 | N |
| 1-Methyl-6-tert-butyl-pseudo-UTP | 71 | N |
| 1-Methyl-6-(2,2,2-Trifluoroethyl)pseudo-UTP | 72 | N |
| 1-Methyl-6-iodo-pseudo-UTP | 73 | N |
| 1-Methyl-6-bromo-pseudo-UTP | 74 | N |
| 1-Methyl-6-chloro-pseudo-UTP | 75 | N |
| 1-Methyl-6-fluoro-pseudo-UTP | 76 | N |
| 1-Methyl-6-methoxy-pseudo-UTP | 77 | N |
| 1-Methyl-6-ethoxy-pseudo-UTP | 78 | N |
| 1-Methyl-6-trifluoromethoxy-pseudo-UTP | 79 | N |
| 1-Methyl-6-phenyl-pseudo-UTP | 80 | N |
| 1-Methyl-6-(substituted phenyl)pseudo-UTP | 81 | N |
| 1-Methyl-6-cyano-pseudo-UTP | 82 | N |
| 1-Methyl-6-azido-pseudo-UTP | 83 | N |
| 1-Methyl-6-amino-pseudo-UTP | 84 | N |
| 1-Methyl-6-ethylcarboxylate-pseudo-UTP | 85 | N |
| 1-Methyl-6-hydroxy-pseudo-UTP | 86 | N |
| 1-Methyl-6-methylamino-pseudo-UTP | 87 | N |
| 1-Methyl-6-dimethylamino-pseudo-UTP | 88 | N |
| 1-Methyl-6-hydroxyamino-pseudo-UTP | 89 | N |
| 1-Methyl-6-formyl-pseudo-UTP | 90 | N |
| 1-Methyl-6-(4-morpholino)-pseudo-UTP | 91 | N |
| 1-Methyl-6-(4-thiomorpholino)-pseudo-UTP | 92 | N |
| 1-Alkyl-6-vinyl-pseudo-UTP | 93 | N |
| 1-Alkyl-6-allyl-pseudo-UTP | 94 | N |
| 1-Alkyl-6-homoallyl-pseudo-UTP | 95 | N |
| 1-Alkyl-6-ethynyl-pseudo-UTP | 96 | N |
| 1-Alkyl-6-(2-propynyl)-pseudo-UTP | 97 | N |
| 1-Alkyl-6-(1-propynyl)-pseudo-UTP | 98 | N |

### Example 114. Incorporation of Naturally and Non-Naturally Occurring Nucleosides

[1528] Naturally and non-naturally occurring nucleosides are incorporated into mRNA encoding a polypeptide of interest. Examples of these are given in Tables 176 and 177. Certain commercially available nucleoside triphosphates (NTPs) are investigated in the polynucleotides of the invention. A selection of these are given in Table 176. The resultant mRNA are then examined for their ability to produce protein, induce cytokines, and/or produce a therapeutic outcome.

TABLE 176
Naturally and non-naturally occurring nucleosides

| | Compound | Naturally |
|---|---|---|
| Chemistry Modification | # | occuring |
| N4-Methyl-Cytosine | 1 | Y |
| N4,N4-Dimethyl-2′-OMe-Cytosine | 2 | Y |
| 5-Oxyacetic acid-methyl ester-Uridine | 3 | Y |
| N3-Methyl-pseudo-Uridine | 4 | Y |
| 5-Hydroxymethyl-Cytosine | 5 | Y |
| 5-Trifluoromethyl-Cytosine | 6 | N |
| 5-Trifluoromethyl-Uridine | 7 | N |
| 5-Methyl-amino-methyl-Uridine | 8 | Y |
| 5-Carboxy-methyl-amino-methyl-Uridine | 9 | Y |
| 5-Carboxymethylaminomethyl-2′-OMe-Uridine | 10 | Y |
| 5-Carboxymethylaminomethyl-2-thio-Uridine | 11 | Y |
| 5-Methylaminomethyl-2-thio-Uridine | 12 | Y |
| 5-Methoxy-carbonyl-methyl-Uridine | 13 | Y |
| 5-Methoxy-carbonyl-methyl-2′-OMe-Uridine | 14 | Y |
| 5-Oxyacetic acid-Uridine | 15 | Y |
| 3-(3-Amino-3-carboxypropyl)-Uridine | 16 | Y |
| 5-(carboxyhydroxymethyl)uridine methyl ester | 17 | Y |
| 5-(carboxyhydroxymethyl)uridine | 18 | Y |

TABLE 177
Non-naturally occurring nucleoside triphosphates

| | Compound | Naturally |
|---|---|---|
| Chemistry Modification | # | occuring |
| N1-Me-GTP | 1 | N |
| 2′-OMe-2-Amino-ATP | 2 | N |
| 2′-OMe-pseudo-UTP | 3 | Y |
| 2′-OMe-6-Me-UTP | 4 | N |
| 2′-Azido-2′-deoxy-ATP | 5 | N |
| 2′-Azido-2′-deoxy-GTP | 6 | N |
| 2′-Azido-2′-deoxy-UTP | 7 | N |
| 2′-Azido-2′-deoxy-CTP | 8 | N |
| 2′-Amino-2′-deoxy-ATP | 9 | N |
| 2′-Amino-2′-deoxy-GTP | 10 | N |
| 2′-Amino-2′-deoxy-UTP | 11 | N |
| 2′-Amino-2′-deoxy-CTP | 12 | N |
| 2-Amino-ATP | 13 | N |
| 8-Aza-ATP | 14 | N |
| Xanthosine-5′-TP | 15 | N |
| 5-Bromo-CTP | 16 | N |
| 2′-F-5-Methyl-2′-deoxy-UTP | 17 | N |
| 5-Aminoallyl-CTP | 18 | N |
| 2-Amino-riboside-TP | 19 | N |

### Example 115. Incorporation of Modifications to the Nucleobase and Carbohydrate (Sugar)

[1529] Naturally and non-naturally occurring nucleosides are incorporated into mRNA encoding a polypeptide of interest. Commercially available nucleosides and NTPs having modifications to both the nucleobase and carbohydrate (sugar) are examined for their ability to be incorporated into mRNA and to produce protein, induce cytokines, and/or produce a therapeutic outcome. Examples of these nucleosides are given in Tables 178 and 179.

TABLE 178
Combination modifications

| Chemistry Modification | Compound # |
|---|---|
| 5-iodo-2′-fluoro-deoxyuridine | 1 |
| 5-iodo-cytidine | 6 |
| 2′-bromo-deoxyuridine | 7 |
| 8-bromo-adenosine | 8 |
| 8-bromo-guanosine | 9 |
| 2,2′-anhydro-cytidine hydrochloride | 10 |
| 2,2′-anhydro-uridine | 11 |
| 2′-Azido-deoxyuridine | 12 |
| 2-amino-adenosine | 13 |
| N4-Benzoyl-cytidine | 14 |
| N4-Amino-cytidine | 15 |
| 2′-O-Methyl-N4-Acetyl-cytidine | 16 |
| 2′Fluoro-N4-Acetyl-cytidine | 17 |
| 2′Fluor-N4-Bz-cytidine | 18 |
| 2′O-methyl-N4-Bz-cytidine | 19 |
| 2′O-methyl-N6-Bz-deoxyadenosine | 20 |
| 2′Fluoro-N6-Bz-deoxyadenosine | 21 |
| N2-isobutyl-guanosine | 22 |
| 2′Fluro-N2-isobutyl-guanosine | 23 |
| 2′O-methyl-N2-isobutyl-guanosine | 24 |

TABLE 179
Naturally occuring combinations

| | Compound | Naturally |
|---|---|---|
| Name | # | occurring |
| 5-Methoxycarbonylmethyl-2-thiouridine TP | 1 | Y |
| 5-Methylaminomethyl-2-thiouridine TP | 2 | Y |
| 5-Crbamoylmethyluridine TP | 3 | Y |
| 5-Carbamoylmethyl-2′-O-methyluridine TP | 4 | Y |
| 1-Methyl-3-(3-amino-3-carboxypropyl) | 5 | Y |
| pseudouridine TP | | |
| 5-Methylaminomethyl-2-selenouridine TP | 6 | Y |
| 5-Carboxymethyluridine TP | 7 | Y |
| 5-Methyldihydrouridine TP | 8 | Y |
| lysidine TP | 9 | Y |
| 5-Taurinomethyluridine TP | 10 | Y |
| 5-Taurinomethyl-2-thiouridine TP | 11 | Y |
| 5-(iso-Pentenylaminomethyl)uridine TP | 12 | Y |
| 5-(iso-Pentenylaminomethyl)-2-thiouridine TP | 13 | Y |
| 5-(iso-Pentenylaminomethyl)-2′-O- | 14 | Y |
| methyluridine TP | | |
| N4-Acetyl-2′-O-methylcytidine TP | 15 | Y |
| N4,2′-O-Dimethylcytidine TP | 16 | Y |
| 5-Formyl-2′-O-methylcytidine TP | 17 | Y |
| 2′-O-Methylpseudouridine TP | 18 | Y |
| 2-Thio-2′-O-methyluridine TP | 19 | Y |
| 3,2′-O-Dimethyluridine TP | 20 | Y |

[1530] In the tables “UTP” stands for uridine triphosphate, “GTP” stands for guanosine triphosphate, “ATP” stands for adenosine triphosphate, “CTP” stands for cytosine triphosphate, “TP” stands for triphosphate and “Bz” stands for benzyl.

### Example 116. Protein Production of Vascular Endothelial Growth Factor in HeLa Cells

[1531] The day before transfection, 20,000 HeLa cells (ATCC no. CCL-2; Manassas, VA) were harvested by treatment with Trypsin-EDTA solution (LifeTechnologies, Grand Island, NY) and seeded in a total volume of 100 ul EMEM medium (supplemented with 10% FCS and 1× Glutamax) per well in a 96-well cell culture plate (Corning, Manassas, VA). The cells were grown at 37° C. in 5% CO₂ atmosphere overnight. The next day, 250 ng of vascular endothelial growth factor (VEGF) modified RNA (mRNA sequence shown in SEQ ID NO: 251446; polyA tail of approximately 160 nucleotides not shown in sequence; 5′cap, Cap1) with the chemical modification described in Table 180, was diluted in 10 ul final volume of OPTI-MEM (LifeTechnologies, Grand Island, NY). Lipofectamine 2000 (LifeTechnologies, Grand Island, NY) was used as transfection reagent and 0.2 ul of lipofectamine 2000 was diluted to 10 μl final volume of OPTI-MEM. After 5 minutes of incubation at room temperature, both solutions were combined and incubated an additional 15 minute at room temperature. Then the 20 ul combined solution was added to the 100 ul cell culture medium containing the HeLa cells and incubated at room temperature. A second set of HeLa cells was also evaluated with the VEGF mRNA according to the procedure set out above. A control of untreated cells and cells treated with just lipofecatamine 2000 was also analyzed for the first set of HeLa cells.

[1532] After an 18 to 22 hour incubation cell culture supernatants of cells expressing VEGF were collected and centrifuged at 10.000 rcf for 2 minutes. The cleared supernatants were then analyzed with a VEGF-specific ELISA kit (R & D Systems, Minneapolis, MN) according to the manufacturer instructions. All samples were diluted until the determined values were within the linear range of the ELISA standard curve. The amount of protein produced is shown in Table 180.

[1533] These results demonstrate that VEGF fully modified with 1-methylpseudouridine produced more protein in HeLa cells compared to the other chemistry.

TABLE 180
Protein Production

| | VEGF set 1 | VEGF set 2 |
|---|---|---|
| Sample | (pg/ml) | (pg/ml) |
| 5-methylcytosine and pseudouridine | 25,455 | 50,341 |
| (5mC and pU) | | |
| 5-methylcytosine and 1-methylpsudouridine | 5,795 | 8,523 |
| (5mC and 1mpU) | | |
| 25% of uridine modified with | 27,045 | 27,045 |
| 2-thiouridine and 25% of cytosine | | |
| modified with 5-methylcytosine | | |
| (s2U and 5mC) | | |
| Pseudouridine (pU) | 216,023 | 345,114 |
| 1-methylpseudouridine (1mpU) | 32,614 | 38,523 |
| Unmodified | 409,318 | 447,273 |
| Lipofectamine 2000 (L2000) | 0 | N/A |
| Untreated | 0 | N/A |

### Example 117. Comparison of Protein Production of Chemically Modified Vascular Endothelial Growth Factor in Hela Cells

[1534] The day before transfection, 20,000 HeLa cells (ATCC no. CCL-2; Manassas, VA) were harvested by treatment with Trypsin-EDTA solution (LifeTechnologies, Grand Island, NY) and seeded in a total volume of 100 ul EMEM medium (supplemented with 10% FCS and 1× Glutamax) per well in a 96-well cell culture plate (Corning, Manassas, VA). The cells were grown at 37° C. in 5% CO₂ atmosphere overnight. Next day, 250 ng of vascular endothelial growth factor (VEGF) modified RNA (mRNA sequence shown in SEQ ID NO: 251446; polyA tail of approximately 160 nucleotides not shown in sequence; 5′cap, Cap1) with the chemical modification described in Table 181, were diluted in 10 ul final volume of OPTI-MEM (LifeTechnologies, Grand Island, NY). Lipofectamine 2000 (LifeTechnologies, Grand Island, NY) was used as transfection reagent and 0.2 ul of lipofectamine 2000 was diluted to 10 ul final volume of OPTI-MEM. After 5 minutes of incubation at room temperature, both solutions were combined and incubated an additional 15 minute at room temperature. Then the 20 ul combined solution was added to the 100 ul cell culture medium containing the Hela cells and incubated at room temperature. A control of untreated cells was also analyzed.

[1535] After an 18 to 22 hour incubation cell culture supernatants of cells expressing VEGF were collected and centrifuged at 10.000 rcf for 2 minutes. The cleared supernatants were then analyzed with a VEGF-specific ELISA kit (R & D Systems, Minneapolis, MN) according to the manufacturer instructions. All samples were diluted until the determined values were within the linear range of the ELISA standard curve. The amount of protein produced is shown in Table 181 and FIG. 9.

[1536] These results demonstrate that VEGF fully modified with 1-methylpseudouridine produced more protein in HeLa cells compared to the other chemistry.

TABLE 181
Protein Production

| Sample | VEGF (pg/ml) |
|---|---|
| Unmodified | 121,176 |
| 5-methylcytosine and 1-methylpsudouridine | 760,000 |
| (5mC and 1mpU) | |
| 1-methylpseudouridine (1mpU) | 1,393,824 |
| Untreated | 0 |

### Example 118. Production of Vascular Endothelial Growth Factor Protein in Mammals

[1537] Lipoplexed vascular endothelial growth factor (VEGF) mRNA (mRNA sequence shown in SEQ ID NO: 251446; polyA tail of approximately 160 nucleotides not shown in sequence; 5′cap, Cap1) unmodified, fully modified with 5-methylcytosine and pseudouridine (5mC/pU), fully modified with 5-methylcytosine and 1-methylpseudouridine (5mC/1mpU), modified where 25% of the cytosines replaced with 5-methylcytosine and 25% of the uridines replaced with 2-thiouridine (5mC/s2U), fully modified with 1-methylpseudouridine (1mpU) or fully modified with pseudouridine (pU). The formulation was administered intravenously to mice at a dose of 2 ug of mRNA per mouse. As a control, a group of mice were untreated. Serum from the mice is measured by specific VEGF ELISA 3 hours after administration for VEGF protein expression. The results are shown in Table 182 and FIG. 10.

TABLE 182
Protein Production

| Sample | VEGF (pg/ml) |
|---|---|
| Unmodified | 34 |
| 5-methylcytosine and pseudouridine (5mC and pU) | 40 |
| 5-methylcytosine and 1-methylpsudouridine | 11 |
| (5mC and 1mpU) | |
| 25% of uridine modified with 2-thiouridine | 53 |
| and 25% of cytosine modified with 5-methyl- | |
| cytosine (s2U and 5mC) | |
| Pseudouridine (pU) | 86 |
| 1-methyl-pseudouridine (1mpU) | 51 |
| Untreated | 0 |

### Example 119. Protein Production of Granulocyte Colony Stimulating Factor in HeLa Cells

[1538] The day before transfection, 20,000 HeLa cells (ATCC no. CCL-2; Manassas, VA) were harvested by treatment with Trypsin-EDTA solution (LifeTechnologies, Grand Island, NY) and seeded in a total volume of 100 ul EMEM medium (supplemented with 10% FCS and 1× Glutamax) per well in a 96-well cell culture plate (Corning, Manassas, VA). The cells were grown at 37° C. in 5% CO₂ atmosphere overnight. The next day, 250 ng of granulocyte colony stimulating factor (G-CSF) modified RNA (mRNA sequence shown in SEQ ID NO: 251433; polyA tail of approximately 160 nucleotides not shown in sequence; 5′cap, Cap1) with the chemical modification described in Table 183, was diluted in 10 ul final volume of OPTI-MEM (LifeTechnologies, Grand Island, NY). Lipofectamine 2000 (LifeTechnologies, Grand Island, NY) was used as transfection reagent and 0.2 ul of lipofectamine 2000 was diluted to 10 ul final volume of OPTI-MEM. After 5 minutes of incubation at room temperature, both solutions were combined and incubated an additional 15 minute at room temperature. Then the 20 ul combined solution was added to the 100 ul cell culture medium containing the HeLa cells and incubated at room temperature. A control of untreated cells and cells treated with just lipofecatamine 2000 was also analyzed.

[1539] After an 18 to 22 hour incubation cell culture supernatants of cells expressing G-CSF were collected and centrifuged at 10.000 rcf for 2 minutes. The cleared supernatants were then analyzed with a G-CSF-specific ELISA kit (R & D Systems, Minneapolis, MN) according to the manufacturer instructions. All samples were diluted until the determined values were within the linear range of the ELISA standard curve. The amount of protein produced is shown in Table 183 and FIG. 11.

TABLE 183
Protein Production

| Sample | G-CSF (pg/ml) |
|---|---|
| 5-methylcytosine and pseudouridine (5mC and pU) | 704,250 |
| 5-methylcytosine and 1-methylpsudouridine (5mC and | 1,523,750 |
| 1mpU) | |
| 25% of uridine modified with 2-thiouridine and 25% of | 89,000 |
| cytosine modified with 5-methylcytosine (s2U and 5mC) | |
| Pseudouridine (pU) | 408,250 |
| 1-methylpseudouridine (1mpU) | 1,391,250 |
| Lipofectamine 2000 (L2000) | 0 |
| Untreated | 0 |

### Example 120. Protein Production of Chemically Modified Factor IX in HeLa Cell Supernatant

[1540] The day before transfection, 15,000 HeLa cells (ATCC no. CCL-2; Manassas, VA) were harvested by treatment with Trypsin-Ethylenediaminetetraacetic acid (EDTA) solution (LifeTechnologies, Grand Island, NY) and seeded in a total volume of 100 ul Eagle's minimal essential medium (EMEM) (supplemented with 10% fetal calf serum (FCS) and 1× Glutamax) per well in a 24-well cell culture plate (Corning, Manassas, VA). The cells were grown at 37° C. in 5% CO₂ atmosphere overnight. Next day, 250 ng of factor IX modified RNA (mRNA sequence shown in SEQ ID NO: 251437; polyA tail of approximately 140 nucleotides not shown in sequence; 5′cap, Cap1) fully modified with 5-methylcytosine and pseudouridine (5mC/pU), fully modified with 5-methylcytosine and 1-methylpseudouridine (5mC/1mpU), modified where 25% of the cytosines replaced with 5-methylcytosine and 25% of the uridines replaced with 2-thiouridine (s2U/5mC), fully modified with 1-methylpseudouridine (1mpU) or fully modified with pseudouridine (pU) were diluted in 10 ul final volume of OPTI-MEM® (LifeTechnologies, Grand Island, NY). Lipofectamine 2000 (LifeTechnologies, Grand Island, NY) was used as transfection reagent and 0.2 ul of lipofectamine 2000 was diluted to 10 ul final volume of OPTI-MEM®. After 5 minutes of incubation at room temperature, both solutions were combined and incubated an additional 15 minute at room temperature. Then the 20 ul combined solution was added to the 100 ul cell culture medium containing the HeLa cells and incubated at room temperature. A control of untreated was also analyzed.

[1541] After an 18 hour incubation cell culture supernatants of cells expressing factor IX were collected by lysing cells with immuno-precipitation (IP) buffer from Pierce Biotechnology (Thermo Scientific, Rockford, IL) and centrifuged at 10.000 rcf for 2 minutes. The cleared supernatants were diluted 1:2 (1 ml lysate/2 wells/24 well plate) or 1:5 (1 ml lysate/5 wells/24 well plate) then analyzed with a factor IX-specific ELISA kit according to the manufacturer instructions. All samples were diluted until the determined values were within the linear range of the ELISA standard curve. The amount of protein produced in both studies is shown in Table 184 and FIG. 12.

TABLE 184
Protein Production

| Sample | Factor IX (ng/ml) |
|---|---|
| 5-methylcytosine and pseudouridine (5mC/pU) | 45.8 |
| 5-methylcytosine and 1-methylpseudouridine | 147.1 |
| (5mC/1mpU) | |
| 25% of the cytosines replaced with 5-methyl- | 7.4 |
| cytosine and 25% of the uridines replaced | |
| with 2-thiouridine (s2U/5mC) | |
| Pseudouridine (pU) | 17.0 |
| 1-methylpseudouridine (1mpU) | 32.0 |
| Untreated | 0 |

### Example 121. Intranasal Lung Delivery of 1-methylpseudouridine or 5-methylcytosine and 1-methylpseudouridine Modified Luciferase mRNA Formulated in Cationic Lipid Nanoparticle

[1542] Luciferase modified mRNA (mRNA sequence shown in SEQ ID NO: 251443; poly A tail of approximately 140 nucleotides not shown in sequence; 5′cap, Cap1) fully modified with 1-methylpseudouridine (Luc-G5-LNP-KC2) or fully modified with 1-methylpseudouridine and 5-methylcytosine (Luc-G2-LNP-KC2) were formulated in the cationic Lipid Nanoparticle (LNP-KC2) as described in Table 185.

TABLE 185
Formulation

| Formulation | NPA-127-1 | NPA-135-1 |
|---|---|---|
| Lipid | DLin-KC2-DMA | DLin-KC2-DMA |
| Lipid/mRNA | 20:1 | 20:1 |
| ratio (wt/wt) | | |
| Mean Size | 114 nm | 95 nm |
| | PDI: 0.10 | PDI: 0.11 |
| Zeta at pH 7.4 | −0.5 mV | −1.0 mV |
| Encaps. (RiboGr) | 77% | 100% |

[1543] The formulations were administered intranasally (I.N.) to Balb-C mice at a dose of 0.3 mg/kg. Twenty minutes prior to imaging, mice were injected intraperitoneally with a D-luciferin solution at 150 mg/kg. Animals were then anesthetized and images were acquired with an IVIS Lumina II imaging system (Perkin Elmer). Bioluminescence was measured as total flux (photons/second) of the entire mouse. The mice were imaged at 2 hours, 8 hours, 48, and 72 hours after dosing and the average total flux (photons/second) was measured. The background flux was about 6.3+05 p/s. The results of the imaging of Luc-G5-LNP-KC2 or Luc-G5-LNP-KC2 vs. Vehicle are shown in the Table 186, “NT” means not tested.

TABLE 186
Luciferase expression after intranasal dosing

| | | Luc-G5- | Luc-G2- | Vehicle |
|---|---|---|---|---|
| | Time | LNP-KC2 | LNP-KC2 | (PBS) |
| Route | Point | Flux (p/s) | Flux (p/s) | Flux (p/s) |
| I.N. | 2 hrs | 1.53E+06 | 5.81E+05 | 3.87E+05 |
| I.N. | 8 hrs | 1.09E+07 | 9.35E+05 | 5.57E+05 |
| I.N. | 24 hrs | 5.93E+06 | 5.33E+05 | 4.89E+05 |
| I.N. | 28 hrs | 1.22E+06 | 7.63E+05 | 8.81E+05 |
| I.N. | 72 hrs | 8.43E+05 | NT | 8.17E+05 |

### Example 122. Intranasal Lung Delivery of 1-methylpseudouridine or 5-methylcytosine and 1-methylpseudouridine Modified Luciferase mRNA lipoplexed in Lipofectamine 2000

[1544] Luciferase modified mRNA (mRNA sequence shown in SEQ ID NO: 251443; poly A tail of approximately 140 nucleotides not shown in sequence; 5′cap, Cap1) fully modified with 1-methylpseudouridine (Luc-G5-Lipoplex) or fully modified with 1-methylpseudouridine and 5-methylcytosine (Luc-G2-Lipoplex) were lipoplexed in two steps, first step was the dilution of 16.6 ul from 3 mg/ml of 1-methylpseudouridine or 5-methylcytosine modified luciferase mRNA in 108.5 ul DMEM and the second step was the dilution of 100 ul LF2000 in 25 ul DMEM then both mixed together gently to make 250 ul total mixer which incubated 5-10 min at RT to form a Lipid-mRNA complex before injection. The lipoplex from both Luciferase mRNA fully modified with 1-methylpseudouridine or 1-methylpseudouridine and 5-methylcytosine were administered intranasally (I.N.) to Balb-C mice at a dose of 0.5 mg/kg.

[1545] Twenty minutes prior to imaging, mice were injected intraperitoneally with a D-luciferin solution at 150 mg/kg. Animals were then anesthetized and images were acquired with an IVIS Lumina II imaging system (Perkin Elmer). Bioluminescence was measured as total flux (photons/second) of the entire mouse. The mice were imaged at 2 hours, 8 hours and 24 hours after dosing and the average total flux (photons/second) was measured. The background signal was about 4.8+05 p/s. The background flux was about 6.3+05 p/s. The results of the imaging of Luc-G5-Lipoplex or Luc-G2-Lipoplex vs. Vehicle are shown in the Table 187.

TABLE 187
Luciferase expression after intranasal dosing

| | | Luc-G5- | Luc-G2- | Vehicle |
|---|---|---|---|---|
| | Time | Lipoplex | Lipoplex | (PBS) |
| Route | Point | Flux (p/s) | Flux (p/s) | Flux (p/s) |
| I.N. | 2 hrs | 8.37E+05 | 9.58E+05 | 3.87E+05 |
| I.N. | 8 hrs | 8.42E+05 | 7.11E+05 | 5.57E+05 |
| I.N. | 24 hrs | 5.74E+05 | 5.53E+05 | 4.89E+05 |

### Example 123. Intranasal Lung Delivery of 1-methylpseudouridine or 5-methylcytosine and 1-methylpseudouridine Modified Luciferase mRNA Formulated in PBS

[1546] Luciferase modified mRNA (mRNA sequence shown in SEQ ID NO: 251443; poly A tail of approximately 140 nucleotides not shown in sequence; 5′cap, Cap1) fully modified with 1-methylpseudouridine (Luc-G5-Buffer (PBS)) or fully modified with 1-methylpseudouridine and 5-methylcytosine (Luc-G2-Buffer (PBS)) formulated in PBS (pH 7.4) were administered intranasally (I.N.) to Balb-C mice at a dose of 7.5 mg/kg.

[1547] Twenty minutes prior to imaging, mice were injected intraperitoneally with a D-luciferin solution at 150 mg/kg. Animals were then anesthetized and images were acquired with an IVIS Lumina II imaging system (Perkin Elmer). Bioluminescence was measured as total flux (photons/second) of the entire mouse. The mice were imaged at 2 hours, 8 hours and 24 hours after dosing and the average total flux (photons/second) was measured. The background flux was about 4.8+05 p/s. The background flux was about 6.3+05 p/s. The results of the imaging of Luc-G5-in Buffer vs. Vehicle are shown in the Table 188.

TABLE 188
Luciferase expression after intranasal dosing

| | | Luc-G5-in | Luc-G2-in | Vehicle |
|---|---|---|---|---|
| | Time | Buffer (PBS) | Buffer (PBS) | (PBS) |
| Route | Point | Flux [p/s] | Flux [p/s] | Flux (p/s) |
| I.N. | 2 hrs | 4.50E+05 | 9.58E+05 | 3.87E+05 |
| I.N. | 8 hrs | 7.12E+05 | 7.11E+05 | 5.57E+05 |
| I.N. | 24 hrs | 4.47E+05 | 5.53E+05 | 4.89E+05 |

[1548] It is to be understood that the words which have been used are words of description rather than limitation, and that changes may be made within the purview of the appended claims without departing from the true scope and spirit of the invention in its broader aspects.

[1549] While the present invention has been described at some length and with some particularity with respect to the several described embodiments, it is not intended that it should be limited to any such particulars or embodiments or any particular embodiment, but it is to be construed with references to the appended claims so as to provide the broadest possible interpretation of such claims in view of the prior art and, therefore, to effectively encompass the intended scope of the invention.

[1550] All publications, patent applications, patents, and other references mentioned herein are incorporated by reference in their entirety. In case of conflict, the present specification, including definitions, will control. In addition, section headings, the materials, methods, and examples are illustrative only and not intended to be limiting.

1-19. (canceled)

20. A pharmaceutical composition comprising a plurality of lipid nanoparticles, wherein the plurality of lipid nanoparticles has a mean particle size of from 80 nm to 160 nm, wherein the lipid nanoparticles encapsulate an mRNA molecule comprising an open reading frame encoding a glutaryl-CoA dehydrogenase (GCDH) polypeptide.

21. The pharmaceutical composition of claim 20, wherein the mRNA molecule comprises, in the 5′-to-3′ direction:
(i) a 5′-cap;
(ii) a 5′-untranslated region (UTR);
(iii) the open reading frame encoding the GCDH polypeptide;
(iv) a 3′-UTR; and
(v) a poly-A tail.

22. The pharmaceutical composition of claim 20, wherein the open reading frame comprises nucleosides consisting of N1-methyl-pseudouridine, adenosine, guanosine, and cytidine.

23. The pharmaceutical composition of claim 20, wherein the GCDH polypeptide comprises the amino acid sequence of any one of SEQ ID NOs: 47870-47873.

24. The pharmaceutical composition of claim 20, wherein the open reading frame comprises the nucleic acid sequence of any one of SEQ ID NOs: 83268-83271, 118666-118669, 154064-154067, 189462-189465, and 224860-224863.

25. The pharmaceutical composition of claim 22, wherein the GCDH polypeptide comprises the amino acid sequence of any one of SEQ ID NOs: 47870-47873.

26. The pharmaceutical composition of claim 22, wherein the open reading frame comprises the nucleic acid sequence of any one of SEQ ID NOs: 83268-83271, 118666-118669, 154064-154067, 189462-189465, and 224860-224863.

27. The pharmaceutical composition of claim 20, wherein the plurality of lipid nanoparticles has a mean polydispersity index (PDI) of between 0.02 and 0.2.

28. The pharmaceutical composition of claim 20, wherein the plurality of lipid nanoparticles has a mean lipid to polynucleotide ratio (wt/wt) of between 10 and 20.

29. The pharmaceutical composition of claim 21, wherein the poly-A tail is at least 100 nucleotides in length.

30. The pharmaceutical composition of claim 21, wherein the poly-A tail is from about 100 nucleotides to about 160 nucleotides in length.

31. The pharmaceutical composition of claim 21, wherein the 5′-cap is selected from the group consisting of cap0, cap1, ARCA, inosine, N1-methyl-guanosine, 2′-fluoro-guanosine, 7-deaza-guanosine, 8-oxo-guanosine, 2-amino-guanosine, LNA-guanosine, and 2-azido-guanosine.

32. The pharmaceutical composition of claim 21, wherein the 5′-UTR comprises a Kozak sequence.

33. A method of expressing a GCDH polypeptide in a mammalian cell, the method comprising administering to the cell a pharmaceutical composition comprising a plurality of lipid nanoparticles, wherein the plurality of lipid nanoparticles has a mean particle size of from 80 nm to 160 nm, wherein the lipid nanoparticles encapsulate an mRNA molecule comprising an open reading frame encoding a GCDH polypeptide.

34. The method of claim 33, wherein the mRNA molecule comprises, in the 5′-to-3′ direction:
(i) a 5′-cap;
(ii) a 5′-UTR;
(iii) the open reading frame encoding the GCDH polypeptide;
(iv) a 3′-UTR; and
(v) a poly-A tail.

35. The method of claim 33, wherein the open reading frame comprises nucleosides consisting of N1-methyl-pseudouridine, adenosine, guanosine, and cytidine.

36. The method of claim 33, wherein the GCDH polypeptide comprises the amino acid sequence of any one of SEQ ID NOs: 47870-47873.

37. The method of claim 33, wherein the open reading frame comprises the nucleic acid sequence of any one of SEQ ID NOs: 83268-83271, 118666-118669, 154064-154067, 189462-189465, and 224860-224863.

38. The method of claim 35, wherein the GCDH polypeptide comprises the amino acid sequence of any one of SEQ ID NOs: 47870-47873.

39. The method of claim 35, wherein the open reading frame comprises the nucleic acid sequence of any one of SEQ ID NOs: 83268-83271, 118666-118669, 154064-154067, 189462-189465, and 224860-224863.

The application's sequence listing, which the Patent Office published only in electronic form, follows.

SEQUENCE LISTING (251451 sequences)

SEQ ID NO: 1 - DNA, 47 bp, Homo sapiens
  source 1..47: mol_type = unassigned DNA
gggaaataagagagaaaagaagagtaagaagaaatataagagccacc

SEQ ID NO: 2 - DNA, 47 bp, Homo sapiens
  source 1..47: mol_type = unassigned DNA
gggagatcagagagaaaagaagagtaagaagaaatataagagccacc

SEQ ID NO: 3 - DNA, 145 bp, Homo sapiens
  source 1..145: mol_type = unassigned DNA
ggaataaaagtctcaacacaacatatacaaaacaaacgaatctcaagcaatcaagcattctacttctattgcagcaatttaaatcatttcttttaaagcaaaagcaattttctgaaaattttcaccatttacgaacgatagcaac

SEQ ID NO: 4 - RNA, 42 nt, Homo sapiens
  source 1..42: mol_type = unassigned RNA
gggagacaagcttggcattccggtactgttggtaaagccacc

SEQ ID NO: 5 - DNA, 371 bp, Homo sapiens
  source 1..371: mol_type = unassigned DNA
gcgcctgcccacctgccaccgactgctggaacccagccagtgggagggcctggcccaccagagtcctgctccctcactcctcgccccgccccctgtcccagagtcccacctgggggctctctccacccttctcagagttccagtttcaaccagagttccaaccaatgggctccatcctctggattctggccaatgaaatatctccctggcagggtcctcttcttttcccagagctccaccccaaccaggagctctagttaatggagagctcccagcacactcggagcttgtgctttgtctccacgcaaagcgataaataaaagcattggtggcctttggtctttgaataaagcctgagtaggaagtctaga

SEQ ID NO: 6 - DNA, 568 bp, Homo sapiens
  source 1..568: mol_type = unassigned DNA
gcccctgccgctcccacccccacccatctgggccccgggttcaagagagagcggggtctgatctcgtgtagccatatagagtttgcttctgagtgtctgctttgtttagtagaggtgggcaggaggagctgaggggctggggctggggtgttgaagttggctttgcatgcccagcgatgcgcctccctgtgggatgtcatcaccctgggaaccgggagtggcccttggctcactgtgttctgcatggtttggatctgaattaattgtcctttcttctaaatcccaaccgaacttcttccaacctccaaactggctgtaaccccaaatccaagccattaactacacctgacagtagcaattgtctgattaatcactggccccttgaagacagcagaatgtccctttgcaatgaggaggagatctgggctgggcgggccagctggggaagcatttgactatctggaacttgtgtgtgcctcctcaggtatggcagtgactcacctggttttaataaaacaacctgcaacatctcatggtctttgaataaagcctgagtaggaagtctaga

SEQ ID NO: 7 - DNA, 289 bp, Homo sapiens
  source 1..289: mol_type = unassigned DNA
acacactccacctccagcacgcgacttctcaggacgacgaatcttctcaatgggggggcggctgagctccagccaccccgcagtcactttctttgtaacaacttccgttgctgccatcgtaaactgacacagtgtttataacgtgtacatacattaacttattacctcattttgttatttttcgaaacaaagccctgtggaagaaaatggaaaacttgaagaagcattaaagtcattctgttaagctgcgtaaatggtctttgaataaagcctgagtaggaagtctaga

SEQ ID NO: 8 - DNA, 379 bp, Homo sapiens
  source 1..379: mol_type = unassigned DNA
catcacatttaaaagcatctcagcctaccatgagaataagagaaagaaaatgaagatcaaaagcttattcatctgtttttctttttcgttggtgtaaagccaacaccctgtctaaaaaacataaatttctttaatcattttgcctcttttctctgtgcttcaattaataaaaaatggaaagaatctaatagagtggtacagcactgttatttttcaaagatgtgttgctatcctgaaaattctgtaggttctgtggaagttccagtgttctctcttattccacttcggtagaggatttctagtttcttgtgggctaattaaataaatcattaatactcttctaatggtctttgaataaagcctgagtaggaagtctaga

SEQ ID NO: 9 - DNA, 118 bp, Mus sp.
  source 1..118: mol_type = unassigned DNA
gctgccttctgcggggcttgccttctggccatgcccttcttctctcccttgcacctgtacctcttggtctttgaataaagcctgagtaggaaggcggccgctcgagcatgcatctaga

SEQ ID NO: 10 - DNA, 908 bp, Homo sapiens
  source 1..908: mol_type = unassigned DNA
gccaagccctccccatcccatgtatttatctctatttaatatttatgtctatttaagcctcatatttaaagacagggaagagcagaacggagccccaggcctctgtgtccttccctgcatttctgagtttcattctcctgcctgtagcagtgagaaaaagctcctgtcctcccatcccctggactgggaggtagataggtaaataccaagtatttattactatgactgctccccagccctggctctgcaatgggcactgggatgagccgctgtgagcccctggtcctgagggtccccacctgggacccttgagagtatcaggtctcccacgtgggagacaagaaatccctgtttaatatttaaacagcagtgttccccatctgggtccttgcacccctcactctggcctcagccgactgcacagcggcccctgcatccccttggctgtgaggcccctggacaagcagaggtggccagagctgggaggcatggccctggggtcccacgaatttgctggggaatctcgtttttcttcttaagacttttgggacatggtttgactcccgaacatcaccgacgcgtctcctgtttttctgggtggcctcgggacacctgccctgcccccacgagggtcaggactgtgactctttttagggccaggcaggtgcctggacatttgccttgctggacggggactggggatgtgggagggagcagacaggaggaatcatgtcaggcctgtgtgtgaaaggaagctccactgtcaccctccacctcttcaccccccactcaccagtgtcccctccactgtcacattgtaactgaacttcaggataataaagtgtttgcctccatggtctttgaataaagcctgagtaggaaggcggccgctcgagcatgcatctaga

SEQ ID NO: 11 - DNA, 835 bp, Homo sapiens
  source 1..835: mol_type = unassigned DNA
actcaatctaaattaaaaaagaaagaaatttgaaaaaactttctctttgccatttcttcttcttcttttttaactgaaagctgaatccttccatttcttctgcacatctacttgcttaaattgtgggcaaaagagaaaaagaaggattgatcagagcattgtgcaatacagtttcattaactccttcccccgctcccccaaaaatttgaatttttttttcaacactcttacacctgttatggaaaatgtcaacctttgtaagaaaaccaaaataaaaattgaaaaataaaaaccataaacatttgcaccacttgtggcttttgaatatcttccacagagggaagtttaaaacccaaacttccaaaggtttaaactacctcaaaacactttcccatgagtgtgatccacattgttaggtgctgacctagacagagatgaactgaggtccttgttttgttttgttcataatacaaaggtgctaattaatagtatttcagatacttgaagaatgttgatggtgctagaagaatttgagaagaaatactcctgtattgagttgtatcgtgtggtgtattttttaaaaaatttgatttagcattcatattttccatcttattcccaattaaaagtatgcagattatttgcccaaatcttcttcagattcagcatttgttctttgccagtctcattttcatcttcttccatggttccacagaagctttgtttcttgggcaagcagaaaaattaaattgtacctattttgtatatgtgagatgtttaaataaattgtgaaaaaaatgaaataaagcatgtttggttttccaaaagaacatat

SEQ ID NO: 12 - DNA, 297 bp, Homo sapiens
  source 1..297: mol_type = unassigned DNA
cgccgccgcccgggccccgcagtcgagggtcgtgagcccaccccgtccatggtgctaagcgggcccgggtcccacacggccagcaccgctgctcactcggacgacgccctgggcctgcacctctccagctcctcccacggggtccccgtagccccggcccccgcccagccccaggtctccccaggccctccgcaggctgcccggcctccctccccctgcagccatcccaaggctcctgacctacctggcccctgagctctggagcaagccctgacccaataaaggctttgaacccat

SEQ ID NO: 13 - DNA, 602 bp, Homo sapiens
  source 1..602: mol_type = unassigned DNA
ggggctagagccctctccgcacagcgtggagacggggcaaggaggggggttattaggattggtggttttgttttgctttgtttaaagccgtgggaaaatggcacaactttacctctgtgggagatgcaacactgagagccaaggggtgggagttgggataatttttatataaaagaagtttttccactttgaattgctaaaagtggcatttttcctatgtgcagtcactcctctcatttctaaaatagggacgtggccaggcacggtggctcatgcctgtaatcccagcactttgggaggccgaggcaggcggctcacgaggtcaggagatcgagactatcctggctaacacggtaaaaccctgtctctactaaaagtacaaaaaattagctgggcgtggtggtgggcacctgtagtcccagctactcgggaggctgaggcaggagaaaggcatgaatccaagaggcagagcttgcagtgagctgagatcacgccattgcactccagcctgggcaacagtgttaagactctgtctcaaatataaataaataaataaataaataaataaataaataaaaataaagcgagatgttgccctcaaa

SEQ ID NO: 14 - DNA, 785 bp, Homo sapiens
  source 1..785: mol_type = unassigned DNA
ggccctgccccgtcggactgcccccagaaagcctcctgccccctgccagtgaagtccttcagtgagcccctccccagccagcccttccctggccccgccggatgtataaatgtaaaaatgaaggaattacattttatatgtgagcgagcaagccggcaagcgagcacagtattatttctccatcccctccctgcctgctccttggcacccccatgctgccttcagggagacaggcagggagggcttggggctgcacctcctaccctcccaccagaacgcaccccactgggagagctggtggtgcagccttcccctccctgtataagacactttgccaaggctctcccctctcgccccatccctgcttgcccgctcccacagcttcctgagggctaattctgggaagggagagttctttgctgcccctgtctggaagacgtggctctgggtgaggtaggcgggaaaggatggagtgttttagttcttgggggaggccaccccaaaccccagccccaactccaggggcacctatgagatggccatgctcaacccccctcccagacaggccctccctgtctccagggcccccaccgaggttcccagggctggagacttcctctggtaaacattcctccagcctcccctcccctggggacgccaaggaggtgggccacacccaggaagggaaagcgggcagccccgttttggggacgtgaacgttttaataatttttgctgaattcctttacaactaaataacacagatattgttataaataaaattgt

SEQ ID NO: 15 - DNA, 3001 bp, Homo sapiens
  source 1..3001: mol_type = unassigned DNA
atattaaggatcaagctgttagctaataatgccacctctgcagttttgggaacaggcaaataaagtatcagtatacatggtgatgtacatctgtagcaaagctcttggagaaaatgaagactgaagaaagcaaagcaaaaactgtatagagagatttttcaaaagcagtaatccctcaattttaaaaaaggattgaaaattctaaatgtctttctgtgcatattttttgtgttaggaatcaaaagtattttataaaaggagaaagaacagcctcattttagatgtagtcctgttggattttttatgcctcctcagtaaccagaaatgttttaaaaaactaagtgtttaggatttcaagacaacattatacatggctctgaaatatctgacacaatgtaaacattgcaggcacctgcattttatgttttttttttcaacaaatgtgactaatttgaaacttttatgaacttctgagctgtccccttgcaattcaaccgcagtttgaattaatcatatcaaatcagttttaattttttaaattgtacttcagagtctatatttcaagggcacattttctcactactattttaatacattaaaggactaaataatctttcagagatgctggaaacaaatcatttgctttatatgtttcattagaataccaatgaaacatacaacttgaaaattagtaatagtatttttgaagatcccatttctaattggagatctctttaatttcgatcaacttataatgtgtagtactatattaagtgcacttgagtggaattcaacatttgactaataaaatgagttcatcatgttggcaagtgatgtggcaattatctctggtgacaaaagagtaaaatcaaatatttctgcctgttacaaatatcaaggaagacctgctactatgaaatagatgacattaatctgtcttcactgtttataatacggatggattttttttcaaatcagtgtgtgttttgaggtcttatgtaattgatgacatttgagagaaatggtggctttttttagctacctctttgttcatttaagcaccagtaaagatcatgtctttttatagaagtgtagattttctttgtgactttgctatcgtgcctaaagctctaaatataggtgaatgtgtgatgaatactcagattatttgtctctctatataattagtttggtactaagtttctcaaaaaattattaacacatgaaagacaatctctaaaccagaaaaagaagtagtacaaattttgttactgtaatgctcgcgtttagtgagtttaaaacacacagtatcttttggttttataatcagtttctattttgctgtgcctgagattaagatctgtgtatgtgtgtgtgtgtgtgtgtgcgtttgtgtgttaaagcagaaaagacttttttaaaagttttaagtgataaatgcaatttgttaattgatcttagatcactagtaaactcagggctgaattataccatgtatattctattagaagaaagtaaacaccatctttattcctgccctttttcttctctcaaagtagttgtagttatatctagaaagaagcaattttgatttcttgaaaaggtagttcctgcactcagtttaaactaaaaataatcatacttggattttatttatttttgtcatagtaaaaattttaatttatatatatttttatttagtattatcttattctttgctatttgccaatcctttgtcatcaattgtgttaaatgaattgaaaattcatgccctgttcattttattttactttattggttaggatatttaaaggatttttgtatatataatttcttaaattaatattccaaaaggttagtggacttagattataaattatggcaaaaatctaaaaacaacaaaaatgatttttatacattctatttcattattcctctttttccaataagtcatacaattggtagatatgacttattttatttttgtattattcactatatctttatgatatttaagtataaataattaaaaaaatttattgtaccttatagtctgtcaccaaaaaaaaaaaattatctgtaggtagtgaaatgctaatgttgatttgtctttaagggcttgttaactatcctttattttctcatttgtcttaaattaggagtttgtgtttaaattactcatctaagcaaaaaatgtatataaatcccattactgggtatatacccaaaggattataaatcatgctgctataaagacacatgcacacgtatgtttattgcagcactattcacaatagcaaagacttggaaccaacccaaatgtccatcaatgatagacttgattaagaaaatgtgcacatatacaccatggaatactatgcagccataaaaaaggatgagttcatgtcctttgtagggacatggataaagctggaaaccatcattctgagcaaactattgcaaggacagaaaaccaaacactgcatgttctcactcataggtgggaattgaacaatgagaacacttggacacaaggtggggaacaccacacaccagggcctgtcatggggtggggggagtggggagggatagcattaggagatatacctaatgtaaatgatgagttaatgggtgcagcacaccaacatggcacatgtatacatatgtagcaaacctgcacgttgtgcacatgtaccctagaacttaaagtataattaaaaaaaaaaagaaaacagaagctatttataaagaagttatttgctgaaataaatgtgatctttcccattaaaaaaataaagaaattttggggtaaaaaaacacaatatattgtattcttgaaaaattctaagagagtggatgtgaagtgttctcaccacaaaagtgataactaattgaggtaatgcacatattaattagaaagattttgtcattccacaatgtatatatacttaaaaatatgttatacacaataaatacatacattaaaaaataagtaaatgta

SEQ ID NO: 16 - DNA, 1037 bp, Homo sapiens
  source 1..1037: mol_type = unassigned DNA
cccaccctgcacgccggcaccaaaccctgtcctcccacccctccccactcatcactaaacagagtaaaatgtgatgcgaattttcccgaccaacctgattcgctagattttttttaaggaaaagcttggaaagccaggacacaacgctgctgcctgctttgtgcagggtcctccggggctcagccctgagttggcatcacctgcgcagggccctctggggctcagccctgagctagtgtcacctgcacagggccctctgaggctcagccctgagctggcgtcacctgtgcagggccctctggggctcagccctgagctggcctcacctgggttccccaccccgggctctcctgccctgccctcctgcccgccctccctcctgcctgcgcagctccttccctaggcacctctgtgctgcatcccaccagcctgagcaagacgccctctcggggcctgtgccgcactagcctccctctcctctgtccccatagctggtttttcccaccaatcctcacctaacagttactttacaattaaactcaaagcaagctcttctcctcagcttggggcagccattggcctctgtctcgttttgggaaaccaaggtcaggaggccgttgcagacataaatctcggcgactcggccccgtctcctgagggtcctgctggtgaccggcctggaccttggccctacagccctggaggccgctgctgaccagcactgaccccgacctcagagagtactcgcaggggcgctggctgcactcaagaccctcgagattaacggtgctaaccccgtctgctcctccctcccgcagagactggggcctggactggacatgagagccccttggtgccacagagggctgtgtcttactagaaacaacgcaaacctctccttcctcagaatagtgatgtgttcgacgttttatcaaaggccccctttctatgttcatgttagttttgctccttctgtgtttttttctgaaccatatccatgttgctgacttttccaaataaaggttttcactcctctc

SEQ ID NO: 17 - DNA, 577 bp, Homo sapiens
  source 1..577: mol_type = unassigned DNA
agaggcctgcctccagggctggactgaggcctgagcgctcctgccgcagagctggccgcgccaaataatgtctctgtgagactcgagaactttcatttttttccaggctggttcggatttggggtggattttggttttgttcccctcctccactctcccccaccccctccccgcccttttttttttttttttttaaactggtattttatctttgattctccttcagccctcacccctggttctcatctttcttgatcaacatcttttcttgcctctgtccccttctctcatctcttagctcccctccaacctggggggcagtggtgtggagaagccacaggcctgagatttcatctgctctccttcctggagcccagaggagggcagcagaagggggtggtgtctccaaccccccagcactgaggaagaacggggctcttctcatttcacccctccctttctcccctgcccccaggactgggccacttctgggtggggcagtgggtcccagattggctcacactgagaatgtaagaactacaaacaaaatttctattaaattaaattttgtgtctcc

SEQ ID NO: 18 - DNA, 2212 bp, Homo sapiens
  source 1..2212: mol_type = unassigned DNA
ctccctccatcccaacctggctccctcccacccaaccaactttccccccaacccggaaacagacaagcaacccaaactgaaccccctcaaaagccaaaaaatgggagacaatttcacatggactttggaaaatatttttttcctttgcattcatctctcaaacttagtttttatctttgaccaaccgaacatgaccaaaaaccaaaagtgcattcaaccttaccaaaaaaaaaaaaaaaaaaagaataaataaataactttttaaaaaaggaagcttggtccacttgcttgaagacccatgcgggggtaagtccctttctgcccgttgggcttatgaaaccccaatgctgccctttctgctcctttctccacaccccccttggggcctcccctccactccttcccaaatctgtctccccagaagacacaggaaacaatgtattgtctgcccagcaatcaaaggcaatgctcaaacacccaagtggcccccaccctcagcccgctcctgcccgcccagcacccccaggccctgggggacctggggttctcagactgccaaagaagccttgccatctggcgctcccatggctcttgcaacatctccccttcgtttttgagggggtcatgccgggggagccaccagcccctcactgggttcggaggagagtcaggaagggccacgacaaagcagaaacatcggatttggggaacgcgtgtcaatcccttgtgccgcagggctgggcgggagagactgttctgttccttgtgtaactgtgttgctgaaagactacctcgttcttgtcttgatgtgtcaccggggcaactgcctgggggcggggatgggggcagggtggaagcggctccccattttataccaaaggtgctacatctatgtgatgggtggggtggggagggaatcactggtgctatagaaattgagatgcccccccaggccagcaaatgttcctttttgttcaaagtctatttttattccttgatatttttctttttttttttttttttttgtggatggggacttgtgaatttttctaaaggtgctatttaacatgggaggagagcgtgtgcggctccagcccagcccgctgctcactttccaccctctctccacctgcctctggcttctcaggcctctgctctccgacctctctcctctgaaaccctcctccacagctgcagcccatcctcccggctccctcctagtctgtcctgcgtcctctgtccccgggtttcagagacaacttcccaaagcacaaagcagtttttccccctaggggtgggaggaagcaaaagactctgtacctattttgtatgtgtataataatttgagatgtttttaattattttgattgctggaataaagcatgtggaaatgacccaaacataatccgcagtggcctcctaatttccttctttggagttgggggaggggtagacatggggaaggggctttggggtgatgggcttgccttccattcctgccctttccctccccactattctcttctagatccctccataaccccactcccctttctctcacccttcttataccgcaaacctttctacttcctctttcattttctattcttgcaatttccttgcaccttttccaaatcctcttctcccctgcaataccatacaggcaatccacgtgcacaacacacacacacactcttcacatctggggttgtccaaacctcatacccactccccttcaagcccatccactctccaccccctggatgccctgcacttggtggcggtgggatgctcatggatactgggagggtgaggggagtggaacccgtgaggaggacctgggggcctctccttgaactgacatgaagggtcatctggcctctgctcccttctcacccacgctgacctcctgccgaaggagcaacgcaacaggagaggggtctgctgagcctggcgagggtctgggagggaccaggaggaaggcgtgctccctgctcgctgtcctggccctgggggagtgagggagacagacacctgggagagctgtggggaaggcactcgcaccgtgctcttgggaaggaaggagacctggccctgctcaccacggactgggtgcctcgacctcctgaatccccagaacacaacccccctgggctggggtggtctggggaaccatcgtgcccccgcctcccgcctactcctttttaagctt

SEQ ID NO: 19 - DNA, 729 bp, Homo sapiens
  source 1..729: mol_type = unassigned DNA
ttggccaggcctgaccctcttggacctttcttctttgccgacaaccactgcccagcagcctctgggacctcggggtcccagggaacccagtccagcctcctggctgttgacttcccattgctcttggagccaccaatcaaagagattcaaagagattcctgcaggccagaggcggaacacacctttatggctggggctctccgtggtgttctggacccagcccctggagacaccattcacttttactgctttgtagtgactcgtgctctccaacctgtcttcctgaaaaaccaaggcccccttcccccacctcttccatggggtgagacttgagcagaacaggggcttccccaagttgcccagaaagactgtctgggtgagaagccatggccagagcttctcccaggcacaggtgttgcaccagggacttctgcttcaagttttggggtaaagacacctggatcagactccaagggctgccctgagtctgggacttctgcctccatggctggtcatgagagcaaaccgtagtcccctggagacagcgactccagagaacctcttgggagacagaagaggcatctgtgcacagctcgatcttctacttgcctgtggggaggggagtgacaggtccacacaccacactgggtcaccctgtcctggatgcctctgaagagagggacagaccgtcagaaactggagagtttctattaaaggtcatttaaacca

SEQ ID NO: 20 - DNA, 847 bp, Homo sapiens
  source 1..847: mol_type = unassigned DNA
tcctccgggaccccagccctcaggattcctgatgctccaaggcgactgatgggcgctggatgaagtggcacagtcagcttccctgggggctggtgtcatgttgggctcctggggcgggggcacggcctggcatttcacgcattgctgccaccccaggtccacctgtctccactttcacagcctccaagtctgtggctcttcccttctgtcctccgaggggcttgccttctctcgtgtccagtgaggtgctcagtgatcggcttaacttagagaagcccgccccctccccttctccgtctgtcccaagagggtctgctctgagcctgcgttcctaggtggctcggcctcagctgcctgggttgtggccgccctagcatcctgtatgcccacagctactggaatccccgctgctgctccgggccaagcttctggttgattaatgagggcatggggtggtccctcaagaccttcccctaccttttgtggaaccagtgatgcctcaaagacagtgtcccctccacagctgggtgccaggggcaggggatcctcagtatagccggtgaaccctgataccaggagcctgggcctccctgaacccctggcttccagccatctcatcgccagcctcctcctggacctcttggcccccagccccttccccacacagccccagaagggtcccagagctgaccccactccaggacctaggcccagcccctcagcctcatctggagcccctgaagaccagtcccacccacctttctggcctcatctgacactgctccgcatcctgctgtgtgtcctgttccatgttccggttccatccaaatacactttctggaacaaa

SEQ ID NO: 21 - DNA, 110 bp, Homo sapiens
  source 1..110: mol_type = unassigned DNA
gctggagcctcggtggccatgcttcttgccccttgggcctccccccagcccctcctccccttcctgcacccgtacccccgtggtctttgaataaagtctgagtgggcggc

SEQ ID NO: 22 - DNA, 27 bp, Homo sapiens
  source 1..27: mol_type = unassigned DNA
ttggaccctcgtacagaagctaatacg

SEQ ID NO: 23 - DNA, 189 bp, Homo sapiens
  source 1..189: mol_type = unassigned DNA
ttttttttttttttttttttttttttttttttttttttttttttttttttttttttttttttttttttttttttttttttttttttttttttttttttttttttttttttttttttttttttttttttttttttttttttttttttttttttttttttttcttcctactcaggctttattcaaagacca

SEQ ID NO: 24 - DNA, 20 bp, Homo sapiens
  source 1..20: mol_type = unassigned DNA
ccttgaccttctggaacttc

SEQ ID NO: 25 - DNA, 20 bp, Homo sapiens
  source 1..20: mol_type = unassigned DNA
ccaagcactgaaacggatat

SEQ ID NO: 26 - DNA, 20 bp, Homo sapiens
  source 1..20: mol_type = unassigned DNA
gatgaaaagtgctccaagga

SEQ ID NO: 27 - DNA, 20 bp, Homo sapiens
  source 1..20: mol_type = unassigned DNA
aaccgtgatgaaaaggtacc

SEQ ID NO: 28 - DNA, 20 bp, Homo sapiens
  source 1..20: mol_type = unassigned DNA
tcatgcagattggaaaggtc

SEQ ID NO: 29 - DNA, 20 bp, Homo sapiens
  source 1..20: mol_type = unassigned DNA
cttcttggactgtccagagg

SEQ ID NO: 30 - DNA, 20 bp, Homo sapiens
  source 1..20: mol_type = unassigned DNA
gcagtccctgatacaagaac

SEQ ID NO: 31 - DNA, 20 bp, Homo sapiens
  source 1..20: mol_type = unassigned DNA
gattgaaggtggctcgctac

SEQ ID NO: 32 - DNA, 75 bp, Homo sapiens
  source 1..75: mol_type = unassigned DNA
atgatgccatcctcagtctcatggggtattttgctcttggcgggtctgtgctgtctcgtgccggtgtcgctcgca

SEQ ID NO: 33 - DNA, 90 bp, Homo sapiens
  source 1..90: mol_type = unassigned DNA
atggccggaccggcgactcagtcgcccatgaaactcatggccctgcagttgttgctttggcactcagccctctggaccgtccaagaggcg

SEQ ID NO: 34 - DNA, 137 bp, Homo sapiens
  source 1..137: mol_type = unassigned DNA
atgcagagagtgaacatgattatggccgagtccccatcgctcatcacaatctgcctgcttggtacctgctttccgccgaatgcactgtctttctggatcacgagaatgcgaataagatcttgaaccgacccaaacgg

SEQ ID NO: 35 - DNA, 63 bp, Homo sapiens
  source 1..63: mol_type = unassigned DNA
atgaaaggatcattgctgttgctcctcgtgtcgaaccttctgctttgccagtccgtagccccc

SEQ ID NO: 36 - DNA, 72 bp, Homo sapiens
  source 1..72: mol_type = unassigned DNA
atgaaatgggtgacgttcatctcactgttgtttttgttctcgtccgcctactccaggggagtattccgccga

SEQ ID NO: 37 - DNA, 63 bp, Homo sapiens
  source 1..63: mol_type = unassigned DNA
atgtggtggcggctctggtggctgctcctgttgctcctcttgctgtggcccatggtgtgggca

SEQ ID NO: 38 - DNA, 95 bp, Homo sapiens
  source 1..95: mol_type = unassigned DNA
tgctctttaacctccgcatcctgttgaataacgctgcgttccgaaatgggcataacttcatggtacgcaacttcagatgcggccagccactccag

SEQ ID NO: 39 - DNA, 87 bp, Homo sapiens
  source 1..87: mol_type = unassigned DNA
atgtccgtcttgacacccctgctcttgagagggctgacggggtccgctagacgcctgccggtaccgcgagcgaagatccactccctg

SEQ ID NO: 40 - DNA, 87 bp, Homo sapiens
  source 1..87: mol_type = unassigned DNA
atgagcgtgctcactccgttgcttcttcgagggcttacgggatcggctcggaggttgcccgtcccgagagcgaagatccattcgttg

SEQ ID NO: 41 - DNA, 175 bp, unidentified
  misc_feature 1..175: note = Description of Unknown: Bacterial signal sequence
  source 1..175: mol_type = unassigned DNA
tgacaaaaataactttatctccccagaattttagaatccaaaaacaggaaaccacactactaaaagaaaaatcaaccgagaaaaattctttagcaaaaagtattctcgcagtaaaaatcacttcatcgaattaaggtcaaaattatcggaacgttttatttcgcataagaacact

SEQ ID NO: 42 - DNA, 69 bp, unidentified
  misc_feature 1..69: note = Description of Unknown: Viral signal sequence
  source 1..69: mol_type = unassigned DNA
atgctgagctttgtggatacccgcaccctgctgctgctggcggtgaccagctgcctggcgacctgccag

SEQ ID NO: 43 - DNA, 96 bp, unidentified
  misc_feature 1..96: note = Description of Unknown: Viral signal sequence
  source 1..96: mol_type = unassigned DNA
atgggcagcagccaggcgccgcgcatgggcagcgtgggcggccatggcctgatggcgctgctgatggcgggcctgattctgccgggcattctggcg

SEQ ID NO: 44 - DNA, 51 bp, unidentified
  misc_feature 1..51: note = Description of Unknown: Viral signal sequence
  source 1..51: mol_type = unassigned DNA
atggcgggcattttttattttctgtttagctttctgtttggcatttgcgat

SEQ ID NO: 45 - DNA, 66 bp, unidentified
  misc_feature 1..66: note = Description of Unknown: Viral signal sequence
  source 1..66: mol_type = unassigned DNA
atggaaaaccgcctgctgcgcgtgtttctggtgtgggcggcgctgaccatggatggcgcgagcgcg

SEQ ID NO: 46 - DNA, 81 bp, unidentified
  misc_feature 1..81: note = Description of Unknown: Viral signal sequence
  source 1..81: mol_type = unassigned DNA
atggcgcgccagggctgctttggcagctatcaggtgattagcctgtttacctttgcgattggcgtgaacctgtgcctgggc

SEQ ID NO: 47 - DNA, 57 bp, unidentified
  misc_feature 1..57: note = Description of Unknown: Bacterial signal sequence
  source 1..57: mol_type = unassigned DNA
atgagccgcctgccggtgctgctgctgctgcagctgctggtgcgcccgggcctgcag

SEQ ID NO: 48 - DNA, 87 bp, unidentified
  misc_feature 1..87: note = Description of Unknown: Bacterial signal sequence
  source 1..87: mol_type = unassigned DNA
atgaaacagcagaaacgcctgtatgcgcgcctgctgaccctgctgtttgcgctgatttttctgctgccgcatagcagcgcgagcgcg

SEQ ID NO: 49 - DNA, 78 bp, Homo sapiens
  source 1..78: mol_type = unassigned DNA
atggcgacgccgctgcctccgccctccccgcggcacctgcggctgctgcggctgctgctctccgccctcgtcctcggc

SEQ ID NO: 50 - DNA, 54 bp, Homo sapiens
  source 1..54: mol_type = unassigned DNA
atgaaggctccgggtcggctcgtgctcatcatcctgtgctccgtggtcttctct

SEQ ID NO: 51 - DNA, 45 bp, Homo sapiens
  source 1..45: mol_type = unassigned DNA
atgcttcagctttggaaacttgttctcctgtgcggcgtgctcact

SEQ ID NO: 52 - DNA, 39 bp, Homo sapiens
  source 1..39: mol_type = unassigned DNA
atgctttatctccagggttggagcatgcctgctgtggca

SEQ ID NO: 53 - DNA, 144 bp, Homo sapiens
  source 1..144: mol_type = unassigned DNA
atggataacgtgcagccgaaaataaaacatcgccccttctgcttcagtgtgaaaggccacgtgaagatgctgcggctggatattatcaactcactggtaacaacagtattcatgctcatcgtatctgtgttggcactgatacca

SEQ ID NO: 54 - DNA, 96 bp, Homo sapiens
  source 1..96: mol_type = unassigned DNA
atgccctgcctagaccaacagctcactgttcatgccctaccctgccctgcccagccctcctctctggccttctgccaagtggggttcttaacagca

SEQ ID NO: 55 - DNA, 138 bp, Homo sapiens
  source 1..138: mol_type = unassigned DNA
atgaaaaccttgttcaatccagcccctgccattgctgacctggatccccagttctacaccctctcagatgtgttctgctgcaatgaaagtgaggctgagattttaactggcctcacggtgggcagcgctgcagatgct

SEQ ID NO: 56 - DNA, 57 bp, Homo sapiens
  source 1..57: mol_type = unassigned DNA
atgaagcctctccttgttgtgtttgtctttcttttcctttgggatccagtgctggca

SEQ ID NO: 57 - DNA, 63 bp, Homo sapiens
  source 1..63: mol_type = unassigned DNA
atgtcctgttccctaaagtttactttgattgtaatttttttttactgttggctttcatccagc

SEQ ID NO: 58 - DNA, 210 bp, Homo sapiens
  source 1..210: mol_type = unassigned DNA
atggttcttactaaacctcttcaaagaaatggcagcatgatgagctttgaaaatgtgaaagaaaagagcagagaaggagggccccatgcacacacacccgaagaagaattgtgtttcgtggtaacacactaccctcaggttcagaccacactcaacctgtttttccatatattcaaggttcttactcaaccactttcccttctgtggggt

SEQ ID NO: 59 - DNA, 96 bp, Homo sapiens
  source 1..96: mol_type = unassigned DNA
atggccaccccgccattccggctgataaggaagatgttttccttcaaggtgagcagatggatggggcttgcctgcttccggtccctggcggcatcc

SEQ ID NO: 60 - DNA, 87 bp, Homo sapiens
  source 1..87: mol_type = unassigned DNA
atgagctttttccaactcctgatgaaaaggaaggaactcattcccttggtggtgttcatgactgtggcggcgggtggagcctcatct

SEQ ID NO: 61 - DNA, 123 bp, Homo sapiens
  source 1..123: mol_type = unassigned DNA
atggtctcagctctgcggggagcacccctgatcagggtgcactcaagccctgtttcttctccttctgtgagtggaccacggaggctggtgagctgcctgtcatcccaaagctcagctctgagc

SEQ ID NO: 62 - DNA, 60 bp, Homo sapiens
  source 1..60: mol_type = unassigned DNA
atgatggggtccccagtgagtcatctgctggccggcttctgtgtgtgggtcgtcttgggc

SEQ ID NO: 63 - DNA, 69 bp, Homo sapiens
  source 1..69: mol_type = unassigned DNA
atggcaagcatggctgccgtgctcacctgggctctggctcttctttcagcgttttcggccacccaggca

SEQ ID NO: 64 - DNA, 135 bp, Homo sapiens
  source 1..135: mol_type = unassigned DNA
atggtgctcatgtggaccagtggtgacgccttcaagacggcctacttcctgctgaagggtgcccctctgcagttctccgtgtgcggcctgctgcaggtgctggtggacctggccatcctggggcaggcctacgcc

SEQ ID NO: 65 - DNA, 204 bp, Homo sapiens
  source 1..204: mol_type = unassigned DNA
atggattttgtcgctggagccatcggaggcgtctgcggtgttgctgtgggctaccccctggacacggtgaaggtcaggatccagacggagccaaagtacacaggcatctggcactgcgtccgggatacgtatcaccgagagcgcgtgtggggcttctaccggggcctctcgctgcccgtgtgcacggtgtccctggtatcttcc

SEQ ID NO: 66 - DNA, 147 bp, Homo sapiens
  source 1..147: mol_type = unassigned DNA
atggagaagcccctcttcccattagtgcctttgcattggtttggctttggctacacagcactggttgtttctggtgggatcgttggctatgtaaaaacaggcagcgtgccgtccctggctgcagggctgctcttcggcagtctagcc

SEQ ID NO: 67 - DNA, 45 bp, Homo sapiens
  source 1..45: mol_type = unassigned DNA
atgggtctgctccttcccctggcactctgcatcctagtcctgtgc

SEQ ID NO: 68 - DNA, 78 bp, Homo sapiens
  source 1..78: mol_type = unassigned DNA
atggggatccagacgagccccgtcctgctggcctccctgggggtggggctggtcactctgctcggcctggctgtgggc

SEQ ID NO: 69 - DNA, 75 bp, Homo sapiens
  source 1..75: mol_type = unassigned DNA
atgtcggacctgctactactgggcctgattgggggcctgactctcttactgctgctgacgctgctagcctttgcc

SEQ ID NO: 70 - DNA, 87 bp, Homo sapiens
  source 1..87: mol_type = unassigned DNA
atggagactgtggtgattgttgccataggtgtgctggccaccatgtttctggcttcgtttgcagccttggtgctggtttgcaggcag

SEQ ID NO: 71 - DNA, 105 bp, Homo sapiens
  source 1..105: mol_type = unassigned DNA
atgcgcggctctgtggagtgcacctggggttgggggcactgtgcccccagccccctgctcctttggactctacttctgtttgcagccccatttggcctgctgggg

SEQ ID NO: 72 - DNA, 171 bp, Homo sapiens
  source 1..171: mol_type = unassigned DNA
atgatgccgtcccgtaccaacctggctactggaatccccagtagtaaagtgaaatattcaaggctctccagcacagacgatggctacattgaccttcagtttaagaaaacccctcctaagatcccttataaggccatcgcacttgccactgtgctgtttttgattggcgcc

SEQ ID NO: 73 - DNA, 108 bp, Homo sapiens
  source 1..108: mol_type = unassigned DNA
atggccctgccccagatgtgtgacgggagccacttggcctccaccctccgctattgcatgacagtcagcggcacagtggttctggtggccgggacgctctgcttcgct

SEQ ID NO: 74 - DNA, 63 bp, unidentified
  misc_feature 1..63: note = Description of Unknown: Bacterial signal sequence
  source 1..63: mol_type = unassigned DNA
tgaaaaagtggttcgttgctgccggcatcggcgctgccggactcatgctctccagcgccgcca

SEQ ID NO: 75 - DNA, 63 bp, unidentified
  misc_feature 1..63: note = Description of Unknown: Bacterial signal sequence
  source 1..63: mol_type = unassigned DNA
atgaaacagagcaccattgcgctggcgctgctgccgctgctgtttaccccggtgaccaaagcg

SEQ ID NO: 76 - DNA, 63 bp, unidentified
  misc_feature 1..63: note = Description of Unknown: Bacterial signal sequence
  source 1..63: mol_type = unassigned DNA
atgaaaaaaaccgcgattgcgattgcggtggcgctggcgggctttgcgaccgtggcgcaggcg

SEQ ID NO: 77 - DNA, 63 bp, unidentified
  misc_feature 1..63: note = Description of Unknown: Bacterial signal sequence
  source 1..63: mol_type = unassigned DNA
atgaaaaaactgatgctggcgattttttttagcgtgctgagctttccgagctttagccagagc

SEQ ID NO: 78 - DNA, 69 bp, unidentified
  misc_feature 1..69: note = Description of Unknown: Bacterial signal sequence
  source 1..69: mol_type = unassigned DNA
atgaaaaaaaacattgcgtttctgctggcgagcatgtttgtgtttagcattgcgaccaacgcgtatgcg

SEQ ID NO: 79 - DNA, 96 bp, Homo sapiens
  source 1..96: mol_type = unassigned DNA
atgtttgcgaaacgctttaaaaccagcctgctgccgctgtttgcgggctttctgctgctgtttcatctggtgctggcgggcccggcggcggcgagc

SEQ ID NO: 80 - DNA, 57 bp, Homo sapiens
  source 1..57: mol_type = unassigned DNA
atgcgctttccgagcatttttaccgcggtgctgtttgcggcgagcagcgcgctggcg

SEQ ID NO: 81 - DNA, 57 bp, Homo sapiens
  source 1..57: mol_type = unassigned DNA
atgcgctttccgagcatttttaccaccgtgctgtttgcggcgagcagcgcgctggcg

SEQ ID NO: 82 - DNA, 57 bp, Homo sapiens
  source 1..57: mol_type = unassigned DNA
atgcgctttccgagcatttttaccagcgtgctgtttgcggcgagcagcgcgctggcg

SEQ ID NO: 83 - DNA, 57 bp, Homo sapiens
  source 1..57: mol_type = unassigned DNA
atgcgctttccgagcatttttacccatgtgctgtttgcggcgagcagcgcgctggcg

SEQ ID NO: 84 - DNA, 57 bp, Homo sapiens
  source 1..57: mol_type = unassigned DNA
atgcgctttccgagcatttttaccattgtgctgtttgcggcgagcagcgcgctggcg

SEQ ID NO: 85 - DNA, 57 bp, Homo sapiens
  source 1..57: mol_type = unassigned DNA
atgcgctttccgagcatttttacctttgtgctgtttgcggcgagcagcgcgctggcg

SEQ ID NO: 86 - DNA, 57 bp, Homo sapiens
  source 1..57: mol_type = unassigned DNA
atgcgctttccgagcatttttaccgaagtgctgtttgcggcgagcagcgcgctggcg

SEQ ID NO: 87 - DNA, 57 bp, Homo sapiens
  source 1..57: mol_type = unassigned DNA
atgcgctttccgagcatttttaccggcgtgctgtttgcggcgagcagcgcgctggcg

SEQ ID NO: 88 - DNA, 63 bp, Homo sapiens
  source 1..63: mol_type = unassigned DNA
atgcgttcctcccccctcctccgctccgccgttgtggccgccctgccggtgttggcccttgcc

SEQ ID NO: 89 - DNA, 66 bp, Homo sapiens
  source 1..66: mol_type = unassigned DNA
atgggcgcggcggccgtgcgctggcacttgtgcgtgctgctggccctgggcacacgcgggcggctg

SEQ ID NO: 90 - DNA, 53 bp, synthetic construct
  misc_feature 1..53: note = Description of Artificial Sequence: Synthetic signal sequence
  source 1..53: mol_type = other DNA
atgaggagctcccttgtgctgttctttgtctctgcgtggacggccttggccag

SEQ ID NO: 91 - DNA, 96 bp, Homo sapiens
  source 1..96: mol_type = unassigned DNA
atgctcaggggtccgggacccgggcggctgctgctgctagcagtcctgtgcctggggacatcggtgcgctgcaccgaaaccgggaagagcaagagg

SEQ ID NO: 92 - DNA, 69 bp, Homo sapiens
  source 1..69: mol_type = unassigned DNA
atgcttaggggtccggggcccgggctgctgctgctggccgtccagctggggacagcggtgccctccacg

SEQ ID NO: 93 - DNA, 93 bp, Homo sapiens
  source 1..93: mol_type = unassigned DNA
atgcgccggggggccctgaccgggctgctcctggtcctgtgcctgagtgttgtgctacgtgcagccccctctgcaacaagcaagaagcgcagg

SEQ ID NO: 94 - protein, 24 aa, Homo sapiens
MMPSSVSWGILLAGLCCLVPVSLA

SEQ ID NO: 95 - protein, 30 aa, Homo sapiens
MAGPATQSPMKLMALQLLLWHSALWTVQEA

SEQ ID NO: 96 - protein, 46 aa, Homo sapiens
MQRVNMIMAESPSLITICLLGYLLSAECTVFLDHENANKILNRPKR

SEQ ID NO: 97 - protein, 21 aa, Homo sapiens
MKGSLLLLLVSNLLLCQSVAP

SEQ ID NO: 98 - protein, 24 aa, Homo sapiens
MKWVTFISLLFLFSSAYSRGVFRR

SEQ ID NO: 99 - protein, 19 aa, Homo sapiens
MWWRLWWLLLLLLLLPMWA

SEQ ID NO: 100 - protein, 32 aa, Homo sapiens
MLFNLRILLNNAAFRNGHNFMVRNFRCGQPLQ

SEQ ID NO: 101 - protein, 29 aa, Homo sapiens
MSVLTPLLLRGLTGSARRLPVPRAKIHSL

SEQ ID NO: 102 - protein, 29 aa, Homo sapiens
MSVLTPLLLRGLTGSARRLPVPRAKIHSL

SEQ ID NO: 103 - protein, 59 aa, unidentified
  REGION 1..59: note = Description of Unknown: Bacterial signal sequence
VTKITLSPQNFRIQKQETTLLKEKSTEKNSLAKSILAVKNHFIELRSKLSERFISHKNT

SEQ ID NO: 104 - protein, 23 aa, unidentified
  REGION 1..23: note = Description of Unknown: Viral signal sequence
MLSFVDTRTLLLLAVTSCLATCQ

SEQ ID NO: 105 - protein, 32 aa, unidentified
  REGION 1..32: note = Description of Unknown: Viral signal sequence
MGSSQAPRMGSVGGHGLMALLMAGLILPGILA

SEQ ID NO: 106 - protein, 17 aa, unidentified
  REGION 1..17: note = Description of Unknown: Viral signal sequence
MAGIFYFLFSFLFGICD

SEQ ID NO: 107 - protein, 22 aa, unidentified
  REGION 1..22: note = Description of Unknown: Viral signal sequence
MENRLLRVFLVWAALTMDGASA

SEQ ID NO: 108 - protein, 27 aa, unidentified
  REGION 1..27: note = Description of Unknown: Viral signal sequence
MARQGCFGSYQVISLFTFAIGVNLCLG

SEQ ID NO: 109 - protein, 19 aa, unidentified
  REGION 1..19: note = Description of Unknown: Bacterial signal sequence
MSRLPVLLLLQLLVRPGLQ

SEQ ID NO: 110 - protein, 29 aa, unidentified
  REGION 1..29: note = Description of Unknown: Bacterial signal sequence
MKQQKRLYARLLTLLFALIFLLPHSSASA

SEQ ID NO: 111 - protein, 22 aa, Homo sapiens
MATPLPPPSPRHLRLLRLLLSG

SEQ ID NO: 112 - protein, 18 aa, Homo sapiens
MKAPGRLVLIILCSVVFS

SEQ ID NO: 113 - protein, 13 aa, Homo sapiens
MLQLWKLLCGVLT

SEQ ID NO: 114 - protein, 13 aa, Homo sapiens
MLYLQGWSMPAVA

SEQ ID NO: 115 - protein, 48 aa, Homo sapiens
MDNVQPKIKHRPFCFSVKGHVKMLRLDIINSLVTTVFMLIVSVLALIP

SEQ ID NO: 116 - protein, 32 aa, Homo sapiens
MPCLDQQLTVHALPCPAQPSSLAFCQVGFLTA

SEQ ID NO: 117 - protein, 46 aa, Homo sapiens
MKTLFNPAPAIADLDPQFYTLSDVFCCNESEAEILTGLTVGSAADA

SEQ ID NO: 118 - protein, 19 aa, Homo sapiens
MKPLLVVFVFLFLWDPVLA

SEQ ID NO: 119 - protein, 21 aa, Homo sapiens [sequence omitted]

SEQ ID NO: 120 - protein, 70 aa, Homo sapiens
MVLTKPLQRNGSMMSFENVKEKSREGGPHAHTPEEELCFVVTHTPQVQTTLNLFFHIFKVLTQPLSLLWG

SEQ ID NO: 121 - protein, 32 aa, Homo sapiens
MATPPFRLIRKMFSFKVSRWMGLACFRSLAAS

SEQ ID NO: 122 - protein, 29 aa, Homo sapiens
MSFFQLLMKRKELIPLVVFMTVAAGGASS

SEQ ID NO: 123 - protein, 41 aa, Homo sapiens
MVSALRGAPLIRVHSSPVSSPSVSGPAALVSCLSSQSSALS

SEQ ID NO: 124 - protein, 20 aa, Homo sapiens
MMGSPVSHLLAGFCVWVVLG

SEQ ID NO: 125 - protein, 23 aa, Homo sapiens
MASMAAVLTWALALLSAFSATQA

SEQ ID NO: 126 - protein, 45 aa, Homo sapiens
MVLMWTSGDAFKTAYFLLKGAPLQFSVCGLLQVLVDLAILGQATA

SEQ ID NO: 127 - protein, 68 aa, Homo sapiens
MDFVAGAIGGVCGVAVGYPLDTVKVRIQTEPLYTGIWHCVRDTYHRERVWGFYRGLSLPVCTVSLVSS

SEQ ID NO: 128 - protein, 49 aa, Homo sapiens
MEKPLFPLVPLHWFGFGYTALVVSGGIVGYVKTGSVPSLAAGLLFGSLA

SEQ ID NO: 129 - protein, 15 aa, Homo sapiens
MGLLLPLALCILVLC

SEQ ID NO: 130 - protein, 26 aa, Homo sapiens
MGIQTSPVLLASLGVGLVTLLGLAVG

SEQ ID NO: 131 - protein, 25 aa, Homo sapiens
MSDLLLLGLIGGLTLLLLLTLLAFA

SEQ ID NO: 132 - protein, 29 aa, Homo sapiens
METVVIVAIGVLATIFLASFAALVLVCRQ

SEQ ID NO: 133 - protein, 35 aa, Homo sapiens
MAGSVECTWGWGHCAPSPLLLWTLLLFAAPFGLLG

SEQ ID NO: 134 - protein, 57 aa, Homo sapiens
MMPSRTNLATGIPSSKVKYSRLSSTDDGYIDLQFKKTPPKIPYKAIALATVLFLIGA

SEQ ID NO: 135 - protein, 36 aa, Homo sapiens
MALPQMCDGSHLASTLRYCMTVSGTVVLVAGTLCFA

SEQ ID NO: 136 - protein, 21 aa, Homo sapiens
MKKWFVAAGIGAGLLMLSSAA

SEQ ID NO: 137 - protein, 21 aa, Homo sapiens
MKQSTIALALLPLLFTPVTKA

SEQ ID NO: 138 - protein, 21 aa, Homo sapiens
MKKTAIAIAVALAGFATVAQA

SEQ ID NO: 139 - protein, 21 aa, unidentified
  REGION 1..21: note = Description of Unknown: Bacterial signal sequence
MKKLMLAIFFSVLSFPSFSQS

SEQ ID NO: 140 - protein, 23 aa, unidentified
  REGION 1..23: note = Description of Unknown: Bacterial signal sequence
MKKNIAFLLASMFVFSIATNAYA

SEQ ID NO: 141 - protein, 32 aa, Homo sapiens
MFAKRFKTSLLPLFAGFLLLFHLVLAGPAAAS

SEQ ID NO: 142 - protein, 19 aa, Homo sapiens
MRFPSIFTAVLFAASSALA

SEQ ID NO: 143 - protein, 19 aa, Homo sapiens
MRFPSIFTTVLFAASSALA

SEQ ID NO: 144 - protein, 19 aa, Homo sapiens
MRFPSIFTSVLFAASSALA

SEQ ID NO: 145 - protein, 19 aa, Homo sapiens
MRFPSIFTHVLFAASSALA

SEQ ID NO: 146 - protein, 19 aa, Homo sapiens
MRFPSIFTIVLFAASSALA

SEQ ID NO: 147 - protein, 19 aa, Homo sapiens
MRFPSIFTFVLFAASSALA

SEQ ID NO: 148 - protein, 19 aa, Homo sapiens
MRFPSIFTEVLFAASSALA

SEQ ID NO: 149 - protein, 19 aa, Homo sapiens
MRFPSIFTGVLFAASSALA

SEQ ID NO: 150 - protein, 21 aa, Homo sapiens
MRSSPLLRSAVVAALPVLALA

SEQ ID NO: 151 - protein, 22 aa, Homo sapiens
MGAAAVRWHLCVLLALGTRGRL

SEQ ID NO: 152 - protein, 17 aa, synthetic construct
  REGION 1..17: note = Description of Artificial Sequence: Synthetic signal sequence
MRSSLVLFFVSAWTALA

SEQ ID NO: 153 - protein, 32 aa, Homo sapiens
MLRGPGPGRLLLLAVLCLGTSVRCTETGKSKR

SEQ ID NO: 154 - protein, 26 aa, Homo sapiens
MLRGPGPGLLLLAVQCLGTAVPSTGA

SEQ ID NO: 155 - protein, 31 aa, Homo sapiens
MRRGALTGLLLVLCLSVVLRAAPSATSKKRR

SEQ ID NO: 156 - DNA, 2021 bp, Homo sapiens
  source 1..2021: mol_type = unassigned DNA
tcctcttttagagaatgtccggattgctattggactttggagcgtatggctccaaatcaactcattggctaaaacttgacggaaaatggtggttaggtggccagaatggatttgtggccaggggcatggatgctgctgctgctgctcttcctgctgctgctcttcctgctgcccaccctgtggttctgcagccccagtgccaagtacttcttcaagatggccttctacaatggctggatcctcttcctggctgtgctcgccatccctgtgtgtgccgtgcgaggacgcaacgtcgagaacatgaagatcttgcgtctaatgctgctccacatcaaatacctgtacgggatccgagtggaggtgcgaggggctcaccacttccctccctcgcagccctatgttgttgtctccaaccaccagagctctctcgatctgcttgggatgatggaggtactgccaggccgctgtgtgcccattgccaagcgcgagctactgtgggctggctctgccgggctggcctgctggctggcaggagtcatcttcatcgaccggaagcgcacgggggatgccatcagtgtcatgtctgaggtcgcccagaccctgctcacccaggacgtgagggtctgggtgtttcctgagggaacgagaaaccacaatggctccatgctgcccttcaaacgtggcgccttccatcttgcagtgcaggcccaggttcccattgtccccatagtcatgtcctcctaccaagacttctactgcaagaaggagcgtcgcttcacctcgggacaatgtcaggtgcgggtgctgcccccagtgcccacggaagggctgacaccagatgacgtcccagctctggctgacagagtccggcactccatgctcactgttttccgggaaatctccactgatggccggggtggtggtgactatctgaagaagcctgggggcggtgggtgaaccctggctctgagctctcctcccatctgtccccatcttcctccccacacctacccacccagtgggccctgaagcagggccaaaccctcttccttgtctcccctctccccacttattctcctctttggaatcttcaacttctgaagtgaatgtggatacagcgccactcctgccccctcttggccccatccatggactcttgcctcggtgcagtctccactcttgacccccacctcctactgtcttgtctgtgggacagttgcctccccctcatctccagtgactcagcctacacaagggaggggaacattccatccccagtggagtctcttcctatgtggtcttctctacccctctaccccacattggccagtggactcatccattctttggaacaaatcccccccactccaaagtccatggattcaatggactcatccatttgtgaggaggacttctcgccctctggctggaagctgatacctgaagcactcccaggctcatcatgggagctttcctcagcaccttcaccttccctcccagtgtagcctcctgtcagtgggggctggacccttctaattcagaggtctcatgcctgcccttgcccagatgcccagggtcgtgcactctctgggataccagttcagtctccacatttctggttttctgtccccatagtacagttcttcagtggacatgaccccacccagccccctgcagccctgctgcaccatctcaccagacacaaggggaagaagcagacatcaggtgctgcactcacttctgccccctggggagttggggaaaggaacgaaccctggctggaggggataggagggcttttaatttatttctttttctgttgaggcttccccctctctgagccagttttcatttcttcctggtggcattagccactccctgcctctcactccagacctgttcccacaactggggaggtaggctgggagcaaaaggagagggtgggacccagttttgcgtggttggtttttattaattatctggataacagcaaaaaaactgaaaataaagagagagagaga

SEQ ID NO: 157 - DNA, 2017 bp, Homo sapiens
  source 1..2017: mol_type = unassigned DNA
gaaatagggtcttcttcccaggttggaccccggggagtttgggcttttcctacaatcactgaccctcactgtgactaaaggagcagaattaggtggccagaatggatttgtggccaggggcatggatgctgctgctgctgctcttcctgctgctgctcttcctgctgcccaccctgtggttctgcagccccagtgccaagtacttcttcaagatggccttctacaatggctggatcctcttcctggctgtgctcgccatccctgtgtgtgccgtgcgaggacgcaacgtcgagaacatgaagatcttgcgtctaatgctgctccacatcaaatacctgtacgggatccgagtggaggtgcgaggggctcaccacttccctccctcgcagccctatgttgttgtctccaaccaccagagctctctcgatctgcttgggatgatggaggtactgccaggccgctgtgtgcccattgccaagcgcgagctactgtgggctggctctgccgggctggcctgctggctggcaggagtcatcttcatcgaccggaagcgcacgggggatgccatcagtgtcatgtctgaggtcgcccagaccctgctcacccaggacgtgagggtctgggtgtttcctgagggaacgagaaaccacaatggctccatgctgcccttcaaacgtggcgccttccatcttgcagtgcaggcccaggttcccattgtccccatagtcatgtcctcctaccaagacttctactgcaagaaggagcgtcgcttcacctcgggacaatgtcaggtgcgggtgctgcccccagtgcccacggaagggctgacaccagatgacgtcccagctctggctgacagagtccggcactccatgctcactgttttccgggaaatctccactgatggccggggtggtggtgactatctgaagaagcctgggggcggtgggtgaaccctggctctgagctctcctcccatctgtccccatcttcctccccacacctacccacccagtgggccctgaagcagggccaaaccctcttccttgtctcccctctccccacttattctcctctttggaatcttcaacttctgaagtgaatgtggatacagcgccactcctgccccctcttggccccatccatggactcttgcctcggtgcagtctccactcttgacccccacctcctactgtcttgtctgtgggacagttgcctccccctcatctccagtgactcagcctacacaagggaggggaacattccatccccagtggagtctcttcctatgtggtcttctctacccctctaccccacattggccagtggactcatccattctttggaacaaatcccccccactccaaagtccatggattcaatggactcatccatttgtgaggaggacttctcgccctctggctggaagctgatacctgaagcactcccaggctcatcatgggagctttcctcagcaccttcaccttccctcccagtgtagcctcctgtcagtgggggctggacccttctaattcagaggtctcatgcctgcccttgcccagatgcccagggtcgtgcactctctgggataccagttcagtctccacatttctggttttctgtccccatagtacagttcttcagtggacatgaccccacccagccccctgcagccctgctgcaccatctcaccagacacaaggggaagaagcagacatcaggtgctgcactcacttctgccccctggggagttggggaaaggaacgaaccctggctggaggggataggagggcttttaatttatttctttttctgttgaggcttccccctctctgagccagttttcatttcttcctggtggcattagccactccctgcctctcactccagacctgttcccacaactggggaggtaggctgggagcaaaaggagagggtgggacccagttttgcgtggttggtttttattaattatctggataacagcaaaaaaactgaaaataaagagagagagaga

SEQ ID NO: 158 - DNA, 2234 bp, Homo sapiens
  source 1..2234: mol_type = unassigned DNA
ggaaaccagcaggcgttggggaggggtggcgggggaatagcggcggcagcagccccagccctcagagagacagcagaaagggagggagggagggtgctggggggacagccccccaccattcctaccgctatgggcccaacctcccactcccacctcccctccatcggccggggctaggacacccccaaatcccgtcgcccccttggcaccgacaccccgacagagacagagacacagccatccgccaccaccgctgccgcagcctggctggggagggggccagccccccaggccccctacccctctgaggtggccagaatggatttgtggccaggggcatggatgctgctgctgctgctcttcctgctgctgctcttcctgctgcccaccctgtggttctgcagccccagtgccaagtacttcttcaagatggccttctacaatggctggatcctcttcctggctgtgctcgccatccctgtgtgtgccgtgcgaggacgcaacgtcgagaacatgaagatcttgcgtctaatgctgctccacatcaaatacctgtacgggatccgagtggaggtgcgaggggctcaccacttccctccctcgcagccctatgttgttgtctccaaccaccagagctctctcgatctgcttgggatgatggaggtactgccaggccgctgtgtgcccattgccaagcgcgagctactgtgggctggctctgccgggctggcctgctggctggcaggagtcatcttcatcgaccggaagcgcacgggggatgccatcagtgtcatgtctgaggtcgcccagaccctgctcacccaggacgtgagggtctgggtgtttcctgagggaacgagaaaccacaatggctccatgctgcccttcaaacgtggcgccttccatcttgcagtgcaggcccaggttcccattgtccccatagtcatgtcctcctaccaagacttctactgcaagaaggagcgtcgcttcacctcgggacaatgtcaggtgcgggtgctgcccccagtgcccacggaagggctgacaccagatgacgtcccagctctggctgacagagtccggcactccatgctcactgttttccgggaaatctccactgatggccggggtggtggtgactatctgaagaagcctgggggcggtgggtgaaccctggctctgagctctcctcccatctgtccccatcttcctccccacacctacccacccagtgggccctgaagcagggccaaaccctcttccttgtctcccctctccccacttattctcctctttggaatcttcaacttctgaagtgaatgtggatacagcgccactcctgccccctcttggccccatccatggactcttgcctcggtgcagtctccactcttgacccccacctcctactgtcttgtctgtgggacagttgcctccccctcatctccagtgactcagcctacacaagggaggggaacattccatccccagtggagtctcttcctatgtggtcttctctacccctctaccccacattggccagtggactcatccattctttggaacaaatcccccccactccaaagtccatggattcaatggactcatccatttgtgaggaggacttctcgccctctggctggaagctgatacctgaagcactcccaggctcatcatgggagctttcctcagcaccttcaccttccctcccagtgtagcctcctgtcagtgggggctggacccttctaattcagaggtctcatgcctgcccttgcccagatgcccagggtcgtgcactctctgggataccagttcagtctccacatttctggttttctgtccccatagtacagttcttcagtggacatgaccccacccagccccctgcagccctgctgcaccatctcaccagacacaaggggaagaagcagacatcaggtgctgcactcacttctgccccctggggagttggggaaaggaacgaaccctggctggaggggataggagggcttttaatttatttctttttctgttgaggcttccccctctctgagccagttttcatttcttcctggtggcattagccactccctgcctctcactccagacctgttcccacaactggggaggtaggctgggagcaaaaggagagggtgggacccagttttgcgtggttggtttttattaattatctggataacagcaaaaaaactgaaaataaagagagagagaga

SEQ ID NO: 159 - DNA, 2021 bp, Homo sapiens
  source 1..2021: mol_type = unassigned DNA
tcctcttttagagaatgtccggattgctattggactttggagcgtatggctccaaatcaactcattggctaaaacttgacggaaaatggtggttaggtggccagaatggatttgtggccaggggcatggatgctgctgctgctgctcttcctgctgctgctcttcctgctgcccaccctgtggttctgcagccccagtgccaagtacttcttcaagatggccttctacaatggctggatcctcttcctggctgtgctcgccatccctgtgtgtgccgtgcgaggacgcaacgtcgagaacatgaagatcttgcgtctaatgctgctccacatcaaatacctgtacgggatccgagtggaggtgcgaggggctcaccacttccctccctcgcagccctatgttgttgtctccaaccaccagagctctctcgatctgcttgggatgatggaggtactgccaggccgctgtgtgcccattgccaagcgcgagctactgtgggctggctctgccgggctggcctgctggctggcaggagtcatcttcatcgaccggaagcgcacgggggatgccatcagtgtcatgtctgaggtcgcccagaccctgctcacccaggacgtgagggtctgggtgtttcctgagggaacgagaaaccacaatggctccatgctgcccttcaaacgtggcgccttccatcttgcagtgcaggcccaggttcccattgtccccatagtcatgtcctcctaccaagacttctactgcaagaaggagcgtcgcttcacctcgggacaatgtcaggtgcgggtgctgcccccagtgcccacggaagggctgacaccagatgacgtcccagctctggctgacagagtccggcactccatgctcactgttttccgggaaatctccactgatggccggggtggtggtgactatctgaagaagcctgggggcggtgggtgaaccctggctctgagctctcctcccatctgtccccatcttcctccccacacctacccacccagtgggccctgaagcagggccaaaccctcttccttgtctcccctctccccacttattctcctctttggaatcttcaacttctgaagtgaatgtggatacagcgccactcctgccccctcttggccccatccatggactcttgcctcggtgcagtctccactcttgacccccacctcctactgtcttgtctgtgggacagttgcctccccctcatctccagtgactcagcctacacaagggaggggaacattccatccccagtggagtctcttcctatgtggtcttctctacccctctaccccacattggccagtggactcatccattctttggaacaaatcccccccactccaaagtccatggattcaatggactcatccatttgtgaggaggacttctcgccctctggctggaagctgatacctgaagcactcccaggctcatcctgggagctttcctcagcaccttcaccttccctcccagtgtagcctcctgtcagtgggggctggacccttctaattcagaggtctcatgcctgcccttgcccagatgcccagggtcgtgcactctctgggataccagttcagtctccacatttctggttttctgtccccatagtacagttcttcagtggacatgaccccacccagccccctgcagccctgctgcaccatctcaccagacacaaggggaagaagcagacatcaggtgctgcactcacttctgccccctggggagttggggaaaggaacgaaccctggctggaggggataggagggcttttaatttatttctttttctgttgaggcttccccctctctgagccagttttcatttcttcctggtggcattagccactccctgcctctcactccagacctgttcccacaactggggaggtaggctgggagcaaaaggagagggtgggacccagttttgcgtggttggtttttattaattatctggataacagcaaaaaaactgaaaataaagagagagagaga

SEQ ID NO: 160 - DNA, 2103 bp, Homo sapiens
  source 1..2103: mol_type = unassigned DNA
ctttcctctcccagggcaagtgctgttaggtcacctttactccattccctccttttttcacttggtgaggcctcacacactgtacctgcccacgcaaagtgtcactagaaggaagggaaagggtagtaggattcgtttgcctgtctggaggtaggattggtctttgtagctattccaggtggccagaatggatttgtggccaggggcatggatgctgctgctgctgctcttcctgctgctgctcttcctgctgcccaccctgtggttctgcagccccagtgccaagtacttcttcaagatggccttctacaatggctggatcctcttcctggctgtgctcgccatccctgtgtgtgccgtgcgaggacgcaacgtcgagaacatgaagatcttgcgtctaatgctgctccacatcaaatacctgtacgggatccgagtggaggtgcgaggggctcaccacttccctccctcgcagccctatgttgttgtctccaaccaccagagctctctcgatctgcttgggatgatggaggtactgccaggccgctgtgtgcccattgccaagcgcgagctactgtgggctggctctgccgggctggcctgctggctggcaggagtcatcttcatcgaccggaagcgcacgggggatgccatcagtgtcatgtctgaggtcgcccagaccctgctcacccaggacgtgagggtctgggtgtttcctgagggaacgagaaaccacaatggctccatgctgcccttcaaacgtggcgccttccatcttgcagtgcaggcccaggttcccattgtccccatagtcatgtcctcctaccaagacttctactgcaagaaggagcgtcgcttcacctcgggacaatgtcaggtgcgggtgctgcccccagtgcccacggaagggctgacaccagatgacgtcccagctctggctgacagagtccggcactccatgctcactgttttccgggaaatctccactgatggccggggtggtggtgactatctgaagaagcctgggggcggtgggtgaaccctggctctgagctctcctcccatctgtccccatcttcctccccacacctacccacccagtgggccctgaagcagggccaaaccctcttccttgtctcccctctccccacttattctcctctttggaatcttcaacttctgaagtgaatgtggatacagcgccactcctgccccctcttggccccatccatggactcttgcctcggtgcagtctccactcttgacccccacctcctactgtcttgtctgtgggacagttgcctccccctcatctccagtgactcagcctacacaagggaggggaacattccatccccagtggagtctcttcctatgtggtcttctctacccctctaccccacattggccagtggactcatccattctttggaacaaatcccccccactccaaagtccatggattcaatggactcatccatttgtgaggaggacttctcgccctctggctggaagctgatacctgaagcactcccaggctcatcatgggagctttcctcagcaccttcaccttccctcccagtgtagcctcctgtcagtgggggctggacccttctaattcagaggtctcatgcctgcccttgcccagatgcccagggtcgtgcactctctgggataccagttcagtctccacatttctggttttctgtccccatagtacagttcttcagtggacatgaccccacccagccccctgcagccctgctgcaccatctcaccagacacaaggggaagaagcagacatcaggtgctgcactcacttctgccccctggggagttggggaaaggaacgaaccctggctggaggggataggagggcttttaatttatttctttttctgttgaggcttccccctctctgagccagttttcatttcttcctggtggcattagccactccctgcctctcactccagacctgttcccacaactggggaggtaggctgggagcaaaaggagagggtgggacccagttttgcgtggttggtttttattaattatctggataacagcaaaaaaactgaaaataaagagagagagaga

SEQ ID NO: 161 - DNA, 2168 bp, Homo sapiens
  source 1..2168: mol_type = unassigned DNA
tggccgacatcgggaaagacggcgaagagctaggaaaagagggaaaacactagggtcgcagggttcaaaatggctccaacctcctttggtgacgtagagagcagaacttgggtctgcccctcccttttagttaagggagcagaactgggattagcccgacgtttggatagtgggaacatcgatctgcggcgctggtgttaacccaactcattcggctggacgactcagccctccccatattaggtggccagaatggatttgtggccaggggcatggatgctgctgctgctgctcttcctgctgctgctcttcctgctgcccaccctgtggttctgcagccccagtgccaagtacttcttcaagatggccttctacaatggctggatcctcttcctggctgtgctcgccatccctgtgtgtgccgtgcgaggacgcaacgtcgagaacatgaagatcttgcgtctaatgctgctccacatcaaatacctgtacgggatccgagtggaggtgcgaggggctcaccacttccctccctcgcagccctatgttgttgtctccaaccaccagagctctctcgatctgcttgggatgatggaggtactgccaggccgctgtgtgcccattgccaagcgcgagctactgtgggctggctctgccgggctggcctgctggctggcaggagtcatcttcatcgaccggaagcgcacgggggatgccatcagtgtcatgtctgaggtcgcccagaccctgctcacccaggacgtgagggtctgggtgtttcctgagggaacgagaaaccacaatggctccatgctgcccttcaaacgtggcgccttccatcttgcagtgcaggcccaggttcccattgtccccatagtcatgtcctcctaccaagacttctactgcaagaaggagcgtcgcttcacctcgggacaatgtcaggtgcgggtgctgcccccagtgcccacggaagggctgacaccagatgacgtcccagctctggctgacagagtccggcactccatgctcactgttttccgggaaatctccactgatggccggggtggtggtgactatctgaagaagcctgggggcggtgggtgaaccctggctctgagctctcctcccatctgtccccatcttcctccccacacctacccacccagtgggccctgaagcagggccaaaccctcttccttgtctcccctctccccacttattctcctctttggaatcttcaacttctgaagtgaatgtggatacagcgccactcctgccccctcttggccccatccatggactcttgcctcggtgcagtctccactcttgacccccacctcctactgtcttgtctgtgggacagttgcctccccctcatctccagtgactcagcctacacaagggaggggaacattccatccccagtggagtctcttcctatgtggtcttctctacccctctaccccacattggccagtggactcatccattctttggaacaaatcccccccactccaaagtccatggattcaatggactcatccatttgtgaggaggacttctcgccctctggctggaagctgatacctgaagcactcccaggctcatcatgggagctttcctcagcaccttcaccttccctcccagtgtagcctcctgtcagtgggggctggacccttctaattcagaggtctcatgcctgcccttgcccagatgcccagggtcgtgcactctctgggataccagttcagtctccacatttctggttttctgtccccatagtacagttcttcagtggacatgaccccacccagccccctgcagccctgctgcaccatctcaccagacacaaggggaagaagcagacatcaggtgctgcactcacttctgccccctggggagttggggaaaggaacgaaccctggctggaggggataggagggcttttaatttatttctttttctgttgaggcttccccctctctgagccagttttcatttcttcctggtggcattagccactccctgcctctcactccagacctgttcccacaactggggaggtaggctgggagcaaaaggagagggtgggacccagttttgcgtggttggtttttattaattatctggataacagcaaaaaaactgaaaataaagagagagagaga

SEQ ID NO: 162 - DNA, 2496 bp, Homo sapiens
  source 1..2496: mol_type = unassigned DNA
ggcagatgaggattcaggaagcttgaggtttaggaaggaagatattgagagggaaaggtggaaatgaaggagagtgaagtgatggaatgatcctagtaaagggataatgggagtggaggaagagaagagggggtggaaaactagatacatggctaccaaattaaggaggcacgcgcattccagaggaatcggcattcttcctcactttttatttttctagaaagcacccctgaagccaaatttccattggaagaaaagatgtacccatattgtatgttgtgagaaggggttgtctcagcttgggcaagtaaggagactgatacgaaggaagtaggaaagaaaaggtacagaggtaaaagagcatggaaaaggaaagggtcagggataaggccaaagagatctcttctctttaaaggccagagaaggcaggtggaggggggagctggactgctgggagatagtgagggacaaagggcaaaggaaaccagaccagaggactggagagtgagatggagtgagatggagtcctggagagaaaaagaagagaggtgaacttaatgcttgtcatatggtggccagaatggatttgtggccaggggcatggatgctgctgctgctgctcttcctgctgctgctcttcctgctgcccaccctgtggttctgcagccccagtgccaagtacttcttcaagatggccttctacaatggctggatcctcttcctggctgtgctcgccatccctgtgtgtgccgtgcgaggacgcaacgtcgagaacatgaagatcttgcgtctaatgctgctccacatcaaatacctgtacgggatccgagtggaggtgcgaggggctcaccacttccctccctcgcagccctatgttgttgtctccaaccaccagagctctctcgatctgcttgggatgatggaggtactgccaggccgctgtgtgcccattgccaagcgcgagctactgtgggctggctctgccgggctggcctgctggctggcaggagtcatcttcatcgaccggaagcgcacgggggatgccatcagtgtcatgtctgaggtcgcccagaccctgctcacccaggacgtgagggtctgggtgtttcctgagggaacgagaaaccacaatggctccatgctgcccttcaaacgtggcgccttccatcttgcagtgcaggcccaggttcccattgtccccatagtcatgtcctcctaccaagacttctactgcaagaaggagcgtcgcttcacctcgggacaatgtcaggtgcgggtgctgcccccagtgcccacggaagggctgacaccagatgacgtcccagctctggctgacagagtccggcactccatgctcactgttttccgggaaatctccactgatggccggggtggtggtgactatctgaagaagcctgggggcggtgggtgaaccctggctctgagctctcctcccatctgtccccatcttcctccccacacctacccacccagtgggccctgaagcagggccaaaccctcttccttgtctcccctctccccacttattctcctctttggaatcttcaacttctgaagtgaatgtggatacagcgccactcctgccccctcttggccccatccatggactcttgcctcggtgcagtctccactcttgacccccacctcctactgtcttgtctgtgggacagttgcctccccctcatctccagtgactcagcctacacaagggaggggaacattccatccccagtggagtctcttcctatgtggtcttctctacccctctaccccacattggccagtggactcatccattctttggaacaaatcccccccactccaaagtccatggattcaatggactcatccatttgtgaggaggacttctcgccctctggctggaagctgatacctgaagcactcccaggctcatcatgggagctttcctcagcaccttcaccttccctcccagtgtagcctcctgtcagtgggggctggacccttctaattcagaggtctcatgcctgcccttgcccagatgcccagggtcgtgcactctctgggataccagttcagtctccacatttctggttttctgtccccatagtacagttcttcagtggacatgaccccacccagccccctgcagccctgctgcaccatctcaccagacacaaggggaagaagcagacatcaggtgctgcactcacttctgccccctggggagttggggaaaggaacgaaccctggctggaggggataggagggcttttaatttatttctttttctgttgaggcttccccctctctgagccagttttcatttcttcctggtggcattagccactccctgcctctcactccagacctgttcccacaactggggaggtaggctgggagcaaaaggagagggtgggacccagttttgcgtggttggtttttattaattatctggataacagcaaaaaaactgaaaataaagagagagagaga

SEQ ID NO: 163 - DNA, 2496 bp, Homo sapiens
  source 1..2496: mol_type = unassigned DNA
ggcagatgaggattcaggaagcttgaggtttaggaaggaagatattgagagggaaaggtggaaatgaaggagagtgaagtgatggaatgatcctagtaaagggataatgggagtggaggaagagaagagggggtggaaaactagatacatggctaccaaattaaggaggcacgcgcattccagaggaatcggcattcttcctcactttttatttttctagaaagcacccctgaagccaaatttccattggaagaaaagatgtacccatattgtatgttgtgagaaggggttgtctcagcttgggcaagtaaggagactgatacgaaggaagtaggaaagaaaaggtacagaggtaaaagagcatggaaaaggaaagggtcagggataaggccaaagagatctcttctctttaaaggccagagaaggcaggtggaggggggagctggactgctgggagatagtgagggacaaagggcaaaggaaaccagaccagaggactggagagtgagatggagtgagatggagtcctggagagaaaaagaagagaggtgaacttaatgcttgtcatatggtggccagaatggatttgtggccaggggcatggatgctgctgctgctgctcttcctgctgctgctcttcctgctgcccaccctgtggttctgcagccccagtgccaagtacttcttcaagatggccttctacaatggctggatcctcttcctggctgtgctcgccatccctgtgtgtgccgtgcgaggacgcaacgtcgagaacatgaagatcttgcgtctaatgctgctccacatcaaatacctgtacgggatccgagtggaggtgcgaggggctcaccacttccctccctcgcagccctatgttgttgtctccaaccaccagagctctctcgatctgcttgggatgatggaggtactgccaggccgctgtgtgcccattgccaagcgcgagctactgtgggctggctctgccgggctggcctgctggctggcaggagtcatcttcatcgaccggaagcgcacgggggatgccatcagtgtcatgtctgaggtcgcccagaccctgctcacccaggacgtgagggtctgggtgtttcctgagggaacgagaaaccacaatggctccatgctgcccttcaaacgtggcgccttccatcttgcagtgcaggcccaggttcccattgtccccatagtcatgtcctcctaccaagacttctactgcaagaaggagcgtcgcttcacctcgggacaatgtcaggtgcgggtgctgcccccagtgcccacggaagggctgacaccagatgacgtcccagctctggctgacagagtccggcactccatgctcactgttttccgggaaatctccactgatggccggggtggtggtgactatctgaagaagcctgggggcggtgggtgaaccctggctctgagctctcctcccatctgtccccatcttcctccccacacctacccacccagtgggccctgaagcagggccaaaccctcttccttgtctcccctctccccacttattctcctctttggaatcttcaacttctgaagtgaatgtggatacagcgccactcctgccccctcttggccccatccatggactcttgcctcggtgcagtctccactcttgacccccacctcctactgtcttgtctgtgggacagttgcctccccctcatctccagtgactcagcctacacaagggaggggaacattccatccccagtggagtctcttcctatgtggtcttctctacccctctaccccacattggccagtggactcatccattctttggaacaaatcccccccactccaaagtccatggattcaatggactcatccatttgtgaggaggacttctcgccctctggctggaagctgatacctgaagcactcccaggctcatcctgggagctttcctcagcaccttcaccttccctcccagtgtagcctcctgtcagtgggggctggacccttctaattcagaggtctcatgcctgcccttgcccagatgcccagggtcgtgcactctctgggataccagttcagtctccacatttctggttttctgtccccatagtacagttcttcagtggacatgaccccacccagccccctgcagccctgctgcaccatctcaccagacacaaggggaagaagcagacatcaggtgctgcactcacttctgccccctggggagttggggaaaggaacgaaccctggctggaggggataggagggcttttaatttatttctttttctgttgaggcttccccctctctgagccagttttcatttcttcctggtggcattagccactccctgcctctcactccagacctgttcccacaactggggaggtaggctgggagcaaaaggagagggtgggacccagttttgcgtggttggtttttattaattatctggataacagcaaaaaaactgaaaataaagagagagagaga

SEQ ID NO: 164 - DNA, 2103 bp, Homo sapiens
  source 1..2103: mol_type = unassigned DNA
ctttcctctcccagggcaagtgctgttaggtcacctttactccattccctccttttttcacttggtgaggcctcacacactgtacctgcccacgcaaagtgtcactagaaggaagggaaagggtagtaggattcgtttgcctgtctggaggtaggattggtctttgtagctattccaggtggccagaatggatttgtggccaggggcatggatgctgctgctgctgctcttcctgctgctgctcttcctgctgcccaccctgtggttctgcagccccagtgccaagtacttcttcaagatggccttctacaatggctggatcctcttcctggctgtgctcgccatccctgtgtgtgccgtgcgaggacgcaacgtcgagaacatgaagatcttgcgtctaatgctgctccacatcaaatacctgtacgggatccgagtggaggtgcgaggggctcaccacttccctccctcgcagccctatgttgttgtctccaaccaccagagctctctcgatctgcttgggatgatggaggtactgccaggccgctgtgtgcccattgccaagcgcgagctactgtgggctggctctgccgggctggcctgctggctggcaggagtcatcttcatcgaccggaagcgcacgggggatgccatcagtgtcatgtctgaggtcgcccagaccctgctcacccaggacgtgagggtctgggtgtttcctgagggaacgagaaaccacaatggctccatgctgcccttcaaacgtggcgccttccatcttgcagtgcaggcccaggttcccattgtccccatagtcatgtcctcctaccaagacttctactgcaagaaggagcgtcgcttcacctcgggacaatgtcaggtgcgggtgctgcccccagtgcccacggaagggctgacaccagatgacgtcccagctctggctgacagagtccggcactccatgctcactgttttccgggaaatctccactgatggccggggtggtggtgactatctgaagaagcctgggggcggtgggtgaaccctggctctgagctctcctcccatctgtccccatcttcctccccacacctacccacccagtgggccctgaagcagggccaaaccctcttccttgtctcccctctccccacttattctcctctttggaatcttcaacttctgaagtgaatgtggatacagcgccactcctgccccctcttggccccatccatggactcttgcctcggtgcagtctccactcttgacccccacctcctactgtcttgtctgtgggacagttgcctccccctcatctccagtgactcagcctacacaagggaggggaacattccatccccagtggagtctcttcctatgtggtcttctctacccctctaccccacattggccagtggactcatccattctttggaacaaatcccccccactccaaagtccatggattcaatggactcatccatttgtgaggaggacttctcgccctctggctggaagctgatacctgaagcactcccaggctcatcctgggagctttcctcagcaccttcaccttccctcccagtgtagcctcctgtcagtgggggctggacccttctaattcagaggtctcatgcctgcccttgcccagatgcccagggtcgtgcactctctgggataccagttcagtctccacatttctggttttctgtccccatagtacagttcttcagtggacatgaccccacccagccccctgcagccctgctgcaccatctcaccagacacaaggggaagaagcagacatcaggtgctgcactcacttctgccccctggggagttggggaaaggaacgaaccctggctggaggggataggagggcttttaatttatttctttttctgttgaggcttccccctctctgagccagttttcatttcttcctggtggcattagccactccctgcctctcactccagacctgttcccacaactggggaggtaggctgggagcaaaaggagagggtgggacccagttttgcgtggttggtttttattaattatctggataacagcaaaaaaactgaaaataaagagagagagaga

SEQ ID NO: 165 - DNA, 2168 bp, Homo sapiens
  source 1..2168: mol_type = unassigned DNA
tggccgacatcgggaaagacggcgaagagctaggaaaagagggaaaacactagggtcgcagggttcaaaatggctccaacctcctttggtgacgtagagagcagaacttgggtctgcccctcccttttagttaagggagcagaactgggattagcccgacgtttggatagtgggaacatcgatctgcggcgctggtgttaacccaactcattcggctggacgactcagccctccccatattaggtggccagaatggatttgtggccaggggcatggatgctgctgctgctgctcttcctgctgctgctcttcctgctgcccaccctgtggttctgcagccccagtgccaagtacttcttcaagatggccttctacaatggctggatcctcttcctggctgtgctcgccatccctgtgtgtgccgtgcgaggacgcaacgtcgagaacatgaagatcttgcgtctaatgctgctccacatcaaatacctgtacgggatccgagtggaggtgcgaggggctcaccacttccctccctcgcagccctatgttgttgtctccaaccaccagagctctctcgatctgcttgggatgatggaggtactgccaggccgctgtgtgcccattgccaagcgcgagctactgtgggctggctctgccgggctggcctgctggctggcaggagtcatcttcatcgaccggaagcgcacgggggatgccatcagtgtcatgtctgaggtcgcccagaccctgctcacccaggacgtgagggtctgggtgtttcctgagggaacgagaaaccacaatggctccatgctgcccttcaaacgtggcgccttccatcttgcagtgcaggcccaggttcccattgtccccatagtcatgtcctcctaccaagacttctactgcaagaaggagcgtcgcttcacctcgggacaatgtcaggtgcgggtgctgcccccagtgcccacggaagggctgacaccagatgacgtcccagctctggctgacagagtccggcactccatgctcactgttttccgggaaatctccactgatggccggggtggtggtgactatctgaagaagcctgggggcggtgggtgaaccctggctctgagctctcctcccatctgtccccatcttcctccccacacctacccacccagtgggccctgaagcagggccaaaccctcttccttgtctcccctctccccacttattctcctctttggaatcttcaacttctgaagtgaatgtggatacagcgccactcctgccccctcttggccccatccatggactcttgcctcggtgcagtctccactcttgacccccacctcctactgtcttgtctgtgggacagttgcctccccctcatctccagtgactcagcctacacaagggaggggaacattccatccccagtggagtctcttcctatgtggtcttctctacccctctaccccacattggccagtggactcatccattctttggaacaaatcccccccactccaaagtccatggattcaatggactcatccatttgtgaggaggacttctcgccctctggctggaagctgatacctgaagcactcccaggctcatcctgggagctttcctcagcaccttcaccttccctcccagtgtagcctcctgtcagtgggggctggacccttctaattcagaggtctcatgcctgcccttgcccagatgcccagggtcgtgcactctctgggataccagttcagtctccacatttctggttttctgtccccatagtacagttcttcagtggacatgaccccacccagccccctgcagccctgctgcaccatctcaccagacacaaggggaagaagcagacatcaggtgctgcactcacttctgccccctggggagttggggaaaggaacgaaccctggctggaggggataggagggcttttaatttatttctttttctgttgaggcttccccctctctgagccagttttcatttcttcctggtggcattagccactccctgcctctcactccagacctgttcccacaactggggaggtaggctgggagcaaaaggagagggtgggacccagttttgcgtggttggtttttattaattatctggataacagcaaaaaaactgaaaataaagagagagagaga

SEQ ID NO: 166 - DNA, 2017 bp, Homo sapiens
  source 1..2017: mol_type = unassigned DNA
gaaatagggtcttcttcccaggttggaccccggggagtttgggcttttcctacaatcactgaccctcactgtgactaaaggagcagaattaggtggccagaatggatttgtggccaggggcatggatgctgctgctgctgctcttcctgctgctgctcttcctgctgcccaccctgtggttctgcagccccagtgccaagtacttcttcaagatggccttctacaatggctggatcctcttcctggctgtgctcgccatccctgtgtgtgccgtgcgaggacgcaacgtcgagaacatgaagatcttgcgtctaatgctgctccacatcaaatacctgtacgggatccgagtggaggtgcgaggggctcaccacttccctccctcgcagccctatgttgttgtctccaaccaccagagctctctcgatctgcttgggatgatggaggtactgccaggccgctgtgtgcccattgccaagcgcgagctactgtgggctggctctgccgggctggcctgctggctggcaggagtcatcttcatcgaccggaagcgcacgggggatgccatcagtgtcatgtctgaggtcgcccagaccctgctcacccaggacgtgagggtctgggtgtttcctgagggaacgagaaaccacaatggctccatgctgcccttcaaacgtggcgccttccatcttgcagtgcaggcccaggttcccattgtccccatagtcatgtcctcctaccaagacttctactgcaagaaggagcgtcgcttcacctcgggacaatgtcaggtgcgggtgctgcccccagtgcccacggaagggctgacaccagatgacgtcccagctctggctgacagagtccggcactccatgctcactgttttccgggaaatctccactgatggccggggtggtggtgactatctgaagaagcctgggggcggtgggtgaaccctggctctgagctctcctcccatctgtccccatcttcctccccacacctacccacccagtgggccctgaagcagggccaaaccctcttccttgtctcccctctccccacttattctcctctttggaatcttcaacttctgaagtgaatgtggatacagcgccactcctgccccctcttggccccatccatggactcttgcctcggtgcagtctccactcttgacccccacctcctactgtcttgtctgtgggacagttgcctccccctcatctccagtgactcagcctacacaagggaggggaacattccatccccagtggagtctcttcctatgtggtcttctctacccctctaccccacattggccagtggactcatccattctttggaacaaatcccccccactccaaagtccatggattcaatggactcatccatttgtgaggaggacttctcgccctctggctggaagctgatacctgaagcactcccaggctcatcctgggagctttcctcagcaccttcaccttccctcccagtgtagcctcctgtcagtgggggctggacccttctaattcagaggtctcatgcctgcccttgcccagatgcccagggtcgtgcactctctgggataccagttcagtctccacatttctggttttctgtccccatagtacagttcttcagtggacatgaccccacccagccccctgcagccctgctgcaccatctcaccagacacaaggggaagaagcagacatcaggtgctgcactcacttctgccccctggggagttggggaaaggaacgaaccctggctggaggggataggagggcttttaatttatttctttttctgttgaggcttccccctctctgagccagttttcatttcttcctggtggcattagccactccctgcctctcactccagacctgttcccacaactggggaggtaggctgggagcaaaaggagagggtgggacccagttttgcgtggttggtttttattaattatctggataacagcaaaaaaactgaaaataaagagagagagaga

SEQ ID NO: 167 - DNA, 2234 bp, Homo sapiens
  source 1..2234: mol_type = unassigned DNA
ggaaaccagcaggcgttggggaggggtggcgggggaatagcggcggcagcagccccagccctcagagagacagcagaaagggagggagggagggtgctggggggacagccccccaccattcctaccgctatgggcccaacctcccactcccacctcccctccatcggccggggctaggacacccccaaatcccgtcgcccccttggcaccgacaccccgacagagacagagacacagccatccgccaccaccgctgccgcagcctggctggggagggggccagccccccaggccccctacccctctgaggtggccagaatggatttgtggccaggggcatggatgctgctgctgctgctcttcctgctgctgctcttcctgctgcccaccctgtggttctgcagccccagtgccaagtacttcttcaagatggccttctacaatggctggatcctcttcctggctgtgctcgccatccctgtgtgtgccgtgcgaggacgcaacgtcgagaacatgaagatcttgcgtctaatgctgctccacatcaaatacctgtacgggatccgagtggaggtgcgaggggctcaccacttccctccctcgcagccctatgttgttgtctccaaccaccagagctctctcgatctgcttgggatgatggaggtactgccaggccgctgtgtgcccattgccaagcgcgagctactgtgggctggctctgccgggctggcctgctggctggcaggagtcatcttcatcgaccggaagcgcacgggggatgccatcagtgtcatgtctgaggtcgcccagaccctgctcacccaggacgtgagggtctgggtgtttcctgagggaacgagaaaccacaatggctccatgctgcccttcaaacgtggcgccttccatcttgcagtgcaggcccaggttcccattgtccccatagtcatgtcctcctaccaagacttctactgcaagaaggagcgtcgcttcacctcgggacaatgtcaggtgcgggtgctgcccccagtgcccacggaagggctgacaccagatgacgtcccagctctggctgacagagtccggcactccatgctcactgttttccgggaaatctccactgatggccggggtggtggtgactatctgaagaagcctgggggcggtgggtgaaccctggctctgagctctcctcccatctgtccccatcttcctccccacacctacccacccagtgggccctgaagcagggccaaaccctcttccttgtctcccctctccccacttattctcctctttggaatcttcaacttctgaagtgaatgtggatacagcgccactcctgccccctcttggccccatccatggactcttgcctcggtgcagtctccactcttgacccccacctcctactgtcttgtctgtgggacagttgcctccccctcatctccagtgactcagcctacacaagggaggggaacattccatccccagtggagtctcttcctatgtggtcttctctacccctctaccccacattggccagtggactcatccattctttggaacaaatcccccccactccaaagtccatggattcaatggactcatccatttgtgaggaggacttctcgccctctggctggaagctgatacctgaagcactcccaggctcatcctgggagctttcctcagcaccttcaccttccctcccagtgtagcctcctgtcagtgggggctggacccttctaattcagaggtctcatgcctgcccttgcccagatgcccagggtcgtgcactctctgggataccagttcagtctccacatttctggttttctgtccccatagtacagttcttcagtggacatgaccccacccagccccctgcagccctgctgcaccatctcaccagacacaaggggaagaagcagacatcaggtgctgcactcacttctgccccctggggagttggggaaaggaacgaaccctggctggaggggataggagggcttttaatttatttctttttctgttgaggcttccccctctctgagccagttttcatttcttcctggtggcattagccactccctgcctctcactccagacctgttcccacaactggggaggtaggctgggagcaaaaggagagggtgggacccagttttgcgtggttggtttttattaattatctggataacagcaaaaaaactgaaaataaagagagagagaga

SEQ ID NO: 168 - DNA, 991 bp, Homo sapiens
  source 1..991: mol_type = unassigned DNA
agagagacagcagaaagggagggagggagggtgctggggggacagccccccaccattcctaccgctatgggcccaacctcccactcccacctcccctccatcggccggggctaggacacccccaaatcccgtcgcccccttggcaccgacaccccgacagagacagagacacagccatccgccaccaccgctgccgcagcctggctggggagggggccagccccccaggccccctacccctctgaggtggccagaatggatttgtggccaggggcatggatgctgctgctgctgctcttcctgctgctgctcttcctgctgcccaccctgtggttctgcagccccagtgccaagtacttcttcaagatggccttctacaatggctggatcctcttcctggctgtgctcgccatccctgtgtgtgccgtgcgaggacgcaacgtcgagaacatgaaggatgatggaggtactgccaggccgctgtgtgcccattgccaagcgcgagctactgtgggctggctctgccgggctggcctgctggctggcaggagtcatcttcatcgaccggaagcgcacgggggatgccatcagtgtcatgtctgaggtcgcccagaccctgctcacccaggacgtgagggtctgggtgtttcctgagggaacgagaaaccacaatggctccatgctgcccttcaaacgtggcgccttccatcttgcagtgcaggcccaggttcccattgtccccatagtcatgtcctcctaccaagacttctactgcaagaaggagcgtcgcttcacctcgggacaatgtcaggtgcgggtgctgcccccagtgcccacggaagggctgacaccagatgacgtcccagctctggctgacagagtccggcactccatgctcactgttttccgggaaatctccactgatggccggggtggtggtgactatctgaagaagcctgggggcggtgggtgaaccctggctctgagctct

SEQ ID NO: 169 - DNA, 2103 bp, Homo sapiens
  source 1..2103: mol_type = unassigned DNA
ctttcctctcccagggcaagtgctgttaggtcacctttactccattccctccttttttcacttggtgaggcctcacacactgtacctgcccacgcaaagtgtcactagaaggaagggaaagggtagtaggattcgtttgcctgtctggaggtaggattggtctttgtagctattccaggtggccagaatggatttgtggccaggggcatggatgctgctgctgctgctcttcctgctgctgctcttcctgctgcccaccctgtggttctgcagccccagtgccaagtacttcttcaagatggccttctacaatggctggatcctcttcctggctgtgctcgccatccctgtgtgtgccgtgcgaggacgcaacgtcgagaacatgaagatcttgcgtctaatgctgctccacatcaaatacctgtacgggatccgagtggaggtgcgaggggctcaccacttccctccctcgcagccctatgttgttgtctccaaccaccagagctctctcgatctgcttgggatgatggaggtactgccaggccgctgtgtgcccattgccaagcgcgagctactgtgggctggctctgccgggctggcctgctggctggcaggagtcatcttcatcgaccggaagcgcacgggggatgccatcagtgtcatgtctgaggtcgcccagaccctgctcacccaggacgtgagggtctgggtgtttcctgagggaacgagaaaccacaatggctccatgctgcccttcaaacgtggcgccttccatcttgcagtgcaggcccaggttcccattgtccccatagtcatgtcctcctaccaagacttctactgcaagaaggagcgtcgcttcacctcgggacaatgtcaggtgcgggtgctgcccccagtgcccacggaagggctgacaccagatgacgtcccagctctggctgacagagtccggcactccatgctcactgttttccgggaaatctccactgatggccggggtggtggtgactatctgaagaagcctgggggcggtgggtgaaccctggctctgagctctcctcccatctgtccccatcttcctccccacacctacccacccagtgggccctgaagcagggccaaaccctcttccttgtctcccctctccccacttattctcctatttggaatcttcaacttctgaagtgaatgtggatacagcgccactcctgccccctcttggccccatccatggactcttgcctcggtgcagtctccactcttgacccccacctcctactgtcttgtctgtgggacagttgcctccccctcatctccagtgactcagcctacacaagggaggggaacattccatccccagtggagtctcttcctatgtggtcttctctacccctctaccccacattggccagtggactcatccattctttggaacaaatcccccccactccaaagtccatggattcaatggactcatccatttgtgaggaggacttctcgccctctggctggaagctgatacctgaagcactcccaggctcatcctgggagctttcctcagcaccttcaccttccctcccagtgtagcctcctgtcagtgggggctggacccttctaattcagaggtctcatgcctgcccttgcccagatgcccagggtcgtgcactctctgggataccagttcagtctccacatttctggttttctgtccccatagtacagttcttcagtggacatgaccccacccagccccctgcagccctgctgcaccatctcaccagacacaaggggaagaagcagacatcaggtgctgcactcacttctgccccctggggagttggggaaaggaacgaaccctggctggaggggataggagggcttttaatttatttctttttctgttgaggcttccccctctctgagccagttttcatttcttcctggtggcattagccactccctgcctctcactccagacctgttcccacaactggggaggtaggctgggagcaaaaggagagggtgggacccagttttgcgtggttggtttttattaattatctggataacagcaaaaaaactgaaaataaagagagagagaga

SEQ ID NO: 170 - DNA, 2234 bp, Homo sapiens
  source 1..2234: mol_type = unassigned DNA
ggaaaccagcaggcgttggggaggggtggcgggggaatagcggcggcagcagccccagccctcagagagacagcagaaagggagggagggagggtgctggggggacagccccccaccattcctaccgctatgggcccaacctcccactcccacctcccctccatcggccggggctaggacacccccaaatcccgtcgcccccttggcaccgacaccccgacagagacagagacacagccatccgccaccaccgctgccgcagcctggctggggagggggccagccccccaggccccctacccctctgaggtggccagaatggatttgtggccaggggcatggatgctgctgctgctgctcttcctgctgctgctcttcctgctgcccaccctgtggttctgcagccccagtgccaagtacttcttcaagatggccttctacaatggctggatcctcttcctggctgtgctcgccatccctgtgtgtgccgtgcgaggacgcaacgtcgagaacatgaagatcttgcgtctaatgctgctccacatcaaatacctgtacgggatccgagtggaggtgcgaggggctcaccacttccctccctcgcagccctatgttgttgtctccaaccaccagagctctctcgatctgcttgggatgatggaggtactgccaggccgctgtgtgcccattgccaagcgcgagctactgtgggctggctctgccgggctggcctgctggctggcaggagtcatcttcatcgaccggaagcgcacgggggatgccatcagtgtcatgtctgaggtcgcccagaccctgctcacccaggacgtgagggtctgggtgtttcctgagggaacgagaaaccacaatggctccatgctgcccttcaaacgtggcgccttccatcttgcagtgcaggcccaggttcccattgtccccatagtcatgtcctcctaccaagacttctactgcaagaaggagcgtcgcttcacctcgggacaatgtcaggtgcgggtgctgcccccagtgcccacggaagggctgacaccagatgacgtcccagctctggctgacagagtccggcactccatgctcactgttttccgggaaatctccactgatggccggggtggtggtgactatctgaagaagcctgggggcggtgggtgaaccctggctctgagctctcctcccatctgtccccatcttcctccccacacctacccacccagtgggccctgaagcagggccaaaccctcttccttgtctcccctctccccacttattctcctatttggaatcttcaacttctgaagtgaatgtggatacagcgccactcctgccccctcttggccccatccatggactcttgcctcggtgcagtctccactcttgacccccacctcctactgtcttgtctgtgggacagttgcctccccctcatctccagtgactcagcctacacaagggaggggaacattccatccccagtggagtctcttcctatgtggtcttctctacccctctaccccacattggccagtggactcatccattctttggaacaaatcccccccactccaaagtccatggattcaatggactcatccatttgtgaggaggacttctcgccctctggctggaagctgatacctgaagcactcccaggctcatcctgggagctttcctcagcaccttcaccttccctcccagtgtagcctcctgtcagtgggggctggacccttctaattcagaggtctcatgcctgcccttgcccagatgcccagggtcgtgcactctctgggataccagttcagtctccacatttctggttttctgtccccatagtacagttcttcagtggacatgaccccacccagccccctgcagccctgctgcaccatctcaccagacacaaggggaagaagcagacatcaggtgctgcactcacttctgccccctggggagttggggaaaggaacgaaccctggctggaggggataggagggcttttaatttatttctttttctgttgaggcttccccctctctgagccagttttcatttcttcctggtggcattagccactccctgcctctcactccagacctgttcccacaactggggaggtaggctgggagcaaaaggagagggtgggacccagttttgcgtggttggtttttattaattatctggataacagcaaaaaaactgaaaataaagagagagagaga

SEQ ID NO: 171 - DNA, 2496 bp, Homo sapiens
  source 1..2496: mol_type = unassigned DNA
ggcagatgaggattcaggaagcttgaggtttaggaaggaagatattgagagggaaaggtggaaatgaaggagagtgaagtgatggaatgatcctagtaaagggataatgggagtggaggaagagaagagggggtggaaaactagatacatggctaccaaattaaggaggcacgcgcattccagaggaatcggcattcttcctcactttttatttttctagaaagcacccctgaagccaaatttccattggaagaaaagatgtacccatattgtatgttgtgagaaggggttgtctcagcttgggcaagtaaggagactgatacgaaggaagtaggaaagaaaaggtacagaggtaaaagagcatggaaaaggaaagggtcagggataaggccaaagagatctcttctctttaaaggccagagaaggcaggtggaggggggagctggactgctgggagatagtgagggacaaagggcaaaggaaaccagaccagaggactggagagtgagatggagtgagatggagtcctggagagaaaaagaagagaggtgaacttaatgcttgtcatatggtggccagaatggatttgtggccaggggcatggatgctgctgctgctgctcttcctgctgctgctcttcctgctgcccaccctgtggttctgcagccccagtgccaagtacttcttcaagatggccttctacaatggctggatcctcttcctggctgtgctcgccatccctgtgtgtgccgtgcgaggacgcaacgtcgagaacatgaagatcttgcgtctaatgctgctccacatcaaatacctgtacgggatccgagtggaggtgcgaggggctcaccacttccctccctcgcagccctatgttgttgtctccaaccaccagagctctctcgatctgcttgggatgatggaggtactgccaggccgctgtgtgcccattgccaagcgcgagctactgtgggctggctctgccgggctggcctgctggctggcaggagtcatcttcatcgaccggaagcgcacgggggatgccatcagtgtcatgtctgaggtcgcccagaccctgctcacccaggacgtgagggtctgggtgtttcctgagggaacgagaaaccacaatggctccatgctgcccttcaaacgtggcgccttccatcttgcagtgcaggcccaggttcccattgtccccatagtcatgtcctcctaccaagacttctactgcaagaaggagcgtcgcttcacctcgggacaatgtcaggtgcgggtgctgcccccagtgcccacggaagggctgacaccagatgacgtcccagctctggctgacagagtccggcactccatgctcactgttttccgggaaatctccactgatggccggggtggtggtgactatctgaagaagcctgggggcggtgggtgaaccctggctctgagctctcctcccatctgtccccatcttcctccccacacctacccacccagtgggccctgaagcagggccaaaccctcttccttgtctcccctctccccacttattctcctctttggaatcttcaacttctgaagtgaatgtggatacagcgccactcctgccccctcttggccccatccatggactcttgcctcggtgcagtttccactcttgacccccacctcctactgtcttgtctgtgggacagttgcctccccctcatctccagtgactcagcctacacaagggaggggaacattccatccccagtggagtctcttcctatgtggtcttctctacccctctaccccacattggccagtggactcatccattctttggaacaaatcccccccactccaaagtccatggattcaatggactcatccatttgtgaggaggacttctcgccctctggctggaagctgatacctgaagcactcccaggctcatcctgggagctttcctcagcaccttcaccttccctcccagtgtagcctcctgtcagtgggggctggacccttctaattcagaggtctcatgcctgcccttgcccagatgcccagggtcgtgcactctctgggataccagttcagtctccacatttctggttttctgtccccatagtacagttcttcagtggacatgaccccacccagccccctgcagccctgctgcaccatctcaccagacacaaggggaagaagcagacatcaggtgctgcactcacttctgccccctggggagttggggaaaggaacgaaccctggctggaggggataggagggcttttaatttatttctttttctgttgaggcttccccctctctgagccagttttcatttcttcctggtggcattagccactccctgcctctcactccagacctgttcccacaactggggaggtaggctgggagcaaaaggagagggtgggacccagttttgcgtggttggtttttattaattatctggataacagcaaaaaaactgaaaataaagagagagagaga

SEQ ID NO: 172 - DNA, 2234 bp, Homo sapiens
  source 1..2234: mol_type = unassigned DNA
ggaaaccagcaggcgttggggaggggtggcgggggaatagcggcggcagcagccccagccctcagagagacagcagaaagggagggagggagggtgctggggggacagccccccaccattcctaccgctatgggcccaacctcccactcccacctcccctccatcggccggggctaggacacccccaaatcccgtcgcccccttggcaccgacaccccgacagagacagagacacagccatccgccaccaccgctgccgcagcctggctggggagggggccagccccccaggccccctacccctctgaggtggccagaatggatttgtggccaggggcatggatgctgctgctgctgctcttcctgctgctgctcttcctgctgcccaccctgtggttctgcagccccagtgccaagtacttcttcaagatggccttctacaatggctggatcctcttcctggctgtgctcgccatccctgtgtgtgccgtgcgaggacgcaacgtcgagaacatgaagatcttgcgtctaatgctgctccacatcaaatacctgtacgggatccgagtggaggtgcgaggggctcaccacttccctccctcgcagccctatgttgttgtctccaaccaccagagctctctcgatctgcttgggatgatggaggtactgccaggccgctgtgtgcccattgccaagcgcgagctactgtgggctggctctgccgggctggcctgctggctggcaggagtcatcttcatcgaccggaagcgcacgggggatgccatcagtgtcatgtctgaggtcgcccagaccctgctcacccaggacgtgagggtctgggtgtttcctgagggaacgagaaaccacaatggctccatgctgcccttcaaacgtggcgccttccatcttgcagtgcaggcccaggttcccattgtccccatagtcatgtcctcctaccaagacttctactgcaagaaggagcgtcgcttcacctcgggacaatgtcaggtgcgggtgctgcccccagtgcccacggaagggctgacaccagatgacgtcccagctctggctgacagagtccggcactccatgctcactgttttccgggaaatctccactgatggccggggtggtggtgactatctgaagaagcctgggggcggtgggtgaaccctggctctgagctctcctcccatctgtccccatcttcctccccacacctacccacccagtgggccctgaagcagggccaaaccctcttccttgtctcccctctccccacttattctcctctttggaatcttcaacttctgaagtgaatgtggatacagcgccactcctgccccctcttggccccatccatggactcttgcctcggtgcagtttccactcttgacccccacctcctactgtcttgtctgtgggacagttgcctccccctcatctccagtgactcagcctacacaagggaggggaacattccatccccagtggagtctcttcctatgtggtcttctctacccctctaccccacattggccagtggactcatccattctttggaacaaatcccccccactccaaagtccatggattcaatggactcatccatttgtgaggaggacttctcgccctctggctggaagctgatacctgaagcactcccaggctcatcctgggagctttcctcagcaccttcaccttccctcccagtgtagcctcctgtcagtgggggctggacccttctaattcagaggtctcatgcctgcccttgcccagatgcccagggtcgtgcactctctgggataccagttcagtctccacatttctggttttctgtccccatagtacagttcttcagtggacatgaccccacccagccccctgcagccctgctgcaccatctcaccagacacaaggggaagaagcagacatcaggtgctgcactcacttctgccccctggggagttggggaaaggaacgaaccctggctggaggggataggagggcttttaatttatttctttttctgttgaggcttccccctctctgagccagttttcatttcttcctggtggcattagccactccctgcctctcactccagacctgttcccacaactggggaggtaggctgggagcaaaaggagagggtgggacccagttttgcgtggttggtttttattaattatctggataacagcaaaaaaactgaaaataaagagagagagaga

SEQ ID NO: 173 - DNA, 2021 bp, Homo sapiens
  source 1..2021: mol_type = unassigned DNA
tcctcttttagagaatgtccggattgctattggactttggagcgtatggctccaaatcaactcattggctaaaacttgacggaaaatggtggttaggtggccagaatggatttgtggccaggggcatggatgctgctgctgctgctcttcctgctgctgctcttcctgctgcccaccctgtggttctgcagccccagtgccaagtacttcttcaagatggccttctacaatggctggatcctcttcctggctgtgctcgccatccctgtgtgtgccgtgcgaggacgcaacgtcgagaacatgaagatcttgcgtctaatgctgctccacatcaaatacctgtacgggatccgagtggaggtgcgaggggctcaccacttccctccctcgcagccctatgttgttgtctccaaccaccagagctctctcgatctgcttgggatgatggaggtactgccaggccgctgtgtgcccattgccaagcgcgagctactgtgggctggctctgccgggctggcctgctggctggcaggagtcatcttcatcgaccggaagcgcacgggggatgccatcagtgtcatgtctgaggtcgcccagaccctgctcacccaggacgtgagggtctgggtgtttcctgagggaacgagaaaccacaatggctccatgctgcccttcaaacgtggcgccttccatcttgcagtgcaggcccaggttcccattgtccccatagtcatgtcctcctaccaagacttctactgcaagaaggagcgtcgcttcacctcgggacaatgtcaggtgcgggtgctgcccccagtgcccacggaagggctgacaccagatgacgtcccagctctggctgacagagtccggcactccatgctcactgttttccgggaaatctccactgatggccggggtggtggtgactatctgaagaagcctgggggcggtgggtgaaccctggctctgagctctcctcccatctgtccccatcttcctccccacacctacccacccagtgggccctgaagcagggccaaaccctcttccttgtctcccctctccccacttattctcctctttggaatcttcaacttctgaagtgaatgtggatacagcgccactcctgccccctcttggccccatccatggactcttgcctcggtgcagtttccactcttgacccccacctcctactgtcttgtctgtgggacagttgcctccccctcatctccagtgactcagcctacacaagggaggggaacattccatccccagtggagtctcttcctatgtggtcttctctacccctctaccccacattggccagtggactcatccattctttggaacaaatcccccccactccaaagtccatggattcaatggactcatccatttgtgaggaggacttctcgccctctggctggaagctgatacctgaagcactcccaggctcatcctgggagctttcctcagcaccttcaccttccctcccagtgtagcctcctgtcagtgggggctggacccttctaattcagaggtctcatgcctgcccttgcccagatgcccagggtcgtgcactctctgggataccagttcagtctccacatttctggttttctgtccccatagtacagttcttcagtggacatgaccccacccagccccctgcagccctgctgcaccatctcaccagacacaaggggaagaagcagacatcaggtgctgcactcacttctgccccctggggagttggggaaaggaacgaaccctggctggaggggataggagggcttttaatttatttctttttctgttgaggcttccccctctctgagccagttttcatttcttcctggtggcattagccactccctgcctctcactccagacctgttcccacaactggggaggtaggctgggagcaaaaggagagggtgggacccagttttgcgtggttggtttttattaattatctggataacagcaaaaaaactgaaaataaagagagagagaga

SEQ ID NO: 174 - DNA, 2496 bp, Homo sapiens; identical to SEQ ID NO: 171
  source 1..2496: mol_type = unassigned DNA

SEQ ID NO: 175 - DNA, 2021 bp, Homo sapiens; identical to SEQ ID NO: 159
  source 1..2021: mol_type = unassigned DNA

SEQ ID NO: 176 - DNA, 2017 bp, Homo sapiens; identical to SEQ ID NO: 166
  source 1..2017: mol_type = unassigned DNA

SEQ ID NO: 177 - DNA, 2017 bp, Homo sapiens; identical to SEQ ID NO: 166
  source 1..2017: mol_type = unassigned DNA

SEQ ID NO: 178 - DNA, 2496 bp, Homo sapiens; identical to SEQ ID NO: 163
  source 1..2496: mol_type = unassigned DNA

SEQ ID NO: 179 - DNA, 2021 bp, Homo sapiens; identical to SEQ ID NO: 173
  source 1..2021: mol_type = unassigned DNA

SEQ ID NO: 180 - DNA, 2234 bp, Homo sapiens; identical to SEQ ID NO: 172
  source 1..2234: mol_type = unassigned DNA

SEQ ID NO: 181 - DNA, 2103 bp, Homo sapiens
  source 1..2103: mol_type = unassigned DNA
ctttcctctcccagggcaagtgctgttaggtcacctttactccattccctccttttttcacttggtgaggcctcacacactgtacctgcccacgcaaagtgtcactagaaggaagggaaagggtagtaggattcgtttgcctgtctggaggtaggattggtctttgtagctattccaggtggccagaatggatttgtggccaggggcatggatgctgctgctgctgctcttcctgctgctgctcttcctgctgcccaccctgtggttctgcagccccagtgccaagtacttcttcaagatggccttctacaatggctggatcctcttcctggctgtgctcgccatccctgtgtgtgccgtgcgaggacgcaacgtcgagaacatgaagatcttgcgtctaatgctgctccacatcaaatacctgtacgggatccgagtggaggtgcgaggggctcaccacttccctccctcgcagccctatgttgttgtctccaaccaccagagctctctcgatctgcttgggatgatggaggtactgccaggccgctgtgtgcccattgccaagcgcgagctactgtgggctggctctgccgggctggcctgctggctggcaggagtcatcttcatcgaccggaagcgcacgggggatgccatcagtgtcatgtctgaggtcgcccagaccctgctcacccaggacgtgagggtctgggtgtttcctgagggaacgagaaaccacaatggctccatgctgcccttcaaacgtggcgccttccatcttgcagtgcaggcccaggttcccattgtccccatagtcatgtcctcctaccaagacttctactgcaagaaggagcgtcgcttcacctcgggacaatgtcaggtgcgggtgctgcccccagtgcccacggaagggctgacaccagatgacgtcccagctctggctgacagagtccggcactccatgctcactgttttccgggaaatctccactgatggccggggtggtggtgactatctgaagaagcctgggggcggtgggtgaaccctggctctgagctctcctcccatctgtccccatcttcctccccacacctacccacccagtgggccctgaagcagggccaaaccctcttccttgtctcccctctccccacttattctcctctttggaatcttcaacttctgaagtgaatgtggatacagcgccactcctgccccctcttggccccatccatggactcttgcctcggtgcagtttccactcttgacccccacctcctactgtcttgtctgtgggacagttgcctccccctcatctccagtgactcagcctacacaagggaggggaacattccatccccagtggagtctcttcctatgtggtcttctctacccctctaccccacattggccagtggactcatccattctttggaacaaatcccccccactccaaagtccatggattcaatggactcatccatttgtgaggaggacttctcgccctctggctggaagctgatacctgaagcactcccaggctcatcctgggagctttcctcagcaccttcaccttccctcccagtgtagcctcctgtcagtgggggctggacccttctaattcagaggtctcatgcctgcccttgcccagatgcccagggtcgtgcactctctgggataccagttcagtctccacatttctggttttctgtccccatagtacagttcttcagtggacatgaccccacccagccccctgcagccctgctgcaccatctcaccagacacaaggggaagaagcagacatcaggtgctgcactcacttctgccccctggggagttggggaaaggaacgaaccctggctggaggggataggagggcttttaatttatttctttttctgttgaggcttccccctctctgagccagttttcatttcttcctggtggcattagccactccctgcctctcactccagacctgttcccacaactggggaggtaggctgggagcaaaaggagagggtgggacccagttttgcgtggttggtttttattaattatctggataacagcaaaaaaactgaaaataaagagagagagaga

SEQ ID NO: 182 - DNA, 2103 bp, Homo sapiens; identical to SEQ ID NO: 164
  source 1..2103: mol_type = unassigned DNA

SEQ ID NO: 183 - DNA, 2168 bp, Homo sapiens; identical to SEQ ID NO: 165
  source 1..2168: mol_type = unassigned DNA

SEQ ID NO: 184 - DNA, 2017 bp, Homo sapiens
  source 1..2017: mol_type = unassigned DNA
gaaatagggtcttcttcccaggttggaccccggggagtttgggcttttcctacaatcactgaccctcactgtgactaaaggagcagaattaggtggccagaatggatttgtggccaggggcatggatgctgctgctgctgctcttcctgctgctgctcttcctgctgcccaccctgtggttctgcagccccagtgccaagtacttcttcaagatggccttctacaatggctggatcctcttcctggctgtgctcgccatccctgtgtgtgccgtgcgaggacgcaacgtcgagaacatgaagatcttgcgtctaatgctgctccacatcaaatacctgtacgggatccgagtggaggtgcgaggggctcaccacttccctccctcgcagccctatgttgttgtctccaaccaccagagctctctcgatctgcttgggatgatggaggtactgccaggccgctgtgtgcccattgccaagcgcgagctactgtgggctggctctgccgggctggcctgctggctggcaggagtcatcttcatcgaccggaagcgcacgggggatgccatcagtgtcatgtctgaggtcgcccagaccctgctcacccaggacgtgagggtctgggtgtttcctgagggaacgagaaaccacaatggctccatgctgcccttcaaacgtggcgccttccatcttgcagtgcaggcccaggttcccattgtccccatagtcatgtcctcctaccaagacttctactgcaagaaggagcgtcgcttcacctcgggacaatgtcaggtgcgggtgctgcccccagtgcccacggaagggctgacaccagatgacgtcccagctctggctgacagagtccggcactccatgctcactgttttccgggaaatctccactgatggccggggtggtggtgactatctgaagaagcctgggggcggtgggtgaaccctggctctgagctctcctcccatctgtccccatcttcctccccacacctacccacccagtgggccctgaagcagggccaaaccctcttccttgtctcccctctccccacttattctcctctttggaatcttcaacttctgaagtgaatgtggatacagcgccactcctgccccctcttggccccatccatggactcttgcctcggtgcagtttccactcttgacccccacctcctactgtcttgtctgtgggacagttgcctccccctcatctccagtgactcagcctacacaagggaggggaacattccatccccagtggagtctcttcctatgtggtcttctctacccctctaccccacattggccagtggactcatccattctttggaacaaatcccccccactccaaagtccatggattcaatggactcatccatttgtgaggaggacttctcgccctctggctggaagctgatacctgaagcactcccaggctcatcctgggagctttcctcagcaccttcaccttccctcccagtgtagcctcctgtcagtgggggctggacccttctaattcagaggtctcatgcctgcccttgcccagatgcccagggtcgtgcactctctgggataccagttcagtctccacatttctggttttctgtccccatagtacagttcttcagtggacatgaccccacccagccccctgcagccctgctgcaccatctcaccagacacaaggggaagaagcagacatcaggtgctgcactcacttctgccccctggggagttggggaaaggaacgaaccctggctggaggggataggagggcttttaatttatttctttttctgttgaggcttccccctctctgagccagttttcatttcttcctggtggcattagccactccctgcctctcactccagacctgttcccacaactggggaggtaggctgggagcaaaaggagagggtgggacccagttttgcgtggttggtttttattaattatctggataacagcaaaaaaactgaaaataaagagagagagaga

SEQ ID NO: 185 - DNA, 2168 bp, Homo sapiens
  source 1..2168: mol_type = unassigned DNA
tggccgacatcgggaaagacggcgaagagctaggaaaagagggaaaacactagggtcgcagggttcaaaatggctccaacctcctttggtgacgtagagagcagaacttgggtctgcccctcccttttagttaagggagcagaactgggattagcccgacgtttggatagtgggaacatcgatctgcggcgctggtgttaacccaactcattcggctggacgactcagccctccccatattaggtggccagaatggatttgtggccaggggcatggatgctgctgctgctgctcttcctgctgctgctcttcctgctgcccaccctgtggttctgcagccccagtgccaagtacttcttcaagatggccttctacaatggctggatcctcttcctggctgtgctcgccatccctgtgtgtgccgtgcgaggacgcaacgtcgagaacatgaagatcttgcgtctaatgctgctccacatcaaatacctgtacgggatccgagtggaggtgcgaggggctcaccacttccctccctcgcagccctatgttgttgtctccaaccaccagagctctctcgatctgcttgggatgatggaggtactgccaggccgctgtgtgcccattgccaagcgcgagctactgtgggctggctctgccgggctggcctgctggctggcaggagtcatcttcatcgaccggaagcgcacgggggatgccatcagtgtcatgtctgaggtcgcccagaccctgctcacccaggacgtgagggtctgggtgtttcctgagggaacgagaaaccacaatggctccatgctgcccttcaaacgtggcgccttccatcttgcagtgcaggcccaggttcccattgtccccatagtcatgtcctcctaccaagacttctactgcaagaaggagcgtcgcttcacctcgggacaatgtcaggtgcgggtgctgcccccagtgcccacggaagggctgacaccagatgacgtcccagctctggctgacagagtccggcactccatgctcactgttttccgggaaatctccactgatggccggggtggtggtgactatctgaagaagcctgggggcggtgggtgaaccctggctctgagctctcctcccatctgtccccatcttcctccccacacctacccacccagtgggccctgaagcagggccaaaccctcttccttgtctcccctctccccacttattctcctctttggaatcttcaacttctgaagtgaatgtggatacagcgccactcctgccccctcttggccccatccatggactcttgcctcggtgcagtttccactcttgacccccacctcctactgtcttgtctgtgggacagttgcctccccctcatctccagtgactcagcctacacaagggaggggaacattccatccccagtggagtctcttcctatgtggtcttctctacccctctaccccacattggccagtggactcatccattctttggaacaaatcccccccactccaaagtccatggattcaatggactcatccatttgtgaggaggacttctcgccctctggctggaagctgatacctgaagcactcccaggctcatcctgggagctttcctcagcaccttcaccttccctcccagtgtagcctcctgtcagtgggggctggacccttctaattcagaggtctcatgcctgcccttgcccagatgcccagggtcgtgcactctctgggataccagttcagtctccacatttctggttttctgtccccatagtacagttcttcagtggacatgaccccacccagccccctgcagccctgctgcaccatctcaccagacacaaggggaagaagcagacatcaggtgctgcactcacttctgccccctggggagttggggaaaggaacgaaccctggctggaggggataggagggcttttaatttatttctttttctgttgaggcttccccctctctgagccagttttcatttcttcctggtggcattagccactccctgcctctcactccagacctgttcccacaactggggaggtaggctgggagcaaaaggagagggtgggacccagttttgcgtggttggtttttattaattatctggataacagcaaaaaaactgaaaataaagagagagagaga

SEQ ID NO: 186 - DNA, 2496 bp, Homo sapiens
  source 1..2496: mol_type = unassigned DNA
ggcagatgaggattcaggaagcttgaggtttaggaaggaagatattgagagggaaaggtggaaatgaaggagagtgaagtgatggaatgatcctagtaaagggataatgggagtggaggaagagaagagggggtggaaaactagatacatggctaccaaattaaggaggcacgcgcattccagaggaatcggcattcttcctcactttttatttttctagaaagcacccctgaagccaaatttccattggaagaaaagatgtacccatattgtatgttgtgagaaggggttgtctcagcttgggcaagtaaggagactgatacgaaggaagtaggaaagaaaaggtacagaggtaaaagagcatggaaaaggaaagggtcagggataaggccaaagagatctcttctctttaaaggccagagaaggcaggtggaggggggagctggactgctgggagatagtgagggacaaagggcaaaggaaaccagaccagaggactggagagtgagatggagtgagatggagtcctggagagaaaaagaagagaggtgaacttaatgcttgtcatatggtggccagaatggatttgtggccaggggcatggatgctgctgctgctgctcttcctgctgctgctcttcctgctgcccaccctgtggttctgcagccccagtgccaagtacttcttcaagatggccttctacaatggctggatcctcttcctggctgtgctcgccatccctgtgtgtgccgtgcgaggacgcaacgtcgagaacatgaagatcttgcgtctaatgctgctccacatcaaatacctgtacgggatccgagtggaggtgcgaggggctcaccacttccctccctcgcagccctatgttgttgtctccaaccaccagagctctctcgatctgcttgggatgatggaggtactgccaggccgctgtgtgcccattgccaagcgcgagctactgtgggctggctctgccgggctggcctgctggctggcaggagtcatcttcatcgaccggaagcgcacgggggatgccatcagtgtcatgtctgaggtcgcccagaccctgctcacccaggacgtgagggtctgggtgtttcctgagggaacgagaaaccacaatggctccatgctgcccttcaaacgtggcgccttccatcttgcagtgcaggcccaggttcccattgtccccatagtcatgtcctcctaccaagacttctactgcaagaaggagcgtcgcttcacctcgggacaatgtcaggtgcgggtgctgcccccagtgcccacggaagggctgacaccagatgacgtcccagctctggctgacagagtccggcactccatgctcactgttttccgggaaatctccactgatggccggggtggtggtgactatctgaagaagcctgggggcggtgggtgaaccctggctctgagctctcctcccatctgtccccatcttcctccccacacctacccacccagtgggccctgaagcagggccaaaccctcttccttgtctcccctctccccacttattctcctatttggaatcttcaacttctgaagtgaatgtggatacagcgccactcctgccccctcttggccccatccatggactcttgcctcggtgcagtctccactcttgacccccacctcctactgtcttgtctgtgggacagttgcctccccctcatctccagtgactcagcctacacaagggaggggaacattccatccccagtggagtctcttcctatgtggtcttctctacccctctaccccacattggccagtggactcatccattctttggaacaaatcccccccactccaaagtccatggattcaatggactcatccatttgtgaggaggacttctcgccctctggctggaagctgatacctgaagcactcccaggctcatcctgggagctttcctcagcaccttcaccttccctcccagtgtagcctcctgtcagtgggggctggacccttctaattcagaggtctcatgcctgcccttgcccagatgcccagggtcgtgcactctctgggataccagttcagtctccacatttctggttttctgtccccatagtacagttcttcagtggacatgaccccacccagccccctgcagccctgctgcaccatctcaccagacacaaggggaagaagcagacatcaggtgctgcactcacttctgccccctggggagttggggaaaggaacgaaccctggctggaggggataggagggcttttaatttatttctttttctgttgaggcttccccctctctgagccagttttcatttcttcctggtggcattagccactccctgcctctcactccagacctgttcccacaactggggaggtaggctgggagcaaaaggagagggtgggacccagttttgcgtggttggtttttattaattatctggataacagcaaaaaaactgaaaataaagagagagagaga

SEQ ID NO: 187 - DNA, 2168 bp, Homo sapiens; identical to SEQ ID NO: 165
  source 1..2168: mol_type = unassigned DNA

SEQ ID NO: 188 - DNA, 2234 bp, Homo sapiens; identical to SEQ ID NO: 167
  source 1..2234: mol_type = unassigned DNA

SEQ ID NO: 189 - DNA, 2021 bp, Homo sapiens; identical to SEQ ID NO: 159
  source 1..2021: mol_type = unassigned DNA

SEQ ID NO: 190 - DNA, 2496 bp, Homo sapiens; identical to SEQ ID NO: 163
  source 1..2496: mol_type = unassigned DNA

SEQ ID NO: 191 - DNA, 2168 bp, Homo sapiens; identical to SEQ ID NO: 185
  source 1..2168: mol_type = unassigned DNA

SEQ ID NO: 192 - DNA, 2103 bp, Homo sapiens; identical to SEQ ID NO: 181
  source 1..2103: mol_type = unassigned DNA

SEQ ID NO: 193 - DNA, 2234 bp, Homo sapiens; identical to SEQ ID NO: 167
  source 1..2234: mol_type = unassigned DNA

SEQ ID NO: 194 - DNA, 2168 bp, Homo sapiens
  source 1..2168: mol_type = unassigned DNA
tggccgacatcgggaaagacggcgaagagctaggaaaagagggaaaacactagggtcgcagggttcaaaatggctccaacctcctttggtgacgtagagagcagaacttgggtctgcccctcccttttagttaagggagcagaactgggattagcccgacgtttggatagtgggaacatcgatctgcggcgctggtgttaacccaactcattcggctggacgactcagccctccccatattaggtggccagaatggatttgtggccaggggcatggatgctgctgctgctgctcttcctgctgctgctcttcctgctgcccaccctgtggttctgcagccccagtgccaagtacttcttcaagatggccttctacaatggctggatcctcttcctggctgtgctcgccatccctgtgtgtgccgtgcgaggacgcaacgtcgagaacatgaagatcttgcgtctaatgctgctccacatcaaatacctgtacgggatccgagtggaggtgcgaggggctcaccacttccctccctcgcagccctatgttgttgtctccaaccaccagagctctctcgatctgcttgggatgatggaggtactgccaggccgctgtgtgcccattgccaagcgcgagctactgtgggctggctctgccgggctggcctgctggctggcaggagtcatcttcatcgaccggaagcgcacgggggatgccatcagtgtcatgtctgaggtcgcccagaccctgctcacccaggacgtgagggtctgggtgtttcctgagggaacgagaaaccacaatggctccatgctgcccttcaaacgtggcgccttccatcttgcagtgcaggcccaggttcccattgtccccatagtcatgtcctcctaccaagacttctactgcaagaaggagcgtcgcttcacctcgggacaatgtcaggtgcgggtgctgcccccagtgcccacggaagggctgacaccagatgacgtcccagctctggctgacagagtccggcactccatgctcactgttttccgggaaatctccactgatggccggggtggtggtgactatctgaagaagcctgggggcggtgggtgaaccctggctctgagctctcctcccatctgtccccatcttcctccccacacctacccacccagtgggccctgaagcagggccaaaccctcttccttgtctcccctctccccacttattctcctatttggaatcttcaacttctgaagtgaatgtggatacagcgccactcctgccccctcttggccccatccatggactcttgcctcggtgcagtctccactcttgacccccacctcctactgtcttgtctgtgggacagttgcctccccctcatctccagtgactcagcctacacaagggaggggaacattccatccccagtggagtctcttcctatgtggtcttctctacccctctaccccacattggccagtggactcatccattctttggaacaaatcccccccactccaaagtccatggattcaatggactcatccatttgtgaggaggacttctcgccctctggctggaagctgatacctgaagcactcccaggctcatcctgggagctttcctcagcaccttcaccttccctcccagtgtagcctcctgtcagtgggggctggacccttctaattcagaggtctcatgcctgcccttgcccagatgcccagggtcgtgcactctctgggataccagttcagtctccacatttctggttttctgtccccatagtacagttcttcagtggacatgaccccacccagccccctgcagccctgctgcaccatctcaccagacacaaggggaagaagcagacatcaggtgctgcactcacttctgccccctggggagttggggaaaggaacgaaccctggctggaggggataggagggcttttaatttatttctttttctgttgaggcttccccctctctgagccagttttcatttcttcctggtggcattagccactccctgcctctcactccagacctgttcccacaactggggaggtaggctgggagcaaaaggagagggtgggacccagttttgcgtggttggtttttattaattatctggataacagcaaaaaaactgaaaataaagagagagagaga

SEQ ID NO: 195 - DNA, 2017 bp, Homo sapiens; identical to SEQ ID NO: 184
  source 1..2017: mol_type = unassigned DNA

SEQ ID NO: 196 - DNA, 2017 bp, Homo sapiens
  source 1..2017: mol_type = unassigned DNA
gaaatagggtcttcttcccaggttggaccccggggagtttgggcttttcctacaatcactgaccctcactgtgactaaaggagcagaattaggtggccagaatggatttgtggccaggggcatggatgctgctgctgctgctcttcctgctgctgctcttcctgctgcccaccctgtggttctgcagccccagtgccaagtacttcttcaagatggccttctacaatggctggatcctcttcctggctgtgctcgccatccctgtgtgtgccgtgcgaggacgcaacgtcgagaacatgaagatcttgcgtctaatgctgctccacatcaaatacctgtacgggatccgagtggaggtgcgaggggctcaccacttccctccctcgcagccctatgttgttgtctccaaccaccagagctctctcgatctgcttgggatgatggaggtactgccaggccgctgtgtgcccattgccaagcgcgagctactgtgggctggctctgccgggctggcctgctggctggcaggagtcatcttcatcgaccggaagcgcacgggggatgccatcagtgtcatgtctgaggtcgcccagaccctgctcacccaggacgtgagggtctgggtgtttcctgagggaacgagaaaccacaatggctccatgctgcccttcaaacgtggcgccttccatcttgcagtgcaggcccaggttcccattgtccccatagtcatgtcctcctaccaagacttctactgcaagaaggagcgtcgcttcacctcgggacaatgtcaggtgcgggtgctgcccccagtgcccacggaagggctgacaccagatgacgtcccagctctggctgacagagtccggcactccatgctcactgttttccgggaaatctccactgatggccggggtggtggtgactatctgaagaagcctgggggcggtgggtgaaccctggctctgagctctcctcccatctgtccccatcttcctccccacacctacccacccagtgggccctgaagcagggccaaaccctcttccttgtctcccctctccccacttattctcctatttggaatcttcaacttctgaagtgaatgtggatacagcgccactcctgccccctcttggccccatccatggactcttgcctcggtgcagtctccactcttgacccccacctcctactgtcttgtctgtgggacagttgcctccccctcatctccagtgactcagcctacacaagggaggggaacattccatccccagtggagtctcttcctatgtggtcttctctacccctctaccccacattggccagtggactcatccattctttggaacaaatcccccccactccaaagtccatggattcaatggactcatccatttgtgaggaggacttctcgccctctggctggaagctgatacctgaagcactcccaggctcatcctgggagctttcctcagcaccttcaccttccctcccagtgtagcctcctgtcagtgggggctggacccttctaattcagaggtctcatgcctgcccttgcccagatgcccagggtcgtgcactctctgggataccagttcagtctccacatttctggttttctgtccccatagtacagttcttcagtggacatgaccccacccagccccctgcagccctgctgcaccatctcaccagacacaaggggaagaagcagacatcaggtgctgcactcacttctgccccctggggagttggggaaaggaacgaaccctggctggaggggataggagggcttttaatttatttctttttctgttgaggcttccccctctctgagccagttttcatttcttcctggtggcattagccactccctgcctctcactccagacctgttcccacaactggggaggtaggctgggagcaaaaggagagggtgggacccagttttgcgtggttggtttttattaattatctggataacagcaaaaaaactgaaaataaagagagagagaga

SEQ ID NO: 197 - DNA, 2021 bp, Homo sapiens
  source 1..2021: mol_type = unassigned DNA
tcctcttttagagaatgtccggattgctattggactttggagcgtatggctccaaatcaactcattggctaaaacttgacggaaaatggtggttaggtggccagaatggatttgtggccaggggcatggatgctgctgctgctgctcttcctgctgctgctcttcctgctgcccaccctgtggttctgcagccccagtgccaagtacttcttcaagatggccttctacaatggctggatcctcttcctggctgtgctcgccatccctgtgtgtgccgtgcgaggacgcaacgtcgagaacatgaagatcttgcgtctaatgctgctccacatcaaatacctgtacgggatccgagtggaggtgcgaggggctcaccacttccctccctcgcagccctatgttgttgtctccaaccaccagagctctctcgatctgcttgggatgatggaggtactgccaggccgctgtgtgcccattgccaagcgcgagctactgtgggctggctctgccgggctggcctgctggctggcaggagtcatcttcatcgaccggaagcgcacgggggatgccatcagtgtcatgtctgaggtcgcccagaccctgctcacccaggacgtgagggtctgggtgtttcctgagggaacgagaaaccacaatggctccatgctgcccttcaaacgtggcgccttccatcttgcagtgcaggcccaggttcccattgtccccatagtcatgtcctcctaccaagacttctactgcaagaaggagcgtcgcttcacctcgggacaatgtcaggtgcgggtgctgcccccagtgcccacggaagggctgacaccagatgacgtcccagctctggctgacagagtccggcactccatgctcactgttttccgggaaatctccactgatggccggggtggtggtgactatctgaagaagcctgggggcggtgggtgaaccctggctctgagctctcctcccatctgtccccatcttcctccccacacctacccacccagtgggccctgaagcagggccaaaccctcttccttgtctcccctctccccacttattctcctatttggaatcttcaacttctgaagtgaatgtggatacagcgccactcctgccccctcttggccccatccatggactcttgcctcggtgcagtctccactcttgacccccacctcctactgtcttgtctgtgggacagttgcctccccctcatctccagtgactcagcctacacaagggaggggaacattccatccccagtggagtctcttcctatgtggtcttctctacccctctaccccacattggccagtggactcatccattctttggaacaaatcccccccactccaaagtccatggattcaatggactcatccatttgtgaggaggacttctcgccctctggctggaagctgatacctgaagcactcccaggctcatcctgggagctttcctcagcaccttcaccttccctcccagtgtagcctcctgtcagtgggggctggacccttctaattcagaggtctcatgcctgcccttgcccagatgcccagggtcgtgcactctctgggataccagttcagtctccacatttctggttttctgtccccatagtacagttcttcagtggacatgaccccacccagccccctgcagccctgctgcaccatctcaccagacacaaggggaagaagcagacatcaggtgctgcactcacttctgccccctggggagttggggaaaggaacgaaccctggctggaggggataggagggcttttaatttatttctttttctgttgaggcttccccctctctgagccagttttcatttcttcctggtggcattagccactccctgcctctcactccagacctgttcccacaactggggaggtaggctgggagcaaaaggagagggtgggacccagttttgcgtggttggtttttattaattatctggataacagcaaaaaaactgaaaataaagagagagagaga

SEQ ID NO: 198 - DNA, 2103 bp, Homo sapiens; identical to SEQ ID NO: 164
  source 1..2103: mol_type = unassigned DNA

SEQ ID NO: 199 - DNA, 276 bp, Homo sapiens
  source 1..276: mol_type = unassigned DNA
cactctgcctccaccccgatcctcacccactcccaccctgcccaagggatgatggaggtactgccaggccgctgtgtgcccattgccaagcgcgagctactgtgggctggctctgccgggctggcctgctggctggcaggagtcatcttcatcgaccggaagcgcacgggggatgccatcagtgtcatgtctgaggtcgcccagaccctgctcacccaggacgtgagtcatcctggacttctactgcaagaaggagcgtcgcttcacctcgggtga

SEQ ID NO: 200 - DNA, 276 bp, Homo sapiens; identical to SEQ ID NO: 199
  source 1..276: mol_type = unassigned DNA

SEQ ID NO: 201 - DNA, 276 bp, Homo sapiens; identical to SEQ ID NO: 199
  source 1..276: mol_type = unassigned DNA

SEQ ID NO: 202 - DNA, 991 bp, Homo sapiens; identical to SEQ ID NO: 168
  source 1..991: mol_type = unassigned DNA

SEQ ID NO: 203 - DNA, 991 bp, Homo sapiens; identical to SEQ ID NO: 168
  source 1..991: mol_type = unassigned DNA

SEQ ID NO: 204 - DNA, 276 bp, Homo sapiens; identical to SEQ ID NO: 199
  source 1..276: mol_type = unassigned DNA

SEQ ID NO: 205 - DNA, 276 bp, Homo sapiens; identical to SEQ ID NO: 199
  source 1..276: mol_type = unassigned DNA

SEQ ID NO: 206 - DNA, 276 bp, Homo sapiens; identical to SEQ ID NO: 199
  source 1..276: mol_type = unassigned DNA

SEQ ID NO: 207 - DNA, 991 bp, Homo sapiens; identical to SEQ ID NO: 168
  source 1..991: mol_type = unassigned DNA

SEQ ID NO: 208 - DNA, 991 bp, Homo sapiens; identical to SEQ ID NO: 168
  source 1..991: mol_type = unassigned DNA

SEQ ID NO: 209 - DNA, 276 bp, Homo sapiens; identical to SEQ ID NO: 199
  source 1..276: mol_type = unassigned DNA

SEQ ID NO: 210 - DNA, 991 bp, Homo sapiens; identical to SEQ ID NO: 168
  source 1..991: mol_type = unassigned DNA

SEQ ID NO: 211 - DNA, 991 bp, Homo sapiens; identical to SEQ ID NO: 168
  source 1..991: mol_type = unassigned DNA

SEQ ID NO: 212 - DNA, 1391 bp, Homo sapiens
  source 1..1391: mol_type = unassigned DNA
cgggagcgagctggcggcgccgtcgggcgccgggccgggccatggagctgtggccgtgtctggccgcggcgctgctgttgctgctgctgctggtgcagctgagccgcgcggccgagttctacgccaaggtcgccctgtactgcgcgctgtgcttcacggtgtccgccgtggcctcgctcgtctgcctgctgcgccacggcggccggacggtggagaacatgagcatcatcggctggttcgtgcgaagcttcaagtacttttacgggctccgcttcgaggtgcgggacccgcgcaggctgcaggaggcccgtccctgtgtcatcgtctccaaccaccagagcatcctggacatgatgggcctcatggaggtccttccggagcgctgcgtgcagatcgccaagcgggagctgctcttcctggggcccgtgggcctcatcatgtacctcgggggcgtcttcttcatcaaccggcagcgctctagcactgccatgacagtgatggccgacctgggcgagcgcatggtcagggagaacgtgcccatcgtccccgtggtgtactcttccttctcctccttctacaacaccaagaagaagttcttcacttcaggaacagtcacagtgcaggtgctggaagccatccccaccagcggcctcactgcggcggacgtccctgcgctcgtggacacctgccaccgggccatgaggaccaccttcctccacatctccaagaccccccaggagaacggggccactgcggggtctggcgtgcagccggcccagtagcccagaccacggcagggcatgacctggggagggcaggtggaagccgatggctggaggatgggcagaggggactcctcccggcttccaaataccactctgtccggctcccccagctctcactcagcccgggaagcaggaagccccttctgtcactggcctcagacacaggcccctggtgtcccctgcagggggctcagctggaccctccccgggctcgagggcagggactcgcgcccacggcacctctgggagctgggatgataaagatgaggcttgcggctgtggcccgctggtgggctgagccacaaggcccccgatggcccaggagcagatgggaggaccccgaggccagacgcacactgtccgagccctctgctcagccgcctgggacccaccagggtgcagctgggctccagggtccagcccacaagctgcatcaggctctctgggagaggaggggcctggagggccaggagtcccagactcacgcaccctgggccacagggagccgggaatcggggcctgctgctcctgctggcctggaagactctgtggggtcagcactgtactccgttgctgtttttttataaacacactcttggaagtggc

SEQ ID NO: 213 - DNA, 1512 bp, Homo sapiens
  source 1..1512: mol_type = unassigned DNA
cgcgggggagaagcgggagcgggagcgggagcgagctggcggcgccgtcgggcgccgggccgggccatggagctgtggccgtgtctggccgcggcgctgctgttgctgctgctgctggtgcagctgagccgcgcggccgagttctacgccaaggtcgccctgtactgcgcgctgtgcttcacggtgtccgccgtggcctcgctcgtctgcctgctgcgccacggcggccggacggtggagaacatgagcatcatcggctggttcgtgcgaagcttcaagtacttttacgggctccgcttcgaggtgcgggacccgcgcaggctgcaggaggcccgtccctgtgtcatcgtctccaaccaccagagcatcctggacatgatgggcctcatggaggtccttccggagcgctgcgtgcagatcgccaagcgggagctgctcttcctggggcccgtgggcctcatcatgtacctcgggggcgtcttcttcatcaaccggcagcgctctagcactgccatgacagtgatggccgacctgggcgagcgcatggtcagggagaacctcaaagtgtggatctatcccgagggtactcgcaacgacaatggggacctgctgccttttaagaagggcgccttctacctggcagtccaggcacaggtgcccatcgtccccgtggtgtactcttccttctcctccttctacaacaccaagaagaagttcttcacttcaggaacagtcacagtgcaggtgctggaagccatccccaccagcggcctcactgcggcggacgtccctgcgctcgtggacacctgccaccgggccatgaggaccaccttcctccacatctccaagaccccccaggagaacggggccactgcggggtctggcgtgcagccggcccagtagcccagaccacggcagggcatgacctggggagggcaggtggaagccgatggctggaggatgggcagaggggactcctcccggcttccaaataccactctgtccggctcccccagctctcactcagcccgggaagcaggaagccccttctgtcactggcctcagacacaggcccctggtgtcccctgcagggggctcagctggaccctccccgggctcgagggcagggactcgcgcccacggcacctctgggagctgggatgataaagatgaggcttgcggctgtggcccgctggtgggctgagccacaaggcccccgatggcccaggagcagatgggaggaccccgaggccagacgcacactgtccgagccctctgctcagccgcctgggacccaccagggtgcagctgggctccagggtccagcccacaagctgcatcaggctctctgggagaggaggggcctggagggccaggagtcccagactcacgcaccctgggccacagggagccgggaatcggggcctgctgctcctgctggcctggaagactctgtggggtcagcactgtactccgttgctgtttttttataaacacactcttggaagtggc

SEQ ID NO: 214 - DNA, 1357 bp, Homo sapiens
  source 1..1357: mol_type = unassigned DNA
ggagcgagctggcggcgccgtcgggcgccgggccgggccatggagctgtggccgtgtctggccgcggcgctgctgttgctgctgctgctggtgcagctgagccgcgcggccgagttctacgccaaggtcgccctgtactgcgcgctgtgcttcacggtgtccgccgtggcctcgctcgtctgcctgctgcgccacggcggccggacggtggagaacatgagcatcatcggctggttcgtgcgaagcttcaagtacttttacgggctccgcttcgaggtgcgggacccgcgcaggctgcaggaggcccgtccctgtgtcatcgtctccaaccaccagagcatcctggacatgatgggcctcatggaggtccttccggagcgctgcgtgcagatcgccaagcgggagctgctcttcctggggcccgtgggcctcatcatgtacctcgggggcgtcttcttcatcaaccggcagcgctctagcactgccatgacagtgatggccgacctgggcgagcgcatggtcagggagaacctcaaagtgtggatctatcccgagggtactcgcaacgacaatggggacctgctgccttttaagaagggcgccttctacctggcagtccaggcacaggtgcccatcgtccccgtggtgtactcttccttctcctccttctacaacaccaagaagaagttcttcacttcaggaacagtcacagtgcaggtgctggaagccatccccaccagcggcctcactgcggcggacgtccctgcgctcgtggacacctgccaccgggccatgaggaccaccttcctccacatctccaagaccccccaggagaacggggccactgcggggtctggcgtgcagccggcccagtagcccagaccacggcagggcatgacctggggagggcaggtggaagccgatggctggaggatgggcagaggggactcctcccggcttccaaataccactctgtccggctcccccagctctcactcagcccgggaagcaggaagccccttctgtcactggcctcagacacaggcccctggtgtcccctgcagggggctcagctggaccctccccgggctcgagggcagggactcgcgcccacggcacctctgggagctgggatgataaagatgaggcttgcggctgtggcccgctggtgggctgagccacaaggcccccgatggcccaggagcagatgggaggaccccgaggccaggagtcccagactcacgcaccctgggccacagggagccgggaatcggggcctgctgctcctgctggcctggaagactctgtggggtcagcactgtactccgttgctgtttttttataaacacactcttgg

SEQ ID NO: 215 - DNA, 6298 bp, Homo sapiens
  source 1..6298: mol_type = unassigned DNA
gcagcttgggcccgcggcggcggcaagggcgggagggagcggtcgccgcgggatttggagctgcctagcctcgcggtcgctttggcagcatgtaagcagctgtttgccaagaacccaggtcactgctaagaaagggtgccttcgggagaagagtgtccagaggataccaatgccagatgcatctggagttacactcagcactcgcagtatgagacattgtgtgccagcatctctttccttctggcaaagactgtagctctccaggtaggaggatcctggaagctgtgagcaccaggagccttgccagaggaggatggggccagatatgaactctctaccatgaacatggttctcggcttatgaaggaattttaagtaaaacagttatttaatttccacatattcaagtcaaaagccttctgtgtgaagtgccagtgattacccctccacaggagttatcaggatttttctggcaccaagtttaattcttcttcgtacttctggtagtgacagatctgcaggacagatttatctgttgaatgctcttgggcaggaaaaccatgtaaaacctctggaagcagcatcaggacagcagagcagagcccccgtcctcactgctcacttgcacagaaactccatctggactcggatgcttttactgaagacccatctagcttcaatcatctttagagtccatccattctggagagacctggcgtttgcagttgcctcctgtggccgtgtttttctgtcattctgttcccaggccttctattcaggcggttgaagggtgtggactttggaatggggtttgctgttcttcgggaacttgcttcctttccctggctggtgctgtcaggaaggaccatctgaaggctgcaatttgttcttagggaggcaggtgctggcctggcctggatcttccaccatgttcctgttgctgccttttgatagcctgattgtcaaccttctgggcatctccctgactgtcctcttcaccctccttctcgttttcatcatagtgccagccatttttggagtctcctttggtatccgcaaactctacatgaaaagtctgttaaaaatctttgcgtgggctaccttgagaatggagcgaggagccaaggagaagaaccaccagctttacaagccctacaccaacggaatcattgcaaaggatcccacttcactagaagaagagatcaaagagattcgtcgaagtggtagtagtaaggctctggacaacactccagagttcgagctctctgacattttctacttttgccggaaaggaatggagaccattatggatgatgaggtgacaaagagattctcagcagaagaactggagtcctggaacctgctgagcagaaccaattataacttccagtacatcagccttcggctcacggtcctgtgggggttaggagtgctgattcggtactgctttctgctgccgctcaggatagcactggctttcacagggattagccttctggtggtgggcacaactgtggtgggatacttgccaaatgggaggtttaaggagttcatgagtaaacatgttcacttaatgtgttaccggatctgcgtgcgagcgctgacagccatcatcacctaccatgacagggaaaacagaccaagaaatggtggcatctgtgtggccaatcatacctcaccgatcgatgtgatcatcttggccagcgatggctattatgccatggtgggtcaagtgcacgggggactcatgggtgtgattcagagagccatggtgaaggcctgcccacacgtctggtttgagcgctcggaagtgaaggatcgccacctggtggctaagagactgactgaacatgtgcaagataaaagcaagctgcctatcctcatcttcccagaaggaacctgcatcaataatacatcggtgatgatgttcaaaaagggaagttttgaaattggagccacagtttaccctgttgctatcaagtatgaccctcaatttggcgatgccttctggaacagcagcaaatacgggatggtgacgtacctgctgcgaatgatgaccagctgggccattgtctgcagcgtgtggtacctgcctcccatgactagagaggcagatgaagatgctgtccagtttgcgaatagggtgaaatctgccattgccaggcagggaggacttgtggacctgctgtgggatgggggcctgaagagggagaaggtgaaggacacgttcaaggaggagcagcagaagctgtacagcaagatgatcgtggggaaccacaaggacaggagccgctcctgagcctgcctccagctggctggggccaccgtgcggggtgccaacgggctcagagctggagttgccgccgccgcccccactgctgtgtcctttccagactccagggctccccgggctgctctggatcccaggactccggctttcgccgagccgcagcgggatccctgtgcacccggcgcagcctacccttggtggtctaaacggatgctgctgggtgttgcgacccaggacgagatgccttgtttcttttacaataagtcgttggaggaatgccattaaagtgaactccccacctttgcacgctgtgcgggctgagtggttggggagatgtggccatggtcttgtgctagagatggcggtacaagagtctgttatgcaagcccgtgtgccagggatgtgctgggggcggccacccgctctccaggaaaggcacagctgaggcactgtggctggcttcggcctcaacatcgcccccagccttggagctctgcagacatgataggaaggaaactgtcatctgcaggggctttcagcaaaatgaagggttagatttttatgctgctgctgatggggttactaaagggaggggaagaggccaggtgggccgctgactgggccatggggagaacgtgtgttcgtactccaggctaaccctgaactccccatgtgatgcgcgctttgttgaatgtgtgtctcggtttccccatctgtaatatgagtcggggggaatggtggtgattcctacctcacagggctgttgtggggattaaagtgctgcgggtgagtgaaggacacatcacgttcagtgtttcaagtacaggcccacaaaacggggcacggcaggcctgagctcagagctgctgcactgggctttggatttgttcttgtgagtaaataaaactggctggtgaatgaactgggggacttctccctttactttctcccctggctgtggccctgagtagcaggcttctcgtgaggattcccgttctcttctgggagcatggccctggggctgcggagaagccaactgactgctggagcgaggaaccctgcagctcagaaggtgaacagctcgtctcagatgcttgcagatctttggttaatttagaatttccagcacagacgtggatttctccagagacggggtgtgtgcgggtcgctgatgtgaggcctaggggaagcaatgagtaaactccagggtgggggaggagcaagggcccggggagggctgcagaggggccggggcggggcagggcctgtgctgcatggtggcttctgcaggggagggacaggggagggctgcagaggggcagggtgggcagggcatgtgctgcatggcagcttctgcacagccagagcaggcaccacaggaaaagagtcggccactggtgcctgctgtacagtcacagtggaggcagagccaaggccaagcagcccctgtgggttctggggtttcaccagtttcatgctcctcagctccccattcatgccccaccagccctcacttgggacccatgctccctcgtggcacagtcatgatgcctctcaggattttgtgcctgtggtgctgagtgtcacgtccccaaggtcgccctctggcctgcagttcagggagtgggtgggagtgaagctgtgctcctggggctgcagacagatccactttgcatgtggtacctgctgggttggccctgcaatctccttttctctgcacctacctgtgacctccctgggagagcctcccatttcctcacctgccctgttgccagcccgggggaaatctttttgctctcaaatgaagactgaaaaaataaagtcagtgttatgactaataagtctcttaggaactgttttacaaaatgcttaagaataaaaagtgattttcagcttttataggtgatgtttacagtgtttgtaaaccaactggagggatcagtaattggtcttaaaagatcaggttctcttttaaaaagttcatctgaaactttatggtttgttactttcgtgatttgcataggtatttatatatacacacacacacaggttttgcttttgtctcacattcagcacagctgtctgcggcccctgccggcaggtgtggccgcacctggtgtgaagtcacgtggagtcagtgctgtggagggaagtcctgtgcgggccgggcagtgaggagagcactgattcacgcctgcagaaacgtaacctcccctttccgtgtatgccttttaccatcatccaggcgactgctccatccttttaaattaggggtcctgcaagccccaagtgacccatagtcagagtatctggtttggggtaaccgagttggtcttatggggcaaaaactcaagacacttagaaacatgcaaagtacaaaataatgtgttccctcctgttaccccagcaagggtggggctgagctgggaatgacacccagtggtgtaatgagtggaaagtgctggtcagctgctaacccccctccaagcctgctgcaccttcacttctctgcatccgtctcctgagtcataactagggacttggctagatgacctcagagacctcgtccacctctgaattctctgtttttaagcccatagttcaaactttggctttgatctctgaagtcttctgggtttggaaatacgggaagtcagctttgaatccattgcttctctaaaacatcagggctagtggaactaacccacttgagggtgacctcaagggctttaggcagccatggggctggggccatactgctctcaggctgggcagtatcttcattgtggttctcagacagccttttttactcaaacatgagactttccacccaccagttagggaactttttttttttttttaaacacggagtttcactcttgttgcccatgctggagtgcaatggcacaatctcagctccactgcaacctctacctcccgggttcaagtgattcttctgcctcagcctccaagtagctgagattacaggcatgcaccaccacacccagctaattttttgtatttagtagagactgggtttcaccatgttggtcaggctggtctccaactcctgacctcaggtgatccactctccttggcctcccaaagttctgggattacaggcgtgagccactgcgcccagccaagagggaactttttaataaagctagtgggattcccttgacagcagaaccagccttgggacttgatgcttcaccgtgtcagaatccgtccctggtgctgcctttcagagaagaggcttgatgtgtgaggggtcagggggagtgctccagatccctgaaatgcccttcccagaccagtgacaggcatttttgggtgccatcgtgtgaccttcacggcacagcaaacagtgggcactaaccctgttgtcctgtggaaatctgggtctctgaatcctgccatttccttcctggaattggccaggaacttgattttctgggctattgcttgctagtgtcccctgatgcatgaaggatccccccatgtcataggtcccacctgcctgctgtgcatcccgggtggccagactcggcttctccaggtgcacttgtcccaggtggcccggtccgtaggctggaagggcagctgcaggtgcactgcctcgcggacaggttaggatatggccacgcagccatccatcttctacagcacgcacaccccactctctcccccagtcaatatgtctctctccgatgggaaagttaataaattttgctctagattaaaagtattgatcatttcatttgtaaacgataaataaaaagggggaacttttcattgcgccaggggtggcacctggcgtgtgttgcgggggtgattgcgctggctgccggggggtgggcttctcatatgcattctggccggccagctgcattgatttcctattagtctcccagcaccacccagtaacacatcatttcagtacctgctattaatggtcttttgataaataatcacttgtaagtcaataaatttttattaaacagtg

SEQ ID NO: 216 - DNA, 2625 bp, Homo sapiens
  source 1..2625: mol_type = unassigned DNA
gttaactggcaggggcgaggaggagcccagggaggaaggaaggatattgccgtaattctgaaagtttttttccttcctctcttcccttcgcagaggtgagtgccgggctcggcgctctgctcctggagctcccgcgggactgcctggggacagggactgctgtggcgctcggccctccactgcggacctctcctgagtgggtgcgccgagtcatggagggcgcagagctggccgggaagatcctttccacctggctgacgctggttctcggcttcatccttttaccttcggtcttcggagtgtctctgggcatctccgagatctacatgaagatcctagtgaaaactttagagtgggccacaatacgaattgaaaaaggaaccccaaaggagtcgattcttaaaaactctgcttctgttggtattatccaaagagatgagtcacccatggaaaaagggctctctggtctacgaggaagggactttgagctgtctgacgtgttttatttctccaagaagggattggaagccattgtagaagatgaagtgacccagaggttttcctcagaggagctagtgtcatggaatctcctcacaagaaccaatgtaaatttccagtacatcagtctgcggctcactatggtgtgggtgctgggcgtcatagtgcgctattgtgtcctactgcctctgagggttaccttggctttcattgggatcagtttgctggttataggaactacactggttgggcagctgccagacagcagcctcaaaaactggctgagtgaactggtccatctgacttgctgccggatctgtgtgcgagccctctctggtaccattcattatcataacaagcagtacagaccccagaagggaggcatttgtgttgccaaccatacttcccccattgatgttttaatcttgacaacggatggatgttatgctatggttggccaggttcatggcggcttgatgggaattattcagagagctatggtcaaggcttgtcctcatgtctggtttgaacgctcagaaatgaaggatcgacacctggttactaagagactaaaagaacatattgctgataagaagaaactacccatactaatttttcctgaaggaacttgcatcaacaatacttcagtcatgatgtttaaaaaggggagctttgaaattggaggaaccatacatccagttgcaattaagtataaccctcagttcggtgatgcattttggaacagtagtaaatacaacatggtgagctacctgcttcgaatgatgaccagctgggccatcgtctgtgacgtgtggtacatgccccccatgaccagagaggaaggagaagatgcagtccagtttgctaacagggttaagtctgctattgctatacaaggaggcctgactgaacttccctgggatggaggactaaagagagcaaaggtgaaggacatctttaaggaagagcagcagaaaaattacagcaagatgattgtgggcaatggatctctcagctaagaggacggatgacagcctttagatctagaactagcccttagaaatggaatggctttttttgttttgttttgttttattgttttgtttttattattgttaatcttttctacagaatgattgtctctacctctttatgccagaggcagaacctacaggtgccctttttggcttttgttgttgttgtaacattagccccatggattgtaaggtggtttactgagttaaaacagattctgcttttgtaaaatgatggcatcactgtggactgaatgaaatatttgtatagaaaaaagtgcttgaaaagtgtgtttggaactcatcgatagggtaattctccaaaaatgcccaaactctttttctgtaattagccttgccactttcttcagtcacttaaatggtgagattacacatcagtgcaagatgaccattatggttatggtctactgcaaggttgaaaggaaaaatggaggattgtatttaggaaaagggacaactttgtggccacctgctctgaaagtcaaaaggaaatgtaaattagtgtcattagtgtgttggaagagaaatactattcagtaagcttcgccaaagaaaagtgagtcaaagttaatgtgtgtgcgcatttatatgtaggcagctcgtagaccacattttaaccagcaactggtaacaaagagcttagttttccttgtttgaatgctgtagatctgtacctagtacccctcccatctactgatttgtttgtttttgtaaccaaacacattttcagatagaaggagccttaaaaaaaaaaaatcacattgagtaacttcagtatgaatgaatgagagtgtgtggagctacccctcaccctccacccctttgtgctttttattcccgaattttcccagtctcttaaacagaaaaatgactgatataattatcttttggaaactgagccttaattttttttagagggggaaataagttttccccaactcacacagcataagcaatgtttgacagcaatataatgccgttgtaaactactgagagtattgtatctgttctggtaaccatgtacagaatgtgaaactgtcttatgaatataaataaattctatatttctaaa

SEQ ID NO: 217 - DNA, 2631 bp, Homo sapiens
  source 1..2631: mol_type = unassigned DNA
agcttccagcacagcccgcggcccggtgccagctccgccggcgaccggtgtgccaaagtgcggtgctcccgcagggaacctggctcggggagggcctccaggtgagtgccgggctcggcgctctgctcctggagctcccgcgggactgcctggggacagggactgctgtggcgctcggccctccactgcggacctctcctgagtgggtgcgccgagtcatggagggcgcagagctggccgggaagatcctttccacctggctgacgctggttctcggcttcatccttttaccttcggtcttcggagtgtctctgggcatctccgagatctacatgaagatcctagtgaaaactttagagtgggccacaatacgaattgaaaaaggaaccccaaaggagtcgattcttaaaaactctgcttctgttggtattatccaaagagatgagtcacccatggaaaaagggctctctggtctacgaggaagggactttgagctgtctgacgtgttttatttctccaagaagggattggaagccattgtagaagatgaagtgacccagaggttttcctcagaggagctagtgtcatggaatctcctcacaagaaccaatgtaaatttccagtacatcagtctgcggctcactatggtgtgggtgctgggcgtcatagtgcgctattgtgtcctactgcctctgagggttaccttggctttcattgggatcagtttgctggttataggaactacactggttgggcagctgccagacagcagcctcaaaaactggctgagtgaactggtccatctgacttgctgccggatctgtgtgcgagccctctctggtaccattcattatcataacaagcagtacagaccccagaagggaggcatttgtgttgccaaccatacttcccccattgatgttttaatcttgacaacggatggatgttatgctatggttggccaggttcatggcggcttgatgggaattattcagagagctatggtcaaggcttgtcctcatgtctggtttgaacgctcagaaatgaaggatcgacacctggttactaagagactaaaagaacatattgctgataagaagaaactacccatactaatttttcctgaaggaacttgcatcaacaatacttcagtcatgatgtttaaaaaggggagctttgaaattggaggaaccatacatccagttgcaattaagtataaccctcagttcggtgatgcattttggaacagtagtaaatacaacatggtgagctacctgcttcgaatgatgaccagctgggccatcgtctgtgacgtgtggtacatgccccccatgaccagagaggaaggagaagatgcagtccagtttgctaacagggttaagtctgctattgctatacaaggaggcctgactgaacttccctgggatggaggactaaagagagcaaaggtgaaggacatctttaaggaagagcagcagaaaaattacagcaagatgattgtgggcaatggatctctcagctaagaggacggatgacagcctttagatctagaactagcccttagaaatggaatggctttttttgttttgttttgttttattgttttgtttttattattgttaatcttttctacagaatgattgtctctacctctttatgccagaggcagaacctacaggtgccctttttggcttttgttgttgttgtaacattagccccatggattgtaaggtggtttactgagttaaaacagattctgcttttgtaaaatgatggcatcactgtggactgaatgaaatatttgtatagaaaaaagtgcttgaaaagtgtgtttggaactcatcgatagggtaattctccaaaaatgcccaaactctttttctgtaattagccttgccactttcttcagtcacttaaatggtgagattacacatcagtgcaagatgaccattatggttatggtctactgcaaggttgaaaggaaaaatggaggattgtatttaggaaaagggacaactttgtggccacctgctctgaaagtcaaaaggaaatgtaaattagtgtcattagtgtgttggaagagaaatactattcagtaagcttcgccaaagaaaagtgagtcaaagttaatgtgtgtgcgcatttatatgtaggcagctcgtagaccacattttaaccagcaactggtaacaaagagcttagttttccttgtttgaatgctgtagatctgtacctagtacccctcccatctactgatttgtttgtttttgtaaccaaacacattttcagatagaaggagccttaaaaaaaaaaaatcacattgagtaacttcagtatgaatgaatgagagtgtgtggagctacccctcaccctccacccctttgtgctttttattcccgaattttcccagtctcttaaacagaaaaatgactgatataattatcttttggaaactgagccttaattttttttagagggggaaataagttttccccaactcacacagcataagcaatgtttgacagcaatataatgccgttgtaaactactgagagtattgtatctgttctggtaaccatgtacagaatgtgaaactgtcttatgaatataaataaattctatatttctaaa

SEQ ID NO: 218 - DNA, 2362 bp, Homo sapiens
  source 1..2362: mol_type = unassigned DNA
ctacacgtgatgggcgcccaccgagtgccagcaccgcctcctccagctccgccaagtaggtgggatccactactttgcagaggaggaagccgttcaggcctccctctgtgcactttgcaaaagcctctgcccttccatctcgaatcccttggcgccgatcacacttcctctgcctggaaacctggagccgtctctcgcgagacgtcctccgccctgtagaaggccgtttcggttcttcgtgcgcggtagccgccccacttgcgggattccaaggcctcatcgagtgcgggtatctggctgtggattcgccgccgtcctgctggacgcctggaggctcgaaccccgccgcccccctaccccaggctttactcccaccccggcttccgcccactgtgctgcccttcctcggacctgggctgtcgggagagctggagatgttcacccttcctcaaaaggacttcagggctcccaccacctgtctgggccccacctgcatgcaggacctgggcagtagccatggggaagatctggaaggagaatgctccagaaaactggaccagaagctgccagagctccgtggagtgggtgatcctgccatgatctcctctgatacctcctacctgtcctctagaggaagaatgattaaatggttctgggattcagctgaggagggctacaggacctaccacatggatgagtatgatgaggacaagaaccccagtggcatcattaacttgggcaccagtgagaacaaactctgctttgacctgctgtcctggcggctgagtcagcgcgacatgcagagggtggagccatccctgctgcagtatgctgactggaggggacatctgttcctccgggaggaagtggccaagttcctgtctttctactgcaagagcccagtacccctcagaccagagaatgtggttgtcctgaatggtggtgcctcgctcttctctgctctggccacggtgctgtgtgaggccggggaggctttcctgatccccaccccttactatggcgctatcacacagcacgtgtgtctctatggcaacatccggctggcctatgtctacctggacagtgaggtcactgggctagacacacgccccttccagctcacagtggagaagctggagatggccctgagagaagctcactctgagggtgtgaaggtcaaaggcctcatcctcatcagcccccagaaccctctgggtgatgtatactcccctgaagagctacaggagtacctggtatttgccaagaggcacaggctgcatgtgattgtggatgaggtctacatgctgtccgtgtttgagaagtctgttgggtaccgcagtgtcctaagcctggaaaggctccctgacccccagaggacccatgtgatgtgggcaaccagcaaggacttcgggatgtctgggctccgctttggcacgctgtacacagaaaaccaggatgtggccactgccgtggcttccctctgccgctaccacggcctcagtggcttggtccagtaccagatggcacagctgctccgggaccgtgactggatcaaccaggtgtacctgccggaaaaccatgcccggctcaaggctgcccacacctatgtctcagaagagcttagggcattggggatccccttcttgagtcgtggggctggcttcttcatctgggttgacttgagaaagtacctgcccaagggcacctttgaggaggaaatgctgctctggcgccgctttttggacaacaaggtgctgctgtcctttggcaaggccttcgagtgtaaagagcctggttggtttcgctttgtcttctcagaccaggtccaccggctttgcctggggatgcagagggtccagcaggtgcttgcaggcaaatcccaagtggcagaagacccccgtccctctcagagccaggagccaagtgaccaacgcaggtgagctggtcattgtctcgtggccagagggcccagcagccactgtggacctggggcgttctggggctgcagaagactgactgtggatgtgccatttgccaggaaggtatctaacttggctttgtgcctgaagaactgtttcttgtctttcgctgtagcagtgggaaactccttaagctgtggttcagcctgggccctccctctctcctattaaacaaaactaggagagtccatatgtctccattgtgagttatttagaatggaggagtcgtgactgcttctaaccagagcctcagcccccctgaggatgtgaaaagaaaacaaacaacttgtaccttctttctgatatcaccgtcattcctctttctttgtcaccaaggaaacgagtcaaaggaacagcacatacaggagagtttgtagaaaaat

SEQ ID NO: 219 - DNA, 987 bp, Homo sapiens
  source 1..987: mol_type = unassigned DNA
aggtgggatccactactttgcagaggaggaagccgttcaggcctccctctgtgcactttgcaaaagcctctgcccttccatctcgaatcccttggcgccgatcacacttcctctgcctggaaacctggagccgtctctcgcgagacgtcctccgccctgtagaaggccgtttcggttcttcgtgcgcggtagccgccccacttgcgggattccaaggcctcatcgagtgcgggtatctggctgtggattcgccgccgtcctgctggacgcctggaggctcgaaccccgccgcccccctaccccaggctttactcccaccccggcttccgcccactgtgctgcccttcctcggacctgggctgtcgggagagctggagatgttcacccttcctcaaaaggacttcagggctcccaccacctgtctgggccccacctgcatgcaggacctgggcagtagccatggggaagatctggaaggagaatgctccagaaaactggaccagaagctgccagagctccgtggagtgggtgatcctgccatgatctcctctgatacctcctacctgtcctctagaggaagaatgattaaatggttctgggattcagctgaggagggctacaggacctaccacatggatgagtatgatgaggacaagaaccccagtggcatcattaacttgggcaccagtgagaacaaactctgctttgacctgctgtcctggcggcctccgggaggaagtggccaagttcctgtctttctactgcaagagcccagtacccctcagaccagagaatgtggttgtcctgaatggtggtgcctcgctcttctctgctctggccacggtgctgtgtgaggccggggaggctttcctgatccccaccccttactatggcgctatcacacagcacgtgtgtctctatggcaacatccggctggcctatgtctacctggacagtgaggtaagagtcttgacttcctaggtggaa

SEQ ID NO: 220 - DNA, 563 bp, Homo sapiens
  source 1..563: mol_type = unassigned DNA
agtctcctagtccgggcgcgctgagcgcaggggggcgctgtcctcacccacgcgtaagtcgccgcagggcgtttccgggcggagaaaacctacacgtgatgggcgcccaccgagtgccagcaccgcctcctccagctccgccaaatgttcacccttcctcaaaaggacttcagggctcccaccacctgtctgggccccacctgcatgcaggacctgggcagtagccatggggaagatctggaaggagaatgctccagaaaactggaccagaagctgccagagctccgtggagtgggtgatcctgccatgatctcctctgatacctcctacctgtcctctagaggaagaatgattaaatggttctgggattcagctgaggagggctacaggacctaccacatggatgagtatgatgaggacaagaaccccagtggcatcattaacttgggcaccagtgagaacaaactctgctttgacctgctgtcctggcggctgagtcagcgcgacatgcagagggtggagccatccctgctgcagtatgctgactggaggggacatctgtt

SEQ ID NO: 221 - DNA, 400 bp, Homo sapiens
  source 1..400: mol_type = unassigned DNA
ctgcacttgtggaggttcccattcctcccttccctcagttcctacccgccatctgcctcagaacaccacataatctcatcctaccctttacaccacaagacccccaggactcccaggcaatactctgctttaactcaggaaattttaacctggcatttggtaattgagatgttcacccttcctcaaaaggacttcagggctcccaccacctgtctgggccccacctgcatgcaggacctgggcagtagccatggggaagatctggaaggagaatgctccagaaaactggaccagaagctgccagagctccgtggagtgggtgatcctgccatgatctcctctgatacctcctacctgtcctctagaggaagaatgattaaatggttctgggattcagctg

SEQ ID NO: 222 - DNA, 1753 bp, Homo sapiens
  source 1..1753: mol_type = unassigned DNA
cgtctggttcaggggctagaaaagagcgtcgatgccggcggcagtgatgagtcctaggaggcgctggctctttggcggctcggaggagcggctgctgctgctgctgctgctgctggtggcccctttgcagatgtattgctgtccttgaatattagcccatttgaaaacgcctgggaagttcagccatcagtatgtccaagtacaaacttattatgttaagacatggagagggtgcttggaataaggagaaccgtttttgtagctgggtggatcagaaactcaacagcgaaggaatggaggaagctcggaactgtgggaagcaactcaaagcgttaaactttgagtttgatcttgtattcacatctgtccttaatcggtccattcacacagcctggctgatcctggaagagctaggccaggaatgggtgcctgtggaaagctcctggcgtctaaatgagcgtcactatggggccttgatcggtctcaacagggagcagatggctttgaatcatggtgaagaacaagtgaggctctggagaagaagctacaatgtaaccccgcctcccattgaggagtctcatccttactaccaagaaatctacaacgaccggaggtataaagtatgcgatgtgcccttggatcaactgccacggtcggaaagcttaaaggatgttctggagagactccttccctattggaatgaaaggattgctcccgaagtattacgtggcaaaaccattctgatatctgctcatggaaatagcagtagggcactcctaaaacacctggaaggtatctcagatgaagacatcatcaacattactcttcctactggagtccccattcttctggaattggatgaaaacctgcgtgctgttgggcctcatcagttcctgggtgaccaagaggcgatccaagcagccattaagaaagtagaagatcaaggaaaagtgaaacaagctaaaaaatagtctttctcaactgttggctaagaagaaatgcaaaagaagtggcataggagtgtgttatgggtgctgaactctctctctttttccccgattttccagagctaggctgtggagtagagtttgtataggtaactaggtaacttattgtggcccagataaggctttaggatgcctcagtgcttatgtcatagccttatgagttagctttcttgctagccccctagtcggtcaccaaactagtaactagtggggcttaatgaaggtcataagtttctgagatgggagagcaacaagtagagatgaagttaaaggtatttatcattcaagaaatcattattgagtcaccattgacaggcactattctaatcagtagttcactttaatatttaataagattttctgggataacagtaagggatattagataatataccgtatgtatttattactagtcttttcctctaggaaaagggatactttgataattaaggccagaggcccattagttgagaaagtcacagatatatttctccaagaaagccaacaaccaccaccacaatgacagaaatgacaacaaggccctttaacttgtcttctagtttagagacatccttcatttgacatttagtagaattcctctttggccacaagaataagcagcaaataaacaactatggctgttgaggttctcattttggtttgttttaattttttgaactttgggtacctgtaattagtttaaaaataaagttcctgataataaagtgactgaaaatggcatcccc

SEQ ID NO: 223 - DNA, 2051 bp, Homo sapiens
  source 1..2051: mol_type = unassigned DNA
gagcgtcgatgccggcggcagtgatgagtcctaggaggcgctggctctttggcggctcggaggagcggctgctgctgctgctgctgctgctggtggcccctttgcagaaaagttctaagaacagtgctgttggctcagtgagatgaggttatcggaaaactttctgtttacacaagagttgcctccttcaaagaagcatgcatggtccttgcaggtcactgtgcccatcactctgcatagtccagctgcactctgcttcacacagctgcctgcccattgcaggcatttgagtttgcaatccatgccttaaactttaaatcacactggctacagcgttgtgtgtttcttggtaaacactgggtaaatcagctcctgtggatgttgactgaagtttctatgtttgcaagctaatcctcagcagtttctttatgtattgctgtccttgaatattagcccatttgaaaacgcctgggaagttcagccatcagtatgtccaagtacaaacttattatgttaagacatggagagggtgcttggaataaggagaaccgtttttgtagctgggtggatcagaaactcaacagcgaaggaatggaggaagctcggaactgtgggaagcaactcaaagcgttaaactttgagtttgatcttgtattcacatctgtccttaatcggtccattcacacagcctggctgatcctggaagagctaggccaggaatgggtgcctgtggaaagctcctggcgtctaaatgagcgtcactatggggccttgatcggtctcaacagggagcagatggctttgaatcatggtgaagaacaagtgaggctctggagaagaagctacaatgtaaccccgcctcccattgaggagtctcatccttactaccaagaaatctacaacgaccggaggtataaagtatgcgatgtgcccttggatcaactgccacggtcggaaagcttaaaggatgttctggagagactccttccctattggaatgaaaggattgctcccgaagtattacgtggcaaaaccattctgatatctgctcatggaaatagcagtagggcactcctaaaacacctggaaggtatctcagatgaagacatcatcaacattactcttcctactggagtccccattcttctggaattggatgaaaacctgcgtgctgttgggcctcatcagttcctgggtgaccaagaggcgatccaagcagccattaagaaagtagaagatcaaggaaaagtgaaacaagctaaaaaatagtctttctcaactgttggctaagaagaaatgcaaaagaagtggcataggagtgtgttatgggtgctgaactctctctctttttccccgattttccagagctaggctgtggagtagagtttgtataggtaactaggtaacttattgtggcccagataaggctttaggatgcctcagtgcttatgtcatagccttatgagttagctttcttgctagccccctagtcggtcaccaaactagtaactagtggggcttaatgaaggtcataagtttctgagatgggagagcaacaagtagagatgaagttaaaggtatttatcattcaagaaatcattattgagtcaccattgacaggcactattctaatcagtagttcactttaatatttaataagattttctgggataacagtaagggatattagataatataccgtatgtatttattactagtcttttcctctaggaaaagggatactttgataattaaggccagaggcccattagttgagaaagtcacagatatatttctccaagaaagccaacaaccaccaccacaatgacagaaatgacaacaaggccctttaacttgtcttctagtttagagacatccttcatttgacatttagtagaattcctctttggccacaagaataagcagcaaataaacaactatggctgttgaggttctcattttggtttgttttaattttttgaactttgggtacctgtaattagtttaaaaataaagttcctgataataaagtgactgaaaatggcatcccc

SEQ ID NO: 224 - DNA, 1870 bp, Homo sapiens
  source 1..1870: mol_type = unassigned DNA
ctggttcaggggctagaaaagagcgtcgatgccggcggcagtgatgagtcctaggaggcgctggctctttggcggctcggaggagcggctgctgctgctgctgctgctgctggtggcccctttgcagaatgagcctcgcaggcagtcaccgttctgtcaactgagaggaggagcccgctttggtagtgctgtccttatggcaagaatatatagaagttggagggaagataaactctcttctggatgtctgagatgtattgctgtccttgaatattagcccatttgaaaacgcctgggaagttcagccatcagtatgtccaagtacaaacttattatgttaagacatggagagggtgcttggaataaggagaaccgtttttgtagctgggtggatcagaaactcaacagcgaaggaatggaggaagctcggaactgtgggaagcaactcaaagcgttaaactttgagtttgatcttgtattcacatctgtccttaatcggtccattcacacagcctggctgatcctggaagagctaggccaggaatgggtgcctgtggaaagctcctggcgtctaaatgagcgtcactatggggccttgatcggtctcaacagggagcagatggctttgaatcatggtgaagaacaagtgaggctctggagaagaagctacaatgtaaccccgcctcccattgaggagtctcatccttactaccaagaaatctacaacgaccggaggtataaagtatgcgatgtgcccttggatcaactgccacggtcggaaagcttaaaggatgttctggagagactccttccctattggaatgaaaggattgctcccgaagtattacgtggcaaaaccattctgatatctgctcatggaaatagcagtagggcactcctaaaacacctggaaggtatctcagatgaagacatcatcaacattactcttcctactggagtccccattcttctggaattggatgaaaacctgcgtgctgttgggcctcatcagttcctgggtgaccaagaggcgatccaagcagccattaagaaagtagaagatcaaggaaaagtgaaacaagctaaaaaatagtctttctcaactgttggctaagaagaaatgcaaaagaagtggcataggagtgtgttatgggtgctgaactctctctctttttccccgattttccagagctaggctgtggagtagagtttgtataggtaactaggtaacttattgtggcccagataaggctttaggatgcctcagtgcttatgtcatagccttatgagttagctttcttgctagccccctagtcggtcaccaaactagtaactagtggggcttaatgaaggtcataagtttctgagatgggagagcaacaagtagagatgaagttaaaggtatttatcattcaagaaatcattattgagtcaccattgacaggcactattctaatcagtagttcactttaatatttaataagattttctgggataacagtaagggatattagataatataccgtatgtatttattactagtcttttcctctaggaaaagggatactttgataattaaggccagaggcccattagttgagaaagtcacagatatatttctccaagaaagccaacaaccaccaccacaatgacagaaatgacaacaaggccctttaacttgtcttctagtttagagacatccttcatttgacatttagtagaattcctctttggccacaagaataagcagcaaataaacaactatggctgttgaggttctcattttggtttgttttaattttttgaactttgggtacctgtaattagtttaaaaataaagttcctgataataaagtgactgaaaatggca

SEQ ID NO: 225 - DNA, 635 bp, Homo sapiens
  source 1..635: mol_type = unassigned DNA
acaaggagagagagaggcgggctgagcagccatgtcagcagattctccgaggatggagtgggcccagcagatcttcaggccagcagcttaaatgtaaggagttcagcatagcttgagagttgctggtctccctttactagattctccccctgctaagacgtagctggtgtgtgtaggatatctggagggctggggaggaggaggtggggcctctttatcagtgtggttcctctcactcctgcctaccagatctgtttgtacaggcagcatccctcagctgcttgcatttgatagcttattttgcatctggatttattcctgctgaaaactctatcttgagatgtattgctgtccttgaatattagcccatttgaaaacgcctgggaagttcagccatcagtatgtccaagtacaaacttattatgttaagacatggagagggtgcttggaataaggagaaccgtttttgtagctgggtggatcagaaactcaacagcgaaggaatggaggaagctcggaactgtgggaagcaactcaaagcgttaaactttgagtttgatcttgtattcacatctgtccttaatcggtccattcacacagcctggctgatcctggaagagctaggccaggaatgg

SEQ ID NO: 226 - DNA, 1189 bp, Homo sapiens
  source 1..1189: mol_type = unassigned DNA
ccaccgctggactcccgtgtccctccgcgcaggcgggcggccccggagcgctggtgccggcagaggcggcgacggtggcgcccctcctcatcatgaacagaggcttctcccgaaaaagccacacattcctgcccaagatcttcttccgcaagatgtcatcctcaggggccaaggacaagcctgagctgcagtttcccttccttcaggatgaggacacagtggccacgctgctagagtgcaagacgctcttcatcttgcgcggcctgccaggaagcggcaagtccacgctggcacgggtcatcgtggacaagtaccgtgatggcaccaagatggtgtcggctgacgcttacaagatcacccccggcgctcgaggagccttgaaggagctgcgacaattcgtccctggggatgagcccagggagaagatggacttggtcacctactttggaaagagacccccaggcgtgctgcattgcacaaccaagttttgtgactacgggaaggctcccggggcagaggagtacgctcaacaagatgtgttaaagaaatcttactccaaggccttcacgctgaccatctctgccctctttgtgacacccaagacgactggggcccgggtggagttaagcgagcagcaactgcagttgtggccgagtgatgtggacaagctgtcacccactgacaacctgccgcgggggagccgcgcccacatcaccctcggctgtgcagctgacgtagaggccgtgcagacgggccttgacctcttagagattctgcggcaggagaaggggggcagccgaggcgaggaggtgggcgagctaagccggggcaagctctattccttgggcaatgggcgctggatgctgaccctggccaagaacatggaggtcagggccatcttcacggggtactacgggaaaggcaaacctgtgcccacgcaaggtagccggaaggggggcgccttgcagtcctgcaccatcatatgagtgttctcaccaccacttatgcccctagaagggaaggggagagggaaacgtgccctctgtttgatccttgttttgtgacattttttttttttttttttttactcaaagttaacctacctgtaactttttaaaaacttgtaaaataactgaccctcccttcctgtccgccctcttcccctctaatgctcacgctcccaacacaa

SEQ ID NO: 227 - DNA, 2583 bp, Homo sapiens
  source 1..2583: mol_type = unassigned DNA
ctccgcgcaggcgggcggccccggagcgctggtgccggcagaggcggcgacggtggcgcccctcctcatcatgaggcttctcccgaaaaagccacacattcctgcccaagatcttcttccgcaagatgtcatcctcaggggccaaggacaagcctgagctgcagtttcccttccttcaggatgaggacacagtggccacgctgctagagtgcaagacgctcttcatcttgcgcggcctgccaggaagcggcaagtccacgctggcacgggtcatcgtggacaagtaccgtgatggcaccaagatggtgtcggctgacgcttacaagatcacccccggcgctcgaggagccttctccgaggagtacaagcggctcgatgaggacctggctgcctactgccgccgccgggacatcagaattcttgtgcttgatgacaccaaccacgaacgggaacggctggagcagctctttgaaatggccgaccagtaccagtaccaggtggtgctggtggagcccaagacggcgtggcggctggactgtgcccagctcaaggagaagaaccagtggcagctgtcggctgatgacctgaagaagctgaagcctgggctggagaaggacttcctgccgctctacttcggctggttcctgaccaagaagagctctgagaccctccgcaaagccggccaggtcttcctggaagagctggggaaccacaaggccttcaagaaggagctgcgacaattcgtccctggggatgagcccagggagaagatggacttggtcacctactttggaaagagacccccaggcgtgctgcattgcacaaccaagttttgtgactacgggaaggctcccggggcagaggagtacgctcaacaagatgtgttaaagaaatcttactccaaggccttcacgctgaccatctctgccctctttgtgacacccaagacgactggggcccgggtggagttaagcgagcagcaactgcagttgtggccgagtgatgtggacaagctgtcacccactgacaacctgccgcgggggagccgcgcccacatcaccctcggctgtgcagctgacgtagaggccgtgcagacgggccttgacctcttagagattctgcggcaggagaaggggggcagccgaggcgaggaggtgggcgagctaagccggggcaagctctattccttgggcaatgggcgctggatgctgaccctggccaagaacatggaggtcagggccatcttcacggggtactacgggaaaggcaaacctgtgcccacgcaaggtagccggaaggggggcgccttgcagtcctgcaccatcatatgagtgttctcaccaccacttatgcccctagaagggaaggggagagggaaacgtgccctctgtttgatccttgttttgtgacattttttttttttttttttttactcaaagttaacctacctgtaactttttaaaaacttgtaaaataactgaccctcccttcctgtccgccctcttcccctctaatgctcacgctcccaacacaaggtgggcagggaggcaccattcaggaacctggaccaaagctgacgaggctgggccaagccagggatggggccacagccagaaccccgagccctacttccaggttctggttagctcagccccagcccagcccagctgctctgcccagagctgggtgagtggggagacacctcagagccccgcaaaacccactgaccggaggcaaaaggcagtggggctgggggtagttttccatggtcacagagaactagtggtggctctgagaaggggaggacctctgggctttgattccatctccttgtcttttttctttgtttttagagacagggtcctgctatttcccaagctggagtgcagtggtgcgatcatggctcactgcagcctcgaactcctgggctcaagcaatcctcctgagtgatcccatttcttaatcagtgtagccccaagaaggctggggctatttaccagggtagaaaaaggagcttacctcccacctttggtcctaagtccctgccccctccccttcacaccataactaggtaacagtttgataactagggaagaaagcagaacagttaagcagccgccacatccccgctggctgggggcctcactccaggaaggggctggactggctgtcctttccagtggcctggctccgctgtgtggatggggagatcggggccagaggcagaaccctggtgaggaagctccagtcctgctctctacccagcccatcttgcctccatggtgcctctggaggcctctgggcctcctctaacaggggctggtgggcaccaagagccaatggagtagacccctggctggtaagggccaagtcccaccggttgcttctgggaaggggtttctaacactagtctgtgtgctgtggttcctggggtgccctccactgccctctgttcagtaacagggccttgctaatcgggttgtcactcaacaaaagtgctttggatttaagttactatcctggctttgcccaacctcagcaacctgtaagactgataatgaaataaatcatgttaatcctagc

SEQ ID NO: 228 - DNA, 2660 bp, Homo sapiens
  source 1..2660: mol_type = unassigned DNA
gggtgcccgctccgccccccgggctatgtaaagcggccgggctcgggtcgtgccaccgctggactcccgtgtccctccgcgcaggcgggcggccccggagcgctggtgccggcagaggcggcgacggtggcgcccctcctcatcatgaacagaggcttctcccgaaaaagccacacattcctgcccaagatcttcttccgcaagatgtcatcctcaggggccaaggacaagcctgagctgcagtttcccttccttcaggatgaggacacagtggccacgctgctagagtgcaagacgctcttcatcttgcgcggcctgccaggaagcggcaagtccacgctggcacgggtcatcgtggacaagtaccgtgatggcaccaagatggtgtcggctgacgcttacaagatcacccccggcgctcgaggagccttctccgaggagtacaagcggctcgatgaggacctggctgcctactgccgccgccgggacatcagaattcttgtgcttgatgacaccaaccacgaacgggaacggctggagcagctctttgaaatggccgaccagtaccagtaccaggtggtgctggtggagcccaagacggcgtggcggctggactgtgcccagctcaaggagaagaaccagtggcagctgtcggctgatgacctgaagaagctgaagcctgggctggagaaggacttcctgccgctctacttcggctggttcctgaccaagaagagctctgagaccctccgcaaagccggccaggtcttcctggaagagctggggaaccacaaggccttcaagaaggagctgcgacaattcgtccctggggatgagcccagggagaagatggacttggtcacctactttggaaagagacccccaggcgtgctgcattgcacaaccaagttttgtgactacgggaaggctcccggggcagaggagtacgctcaacaagatgtgttaaagaaatcttactccaaggccttcacgctgaccatctctgccctctttgtgacacccaagacgactggggcccgggtggagttaagcgagcagcaactgcagttgtggccgagtgatgtggacaagctgtcacccactgacaacctgccgcgggggagccgcgcccacatcaccctcggctgtgcagctgacgtagaggccgtgcagacgggccttgacctcttagagattctgcggcaggagaaggggggcagccgaggcgaggaggtgggcgagctaagccggggcaagctctattccttgggcaatgggcgctggatgctgaccctggccaagaacatggaggtcagggccatcttcacggggtactacgggaaaggcaaacctgtgcccacgcaaggtagccggaaggggggcgccttgcagtcctgcaccatcatatgagtgttctcaccaccacttatgcccctagaagggaaggggagagggaaacgtgccctctgtttgatccttgttttgtgacattttttttttttttttttttactcaaagttaacctacctgtaactttttaaaaacttgtaaaataactgaccctcccttcctgtccgccctcttcccctctaatgctcacgctcccaacacaaggtgggcagggaggcaccattcaggaacctggaccaaagctgacgaggctgggccaagccagggatggggccacagccagaaccccgagccctacttccaggttctggttagctcagccccagcccagcccagctgctctgcccagagctgggtgagtggggagacacctcagagccccgcaaaacccactgaccggaggcaaaaggcagtggggctgggggtagttttccatggtcacagagaactagtggtggctctgagaaggggaggacctctgggctttgattccatctccttgtcttttttctttgtttttagagacagggtcctgctatttcccaagctggagtgcagtggtgcgatcatggctcactgcagcctcgaactcctgggctcaagcaatcctcctgagtgatcccatttcttaatcagtgtagccccaagaaggctggggctatttaccagggtagaaaaaggagcttacctcccacctttggtcctaagtccctgccccctccccttcacaccataactaggtaacagtttgataactagggaagaaagcagaacagttaagcagccgccacatccccgctggctgggggcctcactccaggaaggggctggactggctgtcctttccagtggcctggctccgctgtgtggatggggagatcggggccagaggcagaaccctggtgaggaagctccagtcctgctctctacccagcccatcttgcctccatggtgcctctggaggcctctgggcctcctctaacaggggctggtgggcaccaagagccaatggagtagacccctggctggtaagggccaagtcccaccggttgcttctgggaaggggtttctaacactagtctgtgtgctgtggttcctggggtgccctccactgccctctgttcagtaacagggccttgctaatcgggttgtcactcaacaaaagtgctttggatttaagttactatcctggctttgcccaacctcagcaacctgtaagactgataatgaaataaatcatgttaatccta

SEQ ID NO: 229 - DNA, 300 bp, Homo sapiens
  source 1..300: mol_type = unassigned DNA
gtcggggcccctcgggaggaagcgtcttgcaaacgaggacccggggctccgggttcgacttccagttttcttgaacagaggcttctcccgaaaaagccacacattcctgcccaagatcttcttccgcaagatgtcatcctcaggggccaaggacaagcctgagctgcagtttcccttccttcaggatgaggacacagtggccacgctgctagagtgcaagacgctcttcatcttgcgcggcctgccaggaagcggcaagtccacgctggcacgggtcatcgtggacaagtaccgtgatgg

SEQ ID NO: 230 - DNA, 1207 bp, Homo sapiens
  source 1..1207: mol_type = unassigned DNA
tccagccccgagaactttgttctttttgtcccgccccctgcgcccaaccgcctgcgccgccttccggcccgagttctggagactcaacatgaagctaccggccagggttttctttactctggggtcccggctgccctgtggcctcgctcctcggaggtttttcagttatgggacaaaaatattatatcaaaacactgaagctttgcaatctaaattcttttcacctcttcaaaaagcgatgctaccacctaatagttttcaaggaaaagtggcattcattactgggggaggtactggccttggtaaaggaatgacaactcttctgtccagcctaggtgctcagtgcgtgatagccagccggaagatggatgttttgaaagctaccgcagaacaaatttcttctcaaactggaaataaggttcatgcaattcagtgtgatgtgagggatcctgatatggttcaaaacactgtgtcagaactgatcaaagttgcaggacatcctaatattgtgataaacaatgcagcagggaattttatttctcctactgaaagactttctcctaatgcttggaaaaccataactgacatagttctaaatggcacagccttcgtgacactagaaattggaaaacaactaattaaagcacagaaaggagcagcatttctttctattactactatctatgctgagactggttcaggttttgtagtaccaagtgcttctgccaaagcaggtgtggaagccatgagcaagtctcttgcagctgaatggggtaaatatggaatgcgattcaatgtgattcaaccagggcctataaaaaccaaaggtgcctttagccgtctggacccaactggaacatttgagaaagaaatgattggcagaattccctgtggtcgcctggggactgtagaagaactcgcaaatcttgctgctttcctttgtagtgattatgcttcttggattaatggagcagtcattaaatttgacggtggagaggaagtacttatttcaggggaattcaacgacctgagaaaggtcaccaaggagcagtgggacaccatagaagaactcatcaggaagacaaaaggttcctaagaccactttggccttcatcttggttacagaaaagggaatagaaatgaaacaaattatctctcatcttttgactatttcaagtctaataaattcttaattaacaaacattca

SEQ ID NO: 231 - DNA, 1766 bp, Homo sapiens
  source 1..1766: mol_type = unassigned DNA
gttctggagactcaacatgaagctaccggccagggttttctttactctggggtcccggctgccctgtggcctcgctcctcggaggtctgaaaaatgagtaaagatggaagccaaagtatcacttttattgtggtttgtgagaggaagctgggcctatcagctggatctcccgaagtaggcggacttacataactctggaggagggcagaacattgtcctctgaaggcagctggctcccaaaaggaagaagaccaaggagaactgttcatacccaacgatcctgtcaaaatttaccagtcatatcaactgtctctgcacagacagattgtacctcagtctgtgttgctataaaggaatacctgaggctgggtaatttataaagaaaagggtttgtttgactcatgattctgatgcctggacaagttcaagactgggcatctgcatctggtgacggcctaaggctgcttgcacttgtggcagaaggatgaagatggtactacgacattcatgatggatctgccaccataacccaggcacctcccattagaccccacctccaacattggggatcacatttcaacatgagttttcaagggacaaacatccaaacatccttagcaggttgactaaggggacagaaagaagcctggagttgtactacctgaacttctcacagtagggagatgtcaggactggggaagaagcatctcctgctcatgggggagtttttcagttatgggacaaaaatattatatcaaaacactgaagctttgcaatctaaattcttttcacctcttcaaaaagcgatgctaccacctaatagttttcaaggaaaagtggcattcattactgggggaggtactggccttggtaaaggaatgacaactcttctgtccagcctaggtgctcagtgcgtgatagccagccggaagatggatgttttgaaagctaccgcagaacaaatttcttctcaaactggaaataaggttcatgcaattcagtgtgatgtgagggatcctgatatggttcaaaacactgtgtcagaactgatcaaagttgcaggacatcctaatattgtgataaacaatgcagcagggaattttatttctcctactgaaagactttctcctaatgcttggaaaaccataactgacatagttctaaatggcacagccttcgtgacactagaaattggaaaacaactaattaaagcacagaaaggagcagcatttctttctattactactatctatgctgagactggttcaggttttgtagtaccaagtgcttctgccaaagcaggtgtggaagccatgagcaagtctcttgcagctgaatggggtaaatatggaatgcgattcaatgtgattcaaccagggcctataaaaaccaaaggtgcctttagccgtctggacccaactggaacatttgagaaagaaatgattggcagaattccctgtggtcgcctggggactgtagaagaactcgcaaatcttgctgctttcctttgtagtgattatgcttcttggattaatggagcagtcattaaatttgacggtggagaggaagtacttatttcaggggaattcaacgacctgagaaaggtcaccaaggagcagtgggacaccatagaagaactcatcaggaagacaaaaggttcctaagaccactttggccttcatcttggttacagaaaagggaatagaaatgaaacaaattatctctcatcttttgactatttcaagtctaataaattcttaattaac

SEQ ID NO: 232 - DNA, 4250 bp, Homo sapiens
  source 1..4250: mol_type = unassigned DNA
cccgggctgtgggctacaggcgcagagcgggccaggcgcggagctggcggcagtgacaggaggcgcgaacccgcagcgcttaccgcgcggcgccgcaccatggagcccgccgtgtcgctggccgtgtgcgcgctgctcttcctgctgtgggtgcgcctgaaggggctggagttcgtgctcatccaccagcgctgggtgttcgtgtgcctcttcctcctgccgctctcgcttatcttcgatatctactactacgtgcgcgcctgggtggtgttcaagctcagcagcgctccgcgcctgcacgagcagcgcgtgcgggacatccagaagcaggtgcgggaatggaaggagcagggtagcaagaccttcatgtgcacggggcgccctggctggctcactgtctcactacgtgtcgggaagtacaagaagacacacaaaaacatcatgatcaacctgatggacattctggaagtggacaccaagaaacagattgtccgtgtggagcccttggtgaccatgggccaggtgactgccctgctgacctccattggctggactctccccgtgttgcctgagcttgatgacctcacagtggggggcttgatcatgggcacaggcatcgagtcatcatcccacaagtacggcctgttccaacacatctgcactgcttacgagctggtcctggctgatggcagctttgtgcgatgcactccgtccgaaaactcagacctgttctatgccgtaccctggtcctgtgggacgctgggtttcctggtggccgctgagatccgcatcatccctgccaagaagtacgtcaagctgcgtttcgagccagtgcggggcctggaggctatctgtgccaagttcacccacgagtcccagcggcaggagaaccacttcgtggaagggctgctctactccctggatgaggctgtcattatgacaggggtcatgacagatgaggcagagcccagcaagctgaatagcattggcaattactacaagccgtggttctttaagcatgtggagaactatctgaagacaaaccgagagggcctggagtacattcccttgagacactactaccaccgccacacgcgcagcatcttctgggagctccaggacattatcccctttggcaacaaccccatcttccgctacctctttggctggatggtgcctcccaagatctccctcctgaagctgacccagggtgagaccctgcgcaagctgtacgagcagcaccacgtggtgcaggacatgctggtgcccatgaagtgcctgcagcaggccctgcacaccttccaaaacgacatccacgtctaccccatctggctgtgtccgttcatcctgcccagccagccaggcctagtgcaccccaaaggaaatgaggcagagctctacatcgacattggagcatatggggagccgcgtgtgaaacactttgaagccaggtcctgcatgaggcagctggagaagtttgtccgcagcgtgcatggcttccagatgctgtatgccgactgctacatgaaccgggaggagttctgggagatgtttgatggctccttgtaccacaagctgcgagagaagctgggttgccaggacgccttccccgaggtgtacgacaagatctgcaaggccgccaggcactgagctggagcccgcctggagagacagacacgtgtgagtggtcaggcatcttcccttcactcaagcttggctgctttcctagatccacactttcaaagagaaacccctccagaactcccaccctgacagcccaacaccaccttcctcctggcttccagggggcagcccagtggaatggaaagaatgtgggatttggagtcagacaagcctgagtccagttccccgtttagaactcattagctgtgtgactctgggtgagtcccttaacccctctgagcccgggtctcttcattagttgaaagggatagtaatacctacttgcaggttgttgtcatctgagttgagcactggtcacattgaaggtgctgggtaagtggtagctcttgttgcttcccgttcagcgtcacatctgcagtggagcctgaaaaggctccacattaggtcacctgtgcacagccatggctggaatgatgaaggggatacgctggagttgccctgccatcgcctccatcagccagacgaggtcctcacaggagaaggacagctcttccccaccctgggatctcaggagggcagccacggagtggggaggccccagatgcgctgtgccaaagccaggtccgaggccaaagttctccctgccatccttggtgccgtcctgccccttcctccttcatgcctgggcctgcaggcccaccccagccaccactgagtccactcggagtgccctgtgttcctggagaaggcattccagggttgaatcttgtcccagcctcagcctgggacacctaggtggagagagtggtctccgctctgaattggatccaggggacctgggctcattcttcttggctcaccaaccctgcaggcctcatctttcccaaaacccactttgtcttggtgggagtgggtccgcgctgctctgcagcaggggctggggagtggacagcatcaggtgggaaagtggagtccaccctcatgtttctgtaggattctcaccgtggggctggaagaaaagagcatcgacttgatttctccaaccactcatccctctttttctttcttccaccactccccaccccagctgtagttaatttcagtgccttacaaatcctaagctcagagaaagttccatttccgttccagagggaagggaacctccctaggtccttccctggcttgttataacgcaaagcttggttgtttatgcaactctatcttaagaactgcccagcctcagctgaaaacccgaatctgagaaggaattgcgtcatgtaagggaagctggaattaagggagctgagccagtcatggttgtggcgtgtgagtcaggagacctaggtttcagcccctctctactgtcagcgagctgtgcaacgtgggcaagtcattgtcctctgagctgcagtttcctcatctgtcacatcgctacagacaagacctccctggaacccttctgattgtcttagacactgtggttgcaaaacccacggaaagcctcatttgtgtggaaagtcagaggaaaaatgatccagtggacacttggggattatctgtcattcaagatccttccttcaaccccaaggtcagctcccatctcatttccagaaaggctcatacctggcttgcagggaagcatctgtcttgtcattccaggtgccagaatcctctcagagtcattgaagggtgttcacccatcccacccaaggcttggcacactgccagtgtcttagcagggtcttgtgagggctgggggcatccaggcactcagaaggcaaaggaaccaccctacccatttggcctctggagggggcagaagaaagaaataaacctcatcctatattttacaaagcatgtgaattctggcattagctctcataggagacccatgtgcttccttgctcagtgcaaaactgatgattctacttgctgtagatgaatggttaacacgagctagttaaacagtgccattgttttgccagtgaagcctccaaccctaagccactgggacggtggccagagatgccagcagcctctgtcgcccttagtcatataaccaaaatccagaccttatccacaacccggggcttggaaaggaaggtattttggaatcacaccctccggttatgttgctccagtaaaatcttgcctggaaagaggcagtcttcttagcatggtgagctgagttcatggcttttttttgtagccagtcctgtccctggccatccatgtgatggttttggatggagttaaacttgatgccagtgggcagtgcatgtggaaagtatcagagtaaggctctcccctccagagccctgagtttcttggctgcatgaaggttttctttagaatcagaattgtagccagtttctttggccagaaggatgaatacttggatattactgaaagggaggggtggagatgggtgtggcagtgtatggtgtgtgatttttattttcttctttggtcatgggggccaaggagaaaggcatgaatcttccctgtcaggctcttacagccacaggcactgtgtctactgtctggaagacatgtccccatggctgtggggccgctgcttctgtttaaataaaagtggcctggaa

SEQ ID NO: 233 - DNA, 863 bp, Homo sapiens
  source 1..863: mol_type = unassigned DNA
ctccctcctgaagctgacccagggtgagaccctgcgcaagctgtacgagcagcaccacgtggtgcaggacatgctggtgcccatgaagtgcctgcagcaggccctgcacaccttccaaaacgacatccacgtctaccccatctggctgtgtccgttcatcctgcccagccagccaggcctagtgcaccccaaaggaaatgaggcagagctctacatcgacattggagcatatggggagccgcgtgtgaaacactttgaagccaggtcctgcatgaggcagctggagaagtttgtccgcagcgtgcatggcttccagatgctgtatgccgactgctacatgaaccgggaggagttctgggagatgtttgatggctccttgtaccacaagctgcgagagaagctgggttgccaggacgccttccccgaggtgtacgacaagatctgcaaggccgccaggcactgagctggagcccgcctggagagacagacacgtgattctcaccgtggggctggaagaaaagagcatcgacttgatttctccaaccactcatccctctttttctttcttccaccactccccaccccagctgtagttaatttcagtgccttacaaatcctaagctcagagaaagttccatttccgttccagagggaagggaacctccctaggtccttccctggcttgttataacgcaaagcttggttgtttatgcaactctatcttaagaactgcccagcctcagctgaaaacccgaatctgagaaggaattgcgtcatgtaagggaagctggaattaagggagctgagccagtcatggttgtggcgtgtgagtcaggagacctaggtttcagcccctctctact

SEQ ID NO: 234 - DNA, 1834 bp, Homo sapiens
  source 1..1834: mol_type = unassigned DNA
agctgcggtgcgggggcggccaggacttcctgggggggtggggagctggcgttggagaggggttggaacgaaacaaaaatgtgatgggggcgggggaacagaacaggcaaagtgcccactgtgtgcagggcatatgcgggtacctggagggagatgaagaaggggaagagggggaggtgcgaagcactcaggtgcgggaatggaaggagcagggtagcaagaccttcatgtgcacggggcgccctggctggctcactgtctcactacgtgtcgggaagtacaagaagacacacaaaaacatcatgatcaacctgatggacattctggaagtggacaccaagaaacagattgtccgtgtggagcccttggtgaccatgggccaggtgactgccctgctgacctccattggctggactctccccgtgttgcctgagcttgatgacctcacagtggggggcttgatcatgggcacaggcatcgagtcatcatcccacaagtacggcctgttccaacacatctgcactgcttacgagctggtcctggctgatggcagctttgtgcgatgcactccgtccgaaaactcagacctgttctatgccgtaccctggtcctgtgggacgctgggtttcctggtggccgctgagatccgcatcatccctgccaagaagtacgtcaagctgcgtttcgagccagtgcggggcctggaggctatctgtgccaagttcacccacgagtcccagcggcaggagaaccacttcgtggaagggctgctctactccctggatgaggctgtcattatgacaggggtcatgacagatgaggcagagcccagcaagctgaatagcattggcaattactacaagccgtggttctttaagcatgtggagaactatctgaagacaaaccgagagggcctggagtacattcccttgagacactactaccaccgccacacgcgcagcatcttctgggagctccaggacattatcccctttggcaacaaccccatcttccgctacctctttggctggatggtgcctcccaagatctccctcctgaagctgacccagggtgagaccctgcgcaagctgtacgagcagcaccacgtggtgcaggacatgctggtgcccatgaagtgcctgcagcaggccctgcacaccttccaaaacgacatccacgtctaccccatctggctgtgtccgttcatcctgcccagccagccaggcctagtgcaccccaaaggaaatgaggcagagctctacatcgacattggagcatatggggagccgcgtgtgaaacactttgaagccaggtcctgcatgaggcagctggagaagtttgtccgcagcgtgcatggcttccagatgctgtatgccgactgctacatgaaccgggaggagttctgggagatgtttgatggctccttgtaccacaagctgcgagagaagctgggttgccaggacgccttccccgaggtgtacgacaagatctgcaaggccgccaggcactgagctggagcccgcctggagagacagacacgtgtgagtggtcaggcatcttcccttcactcaagcttggctgctttcctagatccacactttcaaagagaaacccctccagaactcccaccctgacagcccaacaccaccttcctcctggcttccagggggcagcccagtggaatggaaagaatgtgggatttggagtcagacaagcctgagtccagttccccgtttagaactcattagctgtgtgactctgggtgagtcccttaacccctctgagcccgggtctcttcattagttgaaagggatagtaatacctacttgcaggt

SEQ ID NO: 235 - DNA, 1478 bp, Homo sapiens
  source 1..1478: mol_type = unassigned DNA
cctccattggctggactctccccgtgttgcctgagcttgatgacctcacagtggggggcttgatcatgggcacaggcatcgagtcatcatcccacaagtacggcctgttccaacacatctgcactgcttacgagctggtcctggctgatggcagctttgtgcgatgcactccgtccgaaaactcagacctgttctatgccgtaccctggtcctgtgggacgctgggtttcctggtggccgctgagatccgcatcatccctgccaagaagtacgtcaagctgcgtttcgagccagtgcggggcctggaggctatctgtgccaagttcacccacgagtcccagcggcaggagaaccacttcgtggaagggctgctctactccctggatgaggctgtcattatgacaggggtcatgacagatgaggcagagcccagcaaggacattatcccctttggcaacaaccccatcttccgctacctctttggctggatggtgcctcccaagatctccctcctgaagctgacccagggtgagaccctgcgcaagctgtacgagcagcaccacgtggtgcaggacatgctggtgcccatgaagtgcctgcagcaggccctgcacaccttccaaaacgacatccacgtctaccccatctggctgtgtccgttcatcctgcccagccagccaggcctagtgcaccccaaaggaaatgaggcagagctctacatcgacattggagcatatggggagccgcgtgtgaaacactttgaagccaggtcctgcatgaggcagctggagaagtttgtccgcagcgtgcatggcttccagatgctgtatgccgactgctacatgaaccgggaggagttctgggagatgtttgatggctccttgtaccacaagctgcgagagaagctgggttgccaggacgccttccccgaggtgtacgacaagatctgcaaggccgccaggcactgagctggagcccgcctggagagacagacacgtgtgagtggtcaggcatcttcccttcactcaagcttggctgctttcctagatccacactttcaaagagaaacccctccagaactcccaccctgacagcccaacaccaccttcctcctggcttccagggggcagcccagtggaatggaaagaatgtgggatttggagtcagacaagcctgagtccagttccccgtttagaactcattagctgtgtgactctgggtgagtcccttaacccctctgagcccgggtctcttcattagttgaaagggatagtaatacctacttgcaggttgttgtcatctgagttgagcactggtcacattgaaggtgctgggtaagtggtagctcttgttgcttcccgttcagcgtcacatctgcagtggagcctgaaaaggctccacattaggtcacctgtgcacagccatggctggaatgatgaaggggatacgctggagttgccctgccatcgcctccatca

SEQ ID NO: 236 - DNA, 3464 bp, Homo sapiens
  source 1..3464: mol_type = unassigned DNA
aatcgcgaggcggcgggcgatcccgggctccccgggctgtgggctacaggcgcagagcgggccaggcgcggagctggcggcagtgacaggaggcgcgaacccgcagcgcttaccgcgcggcgccgcaccatggagcccgccgtgtcgctggccgtgtgcgcgctgctcttcctgctgtgggtgcgcctgaaggggctggagttcgtgctcatccaccagcgctgggtgttcgtgtgcctcttcctcctgccgctctcgcttatcttcgatatctactactacgtgcgcgcctgggtggtgttcaagctcagcagcgctccgcgcctgcacgagcagcgcgtgcgggacatccagaagcaggtgcgggaatggaaggagcagggtagcaagaccttcatgtgcacggggcgccctggctggctcactgtctcactacgtgtcgggaagtacaagaagacacacaaaaacatcatgatcaacctgatggacattctggaagtggacaccttccaaaacgacatccacgtctaccccatctggctgtgtccgttcatcctgcccagccagccaggcctagtgcaccccaaaggaaatgaggcagagctctacatcgacattggagcatatggggagccgcgtgtgaaacactttgaagccaggtcctgcatgaggcagctggagaagtttgtccgcagcgtgcatggcttccagatgctgtatgccgactgctacatgaaccgggaggagttctgggagatgtttgatggctccttgtaccacaagctgcgagagaagctgggttgccaggacgccttccccgaggtgtacgacaagatctgcaaggccgccaggcactgagctggagcccgcctggagagacagacacgtgtgagtggtcaggcatcttcccttcactcaagcttggctgctttcctagatccacactttcaaagagaaacccctccagaactcccaccctgacagcccaacaccaccttcctcctggcttccagggggcagcccagtggaatggaaagaatgtgggatttggagtcagacaagcctgagtccagttccccgtttagaactcattagctgtgtgactctgggtgagtcccttaacccctctgagcccgggtctcttcattagttgaaagggatagtaatacctacttgcaggttgttgtcatctgagttgagcactggtcacattgaaggtgctgggtaagtggtagctcttgttgcttcccgttcagcgtcacatctgcagtggagcctgaaaaggctccacattaggtcacctgtgcacagccatggctggaatgatgaaggggatacgctggagttgccctgccatcgcctccatcagccagacgaggtcctcacaggagaaggacagctcttccccaccctgggatctcaggagggcagccacggagtggggaggccccagatgcgctgtgccaaagccaggtccgaggccaaagttctccctgccatccttggtgccgtcctgccccttcctccttcatgcctgggcctgcaggcccaccccagccaccactgagtccactcggagtgccctgtgttcctggagaaggcattccagggttgaatcttgtcccagcctcagcctgggacacctaggtggagagagtggtctccgctctgaattggatccaggggacctgggctcattcttcttggctcaccaaccctgcaggcctcatctttcccaaaacccactttgtcttggtgggagtgggtccgcgctgctctgcagcaggggctggggagtggacagcatcaggtgggaaagtggagtccaccctcatgtttctgtaggattctcaccgtggggctggaagaaaagagcatcgacttgatttctccaaccactcatccctctttttctttcttccaccactccccaccccagctgtagttaatttcagtgccttacaaatcctaagctcagagaaagttccatttccgttccagagggaagggaacctccctaggtccttccctggcttgttataacgcaaagcttggttgtttatgcaactctatcttaagaactgcccagcctcagctgaaaacccgaatctgagaaggaattgcgtcatgtaagggaagctggaattaagggagctgagccagtcatggttgtggcgtgtgagtcaggagacctaggtttcagcccctctctactgtcagcgagctgtgcaacgtgggcaagtcattgtcctctgagctgcagtttcctcatctgtcacatcgctacagacaagacctccctggaacccttctgattgtcttagacactgtggttgcaaaacccacggaaagcctcatttgtgtggaaagtcagaggaaaaatgatccagtggacacttggggattatctgtcattcaagatccttccttcaaccccaaggtcagctcccatctcatttccagaaaggctcatacctggcttgcagggaagcatctgtcttgtcattccaggtgccagaatcctctcagagtcattgaagggtgttcacccatcccacccaaggcttggcacactgccagtgtcttagcagggtcttgtgagggctgggggcatccaggcactcagaaggcaaaggaaccaccctacccatttggcctctggagggggcagaagaaagaaataaacctcatcctatattttacaaagcatgtgaattctggcattagctctcataggagacccatgtgcttccttgctcagtgcaaaactgatgattctacttgctgtagatgaatggttaacacgagctagttaaacagtgccattgttttgccagtgaagcctccaaccctaagccactgggacggtggccagagatgccagcagcctctgtcgcccttagtcatataaccaaaatccagaccttatccacaacccggggcttggaaaggaaggtattttggaatcacaccctccggttatgttgctccagtaaaatcttgcctggaaagaggcagtcttcttagcatggtgagctgagttcatggcttttttttgtagccagtcctgtccctggccatccatgtgatggttttggatggagttaaacttgatgccagtgggcagtgcatgtggaaagtatcagagtaaggctctcccctccagagccctgagtttcttggctgcatgaaggttttctttagaatcagaattgtagccagtttctttggccagaaggatgaatacttggatattactgaaagggaggggtggagatgggtgtggcagtgtatggtgtgtgatttttattttcttctttggtcatgggggccaaggagaaaggcatgaatcttccctgtcaggctcttacagccacaggcactgtgtctactgtctggaagacatgtccccatggctgtggggccgctgcttctgtttaaataaaagtggcctggaagctggc

SEQ ID NO: 237 - DNA, 1816 bp, Homo sapiens
  source 1..1816: mol_type = unassigned DNA
gcatttccagagcagagttcagagaaaggctgggctgcttgttgctggctaaaggacaaagggtaagtttcaggaagcagaagagtgagcagatgaaattcagcactgggatcaggggagtgtctgatttgcaaaaggaaagtgcaaagacagctcctcccttctgaggaaacgaaaccaacagcagtccaagctcagtcagcagaagagataaaagcaaacaggtctgggaggcagttctgttgccactctctctcctgtcaatgatggatctcagaaataccccagccaaatctctggacaagttcattgaagactatctcttgccagacacgtgtttccgcatgcaaatcaaccatgccattgacatcatctgtgggttcctgaaggaaaggtgcttccgaggtagctcctaccctgtgtgtgtgtccaaggtggtaaagggtggctcctcaggcaagggcaccaccctcagaggccgatctgacgctgacctggttgtcttcctcagtcctctcaccacttttcaggatcagttaaatcgccggggagagttcatccaggaaattaggagacagctggaagcctgtcaaagagagagagcattttccgtgaagtttgaggtccaggctccacgctggggcaacccccgtgcgctcagcttcgtactgagttcgctccagctcggggagggggtggagttcgatgtgctgcctgcctttgatgccctgggtcagttgactggcggctataaacctaacccccaaatctatgtcaagctcatcgaggagtgcaccgacctgcagaaagagggcgagttctccacctgcttcacagaactacagagagacttcctgaagcagcgccccaccaagctcaagagcctcatccgcctagtcaagcactggtaccaaaattgtaagaagaagcttgggaagctgccacctcagtatgccctggagctcctgacggtctatgcttgggagcgagggagcatgaaaacacatttcaacacagcccagggatttcggacggtcttggaattagtcataaactaccagcaactctgcatctactggacaaagtattatgactttaaaaaccccattattgaaaagtacctgagaaggcagctcacgaaacccaggcctgtgatcctggacccggcggaccctacaggaaacttgggtggtggagacccaaagggttggaggcagctggcacaagaggctgaggcctggctgaattacccatgctttaagaattgggatgggtccccagtgagctcctggattctgctggctgaaagcaacagtgcagacgatgagaccgacgatcccaggaggtatcagaaatatggttacattggaacacatgagtaccctcatttctctcatagacccagcacactccaggcagcatccaccccacaggcagaagaggactggacctgcaccatcctctgaatgccagtgcatcttgggggaaagggctccagtgttatctggaccagttccttcattttcaggtgggactcttgatccagagaggacaaagctcctcagtgagctggtgtataatccaggacagaacccaggtctcctgactcctggccttctatgccctctatcctatcatagataacattctccacagcctcacttcattccacctattctctgaaaatattccctgagagagaacagagagatttagataagagaatgaaattccagccttgactttcttctgtgcacctgatgggagggtaatgtctaatgtattatcaataacaataaaaataaagcaaatacca

SEQ ID NO: 238 - DNA, 1376 bp, Homo sapiens
  source 1..1376: mol_type = unassigned DNA
gaggcagttctgttgccactctctctcctgtcaatgatggatctcagaaataccccagccaaatctctggacaagttcattgaagactatctcttgccagacacgtgtttccgcatgcaaatcaaccatgccattgacatcatctgtgggttcctgaaggaaaggtgcttccgaggtagctcctaccctgtgtgtgtgtccaaggtggtaaagggtggctcctcaggcaagggcaccaccctcagaggccgatctgacgctgacctggttgtcttcctcagtcctctcaccacttttcaggatcagttaaatcgccggggagagttcatccaggaaattaggagacagctggaagcctgtcaaagagagagagcattttccgtgaagtttgaggtccaggctccacgctggggcaacccccgtgcgctcagcttcgtactgagttcgctccagctcggggagggggtggagttcgatgtgctgcctgcctttgatgccctgggtcagttgactggcggctataaacctaacccccaaatctatgtcaagctcatcgaggagtgcaccgacctgcagaaagagggcgagttctccacctgcttcacagaactacagagagacttcctgaagcagcgccccaccaagctcaagagcctcatccgcctagtcaagcactggtaccaaaattgtaagaagaagcttgggaagctgccacctcagtatgccctggagctcctgacggtctatgcttgggagcgagggagcatgaaaacacatttcaacacagcccagggatttcggacggtcttggaattagtcataaactaccagcaactctgcatctactggacaaagtattatgactttaaaaaccccattattgaaaagtacctgagaaggcagctcacgaaacccaggcctgtgatcctggacccggcggaccctacaggaaacttgggtggtggagacccaaagggttggaggcagctggcacaagaggctgaggcctggctgaattacccatgctttaagaattgggatgggtccccagtgagctcctggattctgctggtaaacctcacactggttggcagaaggaactatataattagtgaacatgcggtgaatttgcaacagacaagaggagcctcattatcctatagtttccaggttgcttagggaggcagaaatcacagcaaggaaaaccttcaataataaacagacgtctcataaaattaattgcaacccaacctctctctctacttaaaattagcatctatttccagctctgctttcaatgccccatatgaatacatgtgaactccctccctctcttcctccctgtctccttctctctctctctgtccctcattaaa

SEQ ID NO: 239 - DNA, 1684 bp, Homo sapiens
  source 1..1684: mol_type = unassigned DNA
ccagagcagagttcagagaaaggctgggctgcttgttgctggctaaaggacaaagggtaagtttcaggaagcagaagagtgagcagatgaaattcagcactgggatcaggggagtgtctgatttgcaaaaggaaagtgcaaagacagctcctcccttctgaggaaacgaaaccaacagcagtccaagctcagtcagcagaagagataaaagcaaacaggtctgggaggcagttctgttgccactctctctcctgtcaatgatggatctcagaaataccccagccaaatctctggacaagttcattgaagactatctcttgccagacacgtgtttccgcatgcaaatcaaccatgccattgacatcatctgtgggttcctgaaggaaaggtgcttccgaggtagctcctaccctgtgtgtgtgtccaaggtggtaaagggtggctcctcaggcaagggcaccaccctcagaggccgatctgacgctgacctggttgtcttcctcagtcctctcaccacttttcaggatcagttaaatcgccggggagagttcatccaggaaattaggagacagctggaagcctgtcaaagagagagagcattttccgtgaagtttgaggtccaggctccacgctggggcaacccccgtgcgctcagcttcgtactgagttcgctccagctcggggagggggtggagttcgatgtgctgcctgcctttgatgccctgggtcagttgactggcggctataaacctaacccccaaatctatgtcaagctcatcgaggagtgcaccgacctgcagaaagagggcgagttctccacctgcttcacagaactacagagagacttcctgaagcagcgccccaccaagctcaagagcctcatccgcctagtcaagcactggtaccaaaattgtaagaagaagcttgggaagctgccacctcagtatgccctggagctcctgacggtctatgcttgggagcgagggagcatgaaaacacatttcaacacagcccagggatttcggacggtcttggaattagtcataaactaccagcaactctgcatctactggacaaagtattatgactttaaaaaccccattattgaaaagtacctgagaaggcagctcacgaaacccaggcctgtgatcctggacccggcggaccctacaggaaacttgggtggtggagacccaaagggttggaggcagctggcacaagaggctgaggcctggctgaattacccatgctttaagaattgggatgggtccccagtgagctcctggattctgctgacccagcacactccaggcagcatccaccccacaggcagaagaggactggacctgcaccatcctctgaatgccagtgcatcttgggggaaagggctccagtgttatctggaccagttccttcattttcaggtgggactcttgatccagagaggacaaagctcctcagtgagctggtgtataatccaggacagaacccaggtctcctgactcctggccttctatgccctctatcctatcatagataacattctccacagcctcacttcattccacctattctctgaaaatattccctgagagagaacagagagatttagataagagaatgaaattccagccttgactttcttctgtgcacctgatgggagggtaatgtctaatgtattatc

SEQ ID NO: 240 - DNA, 1990 bp, Homo sapiens
  source 1..1990: mol_type = unassigned DNA
gaagcagaagagtgagcagatgaaattcagcactgggatcaggggagtgtctgatttgcaaaaggaaagtgcaaagacagctcctcccttctgaggaaacgaaaccaacagcagtccaagctcagtcagcagaagagataaaagcaaacaggtctgggaggcagttctgttgccactctctctcctgtcaatgatggatctcagaaataccccagccaaatctctggacaagttcattgaagactatctcttgccagacacgtgtttccgcatgcaaatcaaccatgccattgacatcatctgtgggttcctgaaggaaaggtgcttccgaggtagctcctaccctgtgtgtgtgtccaaggtggtaaagggtggctcctcaggcaagggcaccaccctcagaggccgatctgacgctgacctggttgtcttcctcagtcctctcaccacttttcaggatcagttaaatcgccggggagagttcatccaggaaattaggagacagctggaagcctgtcaaagagagagagcattttccgtgaagtttgaggtccaggctccacgctggggcaacccccgtgcgctcagcttcgtactgagttcgctccagctcggggagggggtggagttcgatgtgctgcctgcctttgatgccctgggtcagttgactggcggctataaacctaacccccaaatctatgtcaagctcatcgaggagtgcaccgacctgcagaaagagggcgagttctccacctgcttcacagaactacagagagacttcctgaagcagcgccccaccaagctcaagagcctcatccgcctagtcaagcactggtaccaaaattgtaagaagaagcttgggaagctgccacctcagtatgccctggagctcctgacggtctatgcttgggagcgagggagcatgaaaacacatttcaacacagcccagggatttcggacggtcttggaattagtcataaactaccagcaactctgcatctactggacaaagtattatgactttaaaaaccccattattgaaaagtacctgagaaggcagctcacgaaacccaggcctgtgatcctggacccggcggaccctacaggaaacttgggtggtggagacccaaagggttggaggcagctggcacaagaggctgaggcctggctgaattacccatgctttaagaattgggatgggtccccagtgagctcctggattctgctggtgagacctcctgcttcctccctgccattcatccctgcccctctccatgaagcttgagacatatagctggagaccattctttccaaagaacttacctcttgccaaaggccatttatattcatatagtgacaggctgtgctccatattttacagtcattttggtcacaatcgagggtttctggaattttcacatcccttgtccagaattcattcccctaagagtaataataaataatctctaacaccatttattgactgtctgcttcgggctcaggttctgtcctaagccctttaatatgcactctctcattaaatagtcacaacaatcccatgaggcatttttaaaaattttttattattttagattcagagggcacatgtgccatttgttacacagctatattgtgtaatggtggggtttgggcctctattgatcctgtcgcccaaatagtgaacagagtacccaaaaagaattttttcaacctttgcctttctcccttcctcctccctgttggagtccctagtgtctattgttcccatctttagcagatgttaagtatttgattttctgtttctgggttaattcacttcggataatggcctccagctgcaaccatgatttcattctttcttatggctgcataatactccatggtgtagatataccacactttctttatccagttcacactgatgggcacttaagttgattccatgactttgctattgtgaatcgtactgcgataaacatacgagtgccgg

SEQ ID NO: 241 - DNA, 3613 bp, Homo sapiens
  source 1..3613: mol_type = unassigned DNA
agttggtaaactcactgcaaggggcagggcagagcctctgagcttaagttagttttgtttccctgtcccggatacaagagttggtaagctcgctgcagtgggtggagagaggcctctagacttcagtttcagtttcctggctctgggcagcagcaagaattcctctgcctcccatcctaccattcactgtcttgccggcagccagctgagagcaatgggaaatggggagtcccagctgtcctcggtgcctgctcagaagctgggttggtttatccaggaatacctgaagccctacgaagaatgtcagacactgatcgacgagatggtgaacaccatctgtgacgtcctgcaggaacccgaacagttccccctggtgcagggagtggccataggtggctcctatggacggaaaacagtcttaagaggcaactccgatggtacccttgtcctcttcttcagtgacttaaaacaattccaggatcagaagagaagccaacgtgacatcctcgataaaactggggataagctgaagttctgtctgttcacgaagtggttgaaaaacaatttcgagatccagaagtcccttgatgggttcaccatccaggtgttcacaaaaaatcagagaatctctttcgaggtgctggccgccttcaacgctctgagcttaaatgataatcccagcccctggatctatcgagagctcaaaagatccttggataagacaaatgccagtcctggtgagtttgcagtctgcttcactgaactccagcagaagttttttgacaaccgtcctggaaaactaaaggatttgatcctcttgataaagcactggcatcaacagtgccagaaaaaaatcaaggatttaccctcgctgtctccgtatgccctggagctgcttacggtgtatgcctgggaacaggggtgcagaaaagacaactttgacattgctgaaggcgtcagaaccgtactggagctgatcaaatgccaggagaagctgtgtatctattggatggtcaactacaactttgaagatgagaccatcaggaacatcctgctgcaccagctccaatcagcgaggccagtaatcttggatccagttgacccaaccaataatgtgagtggagataaaatatgctggcaatggctgaaaaaagaagctcaaacctggttgacttctcccaacctggataatgagttacctgcaccatcttggaatgttctgcctgcaccactcttcacgaccccaggccaccttctggataagttcatcaaggagtttctccagcccaacaaatgcttcctagagcagattgacagtgctgttaacatcatccgtacattccttaaagaaaactgcttccgacaatcaacagccaagatccagattgtccggggaggatcaaccgccaaaggcacagctctgaagactggctctgatgccgatctcgtcgtgttccataactcacttaaaagctacacctcccaaaaaaacgagcggcacaaaatcgtcaaggaaatccatgaacagctgaaagccttttggagggagaaggaggaggagcttgaagtcagctttgagcctcccaagtggaaggctcccagggtgctgagcttctctctgaaatccaaagtcctcaacgaaagtgtcagctttgatgtgcttcctgcctttaatgcactgggtcagctgagttctggctccacacccagccccgaggtttatgcagggctcattgatctgtataaatcctcggacctcccgggaggagagttttctacctgtttcacagtcctgcagcgaaacttcattcgctcccggcccaccaaactaaaggatttaattcgcctggtgaagcactggtacaaagagtgtgaaaggaaactgaagccaaaggggtctttgcccccaaagtatgccttggagctgctcaccatctatgcctgggagcaggggagtggagtgccggattttgacactgcagaaggtttccggacagtcctggagctggtcacacaatatcagcagctctgcatcttctggaaggtcaattacaactttgaagatgagaccgtgaggaagtttctactgagccagttgcagaaaaccaggcctgtgatcttggacccagccgaacccacaggtgacgtgggtggaggggaccgttggtgttggcatcttctggcaaaagaagcaaaggaatggttatcctctccctgcttcaaggatgggactggaaacccaataccaccttggaaagtgccgacaatgcagacaccaggaagttgtggagctaggatccatcctattgtcaatgagatgttctcatccagaagccatagaatcctgaataataattctaaaagaaacttctagagatcatctggcaatcgcttttaaagactcggctcaccgtgagaaagagtcactcacatccattcttcccttgatggtccctattcctccttcccttgcttcttggacttcttgaaatcaatcaagactgcaaaccctttcataaagtcttgccttgctgaactccctctctgcaggcagcctgcctttaaaaatagttgctgtcatccactttatgtgcatcttatttctgtcaacttgtattttttttcttgtatttttccaattagctcctcctttttccttccagtctaaaaaaggaatcctctgtgtcttcaaagcaaagctctttactttccccttggttctcataactctgtgatcttgctctcggtgcttccaactcatccacgtcctgtctgtttcctctgtatacaaaaccctttctgcccctgctgacacagacatcctctatgccagcagccagccaaccctttcattagaacttcaagctctccaaaggctcagattataactgttgtcatatttatatgaggctgttgtcttttccttctgagcctgcctttctcccccccacccaggagtatcctcttgccaaatcaaaagactttttccttgggctttagccttaaagatacttgaaggtctaggtgctttaacctcacataccctcacttaaacttttatcactgttgcatataccagttgtgatacaataaagaatgtatctggattttgtgcctagttcctagcacacagcttcaaaaattctagagtttcctgataggagtgtcttttgtattcataacaagcccttttcacccatgcctgggtttatgctaacaaggttacccatggtgggcccttagtttcaaggaaggagttggccaagccagaaagaccaagcatgtggttaaagcattggaattttcagccccatcccacccccaatctccaaggaggtgatggggctggaaattgagttcaattttaacatggccagtgatttaagcaatgctgcctatgtaaagaaaccccaataaaaactctggacagtgaggcttggggagcttcctgattggcagacattccaatgtactaggaaggtagcgcatcttgattccacagggacaaaggctcctgagctctgggcccttccagtgcttgccaccctacatactctttgtctggctcttcatttgtattctttataataaaatggtgattgtaagtagagca

SEQ ID NO: 242 - DNA, 4734 bp, Homo sapiens
  source 1..4734: mol_type = unassigned DNA
aaactcactgcaaggggcagggcagagcctctgagcttaagttagttttgtttccctgtcccggatacaagagttggtaagctcgctgcagtgggtggagagaggcctctagacttcagtttcagtttcctggctctgggcagcagcaagaattcctctgcctcccatcctaccattcactgtcttgccggcagccagctgagagcaatgggaaatggggagtcccagctgtcctcggtgcctgctcagaagctgggttggtttatccaggaatacctgaagccctacgaagaatgtcagacactgatcgacgagatggtgaacaccatctgtgacgtcctgcaggaacccgaacagttccccctggtgcagggagtggccataggtggctcctatggacggaaaacagtcttaagaggcaactccgatggtacccttgtcctcttcttcagtgacttaaaacaattccaggatcagaagagaagccaacgtgacatcctcgataaaactggggataagctgaagttctgtctgttcacgaagtggttgaaaaacaatttcgagatccagaagtcccttgatgggttcaccatccaggtgttcacaaaaaatcagagaatctctttcgaggtgctggccgccttcaacgctctgagcttaaatgataatcccagcccctggatctatcgagagctcaaaagatccttggataagacaaatgccagtcctggtgagtttgcagtctgcttcactgaactccagcagaagttttttgacaaccgtcctggaaaactaaaggatttgatcctcttgataaagcactggcatcaacagtgccagaaaaaaatcaaggatttaccctcgctgtctccgtatgccctggagctgcttacggtgtatgcctgggaacaggggtgcagaaaagacaactttgacattgctgaaggcgtcagaaccgtactggagctgatcaaatgccaggagaagctgtgtatctattggatggtcaactacaactttgaagatgagaccatcaggaacatcctgctgcaccagctccaatcagcgaggccagtaatcttggatccagttgacccaaccaataatgtgagtggagataaaatatgctggcaatggctgaaaaaagaagctcaaacctggttgacttctcccaacctggataatgagttacctgcaccatcttggaatgttctgcctgcaccactcttcacgaccccaggccaccttctggataagttcatcaaggagtttctccagcccaacaaatgcttcctagagcagattgacagtgctgttaacatcatccgtacattccttaaagaaaactgcttccgacaatcaacagccaagatccagattgtccggggaggatcaaccgccaaaggcacagctctgaagactggctctgatgccgatctcgtcgtgttccataactcacttaaaagctacacctcccaaaaaaacgagcggcacaaaatcgtcaaggaaatccatgaacagctgaaagccttttggagggagaaggaggaggagcttgaagtcagctttgagcctcccaagtggaaggctcccagggtgctgagcttctctctgaaatccaaagtcctcaacgaaagtgtcagctttgatgtgcttcctgcctttaatgcactgggtcagctgagttctggctccacacccagccccgaggtttatgcagggctcattgatctgtataaatcctcggacctcccgggaggagagttttctacctgtttcacagtcctgcagcgaaacttcattcgctcccggcccaccaaactaaaggatttaattcgcctggtgaagcactggtacaaagagtgtgaaaggaaactgaagccaaaggggtctttgcccccaaagtatgccttggagctgctcaccatctatgcctgggagcaggggagtggagtgccggattttgacactgcagaaggtttccggacagtcctggagctggtcacacaatatcagcagctctgcatcttctggaaggtcaattacaactttgaagatgagaccgtgaggaagtttctactgagccagttgcagaaaaccaggcctgtgatcttggacccagccgaacccacaggtgacgtgggtggaggggaccgttggtgttggcatcttctggcaaaagaagcaaaggaatggttatcctctccctgcttcaaggatgggactggaaacccaataccaccttggaaagtgccggtaaaagtcatctaaaggaggcgttgtctggaaatagccctgtaacaggcttgaatcaaagaacttctcctactgtagcaacctgaaattaactcagacacaaataaaggaaacccagctcacaggagcttaaacagctggtcagccccctaagcccccactacaagtgatcctcaggcaggtaaccccagattcatgcactgtagggtgctgcgcagcatccctagtctctacccagtagatgccactagccctcctctcccagtgacaaccaaaagtcttcagacattgtcaaacgttcccctgggttcacagatctttctgcctttggcttttggctccaccctctttagctgttaatttgagtacttatggccctgaaagcggccacggtgcctccagatggcaggtttgcaatccaagcaggaagaaggaaaagatacccaaaggtcaagaacacagtgattttattagaagtttcatccgcaaattttcttccatttcattgctcagaaatgtcatgtggctacctgtaacttgaaggtggctacaaagatgactgtggacgtgggttgcactggccacccaaggatgtctgccacacctctccaaagccctccctacctaccaagatatacctgatatattccaccaggatatcctccctccagatatacttggttctctccaccaggttctttctttaaagcaggatttctcaactttgatacttactcacatttggggctagacagttctttgtttggaggctctcttgtgcattgtaggatgttgagcagcatctctggcctgtacccagtagatgccacccagttgtgacaattaaaagtgtcttgagactttatcatgtgtcttctgccctaggtgagaacccttgcactagaggaaccctacaccccaaccctggggggaatgtagggaagaggtggccaagccaaccgtggggttagctctaattattaagatatgcattataaataaataccaaaaaattgtctctggcaatagttaccttcccagatacaggtccccccttttttcccctaactcttttaagcaatgattgtaactattaggagacattgctctcccacgtatgtttttctttttagacaatgcagacaccaggaagttgtggagctaggatccatcctattgtcaatgagatgttctcatccagaagccatagaatcctgaataataattctaaaagaaacttctagagatcatctggcaatcgcttttaaagactcggctcaccgtgagaaagagtcactcacatccattcttcccttgatggtccctattcctccttcccttgcttcttggacttcttgaaatcaatcaagactgcaaaccctttcataaagtcttgccttgctgaactccctctctgcaggcagcctgcctttaaaaatagttgctgtcatccactttatgtgcatcttatttctgtcaacttgtattttttttcttgtatttttccaattagctcctcctttttccttccagtctaaaaaaggaatcctctgtgtcttcaaagcaaagctctttactttccccttggttctcataactctgtgatcttgctctcggtgcttccaactcatccacgtcctgtctgtttcctctgtatacaaaaccctttctgcccctgctgacacagacatcctctatgccagcagccagccaaccctttcattagaacttcaagctctccaaaggctcagattataactgttgtcatatttatatgaggctgttgtcttttccttctgagcctgcctttctcccccccacccaggagtatcctcttgccaaatcaaaagactttttccttgggctttagccttaaagatacttgaaggtctaggtgctttaacctcacataccctcacttaaacttttatcactgttgcatataccagttgtgatacaataaagaatgtatctggattttgtgcctagttcctagcacacagcttcaaaaattctagagtttcctgataggagtgtcttttgtattcataacaagcccttttcacccatgcctgggtttatgctaacaaggttacccatggtgggcccttagtttcaaggaaggagttggccaagccagaaagaccaagcatgtggttaaagcattggaattttcagccccatcccacccccaatctccaaggaggtgatggggctggaaattgagttcaattttaacatggccagtgatttaagcaatgctgcctatgtaaagaaaccccaataaaaactctggacagtgaggcttggggagcttcctgattggcagacattccaatgtactaggaaggtagcgcatcttgattccacagggacaaaggctcctgagctctgggcccttccagtgcttgccaccctacatactctttgtctggctcttcatttgtattctttataataaaatggtgattgtaagta

SEQ ID NO: 243 - DNA, 2072 bp, Homo sapiens
  source 1..2072: mol_type = unassigned DNA
gctcgctgcagtgggtggagagaggcctctagacttcagtttcagtttcctggctctgggcagcagcaagaattcctctgcctcccatcctaccattcactgtcttgccggcagccagctgagagcaatgggaaatggggagtcccagctgtcctcggtgcctgctcagaagctgggttggtttatccaggaatacctgaagccctacgaagaatgtcagacactgatcgacgagatggtgaacaccatctgtgacgtcctgcaggaacccgaacagttccccctggtgcagggagtggccataggtggctcctatggacggaaaacagtcttaagaggcaactccgatggtacccttgtcctcttcttcagtgacttaaaacaattccaggatcagaagagaagccaacgtgacatcctcgataaaactggggataagctgaagttctgtctgttcacgaagtggttgaaaaacaatttcgagatccagaagtcccttgatgggttcaccatccaggtgttcacaaaaaatcagagaatctctttcgaggtgctggccgccttcaacgctctgagtaagcattgctgggtgtcaggagagaaaagccaaagaagcgggtgccagacagctctgtgcaacctctaggccatgagtgggatagataccactgctgctttaaaaaatgggagaccatagaccctcaggagagaagaatcccttctaccctggactcgctctcttctctggaactaacttctcccccataccctgattgtctttggagaaaatgttctggattctagaatctaaggcagagccttttaagccatactgtacacataaatcacctggaaccttgttaaaatgcagatcctgactcaggaggtctgagttagagcccaggatttcatatttctagccagctccatgatgagctgctggtccgcagatcatgcttgcaggttttgaccagagtcagtgttggttagagtaagaggatgaggcagacatctgggaaaagtccagctggggcaagcatttgaagtctgccttcctaccaggtcaaaatcaaggcaacgaccttccatagataactatcaaagcttgagggggtgccttgaacccaactcctaaatccctaagacctgcccacctcttgtgtctcctgtctcagcaaacattcccacactcttgcatattgttaaagtaacctctgcttaccaggcttctggtttaataaaagatggctagagtgactccatcttaaagcaagtagctaggcactcaaaaggaacctacaggcttaatacttgggtctgaaaatagccacagtctaagctgaccaccaattataattgcagaatatttaaggccatacaaaacatctcccactaagcctacaaaatgtccaggtgtcctaaaagttcagcccacttaaaggcagcattaatgagcaggtttaggttgaaggattaatggtcatcaataccactgttaagaagaaaattcttggccaaattgaatttaatggagtttaactgagcagacaattcacaaatctagaagcctcctgagccagagtaggttcagagagtcttgaacacagccacgtggtggaagaagatttatggacaggaaaaggaaaatgatgtactgaaaatgaaagtgaggtacagaaacagccagactggttatagctcagcattggccttatttgaacgagatttgaacagttggccacctttgattggccgaaactcagtgattggcacaagagtaggttgcagtctgtttacacatccttttaggttatagttcaccatgtacagagaaattttaggccaaacttaaaatatgtaaggaggcagctttaggctaaacttgatttaacagcaccaataccccctacctttagtgagcacatctgcacattccaattttaatgacagctccttagaatttcttatcaacgaagacactaacaaagaatggcgcattcctccttctcctttctgaggatgccctaccctgtaacaaagtcgtttctaataaatttgcttctttcaccata

SEQ ID NO: 244 - DNA, 6719 bp, Homo sapiens
  source 1..6719: mol_type = unassigned DNA
cccaagtttggggaagacaggaactgcagcgcccctccccgtttcacgccacgcgcgggaccgaggacctaggacctggccagctgggcgtggttcggagagccgggcgggaaaacgaaaccagaaatccgaaggccgcgccagagccctgcttccccttgcacctgcgccgggcggccatggacttgtacagcaccccggccgctgcgctggacaggttcgtggccagaaggctgcagccgcggaaggagttcgtagagaaggcgcggcgcgctctgggcgccctggccgctgccctgagggagcgcgggggccgcctcggtgctgctgccccgcgggtgctgaaaactgtcaagggaggctcctcgggccggggcacagctctcaagggtggctgtgattctgaacttgtcatcttcctcgactgcttcaagagctatgtggaccagagggcccgccgtgcagagatcctcagtgagatgcgggcatcgctggaatcctggtggcagaacccagtccctggtctgagactcacgtttcctgagcagagcgtgcctggggccctgcagttccgcctgacatccgtagatcttgaggactggatggatgttagcctggtgcctgccttcaatgtcctgggtcaggccggctccggcgtcaaacccaagccacaagtctactctaccctcctcaacagtggctgccaagggggcgagcatgcggcctgcttcacagagctgcggaggaactttgtgaacattcgcccagccaagttgaagaacctaatcttgctggtgaagcactggtaccaccaggtgtgcctacaggggttgtggaaggagacgctgcccccggtctatgccctggaattgctgaccatcttcgcctgggagcagggctgtaagaaggatgctttcagcctagccgaaggcctccgaactgtcctgggcctgatccaacagcatcagcacctgtgtgttttctggactgtcaactatggcttcgaggaccctgcagttgggcagttcttgcagcggcagcttaagagacccaggcctgtgatcctggacccagctgaccccacatgggacctggggaatggggcagcctggcactgggatttgctagcccaggaggcagcatcctgctatgaccacccatgctttctgagggggatgggggacccagtgcagtcttggaaggggccgggccttccacgtgctggatgctcaggtttgggccaccccatccagctagaccctaaccagaagacccctgaaaacagcaagagcctcaatgctgtgtacccaagagcagggagcaaacctccctcatgcccagctcctggccccactggggcagccagcatcgtcccctctgtgccgggaatggccttggacctgtctcagatccccaccaaggagctggaccgcttcatccaggaccacctgaagccgagcccccagttccaggagcaggtgaaaaaggccattgacatcatcttgcgctgcctccatgagaactgtgttcacaaggcctcaagagtcagtaaagggggctcatttggccggggcacagacctaagggatggctgtgatgttgaactcatcatcttcctcaactgcttcacggactacaaggaccaggggccccgccgcgcagagatccttgatgagatgcgagcgcagctagaatcctggtggcaggaccaggtgcccagcctgagccttcagtttcctgagcagaatgtgcctgaggctctgcagttccagctggtgtccacagccctgaagagctggacggatgttagcctgctgcctgccttcgatgctgtggggcagctcagttctggcaccaaaccaaatccccaggtctactcgaggctcctcaccagtggctgccaggagggcgagcataaggcctgcttcgcagagctgcggaggaacttcatgaacattcgccctgtcaagctgaagaacctgattctgctggtgaagcactggtaccgccaggttgcggctcagaacaaaggaaaaggaccagcccctgcctctctgcccccagcctatgccctggagctcctcaccatctttgcctgggagcagggctgcaggcaggattgtttcaacatggcccaaggcttccggacggtgctggggctcgtgcaacagcatcagcagctctgtgtctactggacggtcaactatagcactgaggacccagccatgagaatgcaccttcttggccagcttcgaaaacccagacccctggtcctggaccccgctgatcccacctggaacgtgggccacggtagctgggagctgttggcccaggaagcagcagcgctggggatgcaggcctgctttctgagtagagacgggacatctgtgcagccctgggatgtgatgccagccctcctttaccaaaccccagctggggaccttgacaagttcatcagtgaatttctccagcccaaccgccagttcctggcccaggtgaacaaggccgttgataccatctgttcatttttgaaggaaaactgcttccggaattctcccatcaaagtgatcaaggtggtcaagggtggctcttcagccaaaggcacagctctgcgaggccgctcagatgccgacctcgtggtgttcctcagctgcttcagccagttcactgagcagggcaacaagcgggccgagatcatctccgagatccgagcccagctggaggcatgtcaacaggagcggcagttcgaggtcaagtttgaagtctccaaatgggagaatccccgcgtgctgagcttctcactgacatcccagacgatgctggaccagagtgtggactttgatgtgctgccagcctttgacgccctaggccagctggtctctggctccaggcccagctctcaagtctacgtcgacctcatccacagctacagcaatgcgggcgagtactccacctgcttcacagagctacaacgggacttcatcatctctcgccctaccaagctgaagagcctgatccggctggtgaagcactggtaccagcagtgtaccaagatctccaaggggagaggctccctacccccacagcacgggctggaactcctgactgtgtatgcctgggagcagggcgggaaggactcccagttcaacatggctgagggcttccgcacggtcctggagctggtcacccagtaccgccagctctgtatctactggaccatcaactacaacgccaaggacaagactgttggagacttcctgaaacagcagcttcagaagcccaggcctatcatcctggatccggctgacccgacaggcaacctgggccacaatgcccgctgggacctgctggccaaggaagctgcagcctgcacatctgccctgtgctgcatgggacggaatggcatccccatccagccatggccagtgaaggctgctgtgtgaagttgagaaaatcagcggtcctactggatgaagagaagatggacaccagccctcagcatgaggaaattcagggtcccctaccagatgagagagattgtgtacatgtgtgtgtgagcacatgtgtgcatgtgtgtgcacacgtgtgcatgtgtgtgttttagtgaatctgctctcccagctcacacactcccctgcctcccatggcttacacactaggatccagactccatggtttgacaccagcctgcgtttgcagcttctctgtcacttccatgactctatcctcataccaccactgctgcttcccacccagctgagaatgccccctcctccctgactcctctctgcccatgcaaattagctcacatctttcctcctgctgcaatccatcccttcctcccattggcctctccttgccaaatctaaatagtttatatagggatggcagagagttcccatctcatctgtcagccacagtcatttggtactggctacctggagccttatcttctgaagggttttaaagaatggccaattagctgagaagaattatctaatcaattagtgatgtctgccatggatgcagtagaggaaagtggtggtacaagtgccatgattgattagcaatgtctgcactggatacggaaaaaagaaggtgcttgcaggtttacagtgtatatgtgggctattgaagagccctctgagctcggttgctagcaggagagcatgcccatattggcttactttgtctgccacagacacagacagagggagttgggacatgcatgctatggggaccctcttgttggacacctaattggatgcctcttcatgagaggcctccttttcttcaccttttatgctgcactcctcccctagtttacacatcttgatgctgtggctcagtttgccttcctgaatttttattgggtccctgttttctctcctaacatgctgagattctgcatccccacagcctaaactgagccagtggccaaacaaccgtgctcagcctgtttctctctgccctctagagcaaggcccaccaggtccatccaggaggctctcctgacctcaagtccaacaacagtgtccacactagtcaaggttcagcccagaaaacagaaagcactctaggaatcttaggcagaaagggattttatctaaatcactggaaaggctggaggagcagaaggcagaggccaccactggactattggtttcaatattagaccactgtagccgaatcagaggccagagagcagccactgctactgctaatgccaccactacccctgccatcactgccccacatggacaaaactggagtcgagacctaggttagattcctgcaaccacaaacatccatcagggatggccagctgccagagctgcgggaagacggatcccacctccctttcttagcagaatctaaattacagccagacctctggctgcagaggagtctgagacatgtatgattgaatgggtgccaagtgccagggggcggagtccccagcagatgcatcctggccatctgttgcgtggatgagggagtgggtctatctcagaggaaggaacaggaaacaaagaaaggaagccactgaacatcccttctctgctccacaggagtgccttagacagcctgactctccacaaaccactgttaaaacttacctgctaggaatgctagattgaatgggatgggaagagccttccctcattattgtcattcttggagagaggtgagcaaccaagggaagctcctctgattcacctagaacctgttctctgccgtctttggctcagcctacagagactagagtaggtgaagggacagaggacagggcttctaatacctgtgccatattgacagcctccatccctgtcccccatcttggtgctgaaccaacgctaagggcaccttcttagactcacctcatcgatactgcctggtaatccaaagctagaactctcaggaccccaaactccacctcttggattggccctggctgctgccacacacatatccaagagctcagggccagttctggtgggcagcagagacctgctctgccaagttgtccagcagcagagtggccctggcctgggcatcacaagccagtgatgctcctgggaagaccaggtggcaggtcgcagttgggtaccttccattcccaccacacagactctgggcctccccgcaaaatggctccagaattagagtaattatgagatggtgggaaccagagcaactcaggtgcatgatacaaggagaggttgtcatctgggtagggcagagaggagggcttgctcatctgaacaggggtgtatttcattccaggccctcagtctttggcaatggccaccctggtgttggcatattggccccactgtaacttttgggggcttcccggtctagccacaccctcggatggaaagacttgactgcataaagatgtcagttctccctgagttgattgataggcttaatggtcaccctaaaaacacccacatatgcttttcgatggaaccaggtaagttgacgctaaagttcttatggaaaaatacacacgcaatagctaggaaaacacagggaaagaagagttctgagcagggcctagtcttagccaatattaaaacatactatgaagcctctgatacttaaacagcatggcgctggtacgtaaatagaccaatgcagttaggtggctctttccaagactctggggaaaaaagtagtaaaaagctaaatgcaatcaatcagcaattgaaagctaagtgagagagccagagggcctccttggtggtaaaagagggttgcatttcttgcagccagaaggcagagaaagtgaagaccaagtccagaactgaatcctaagaaatgcaggactgcaaagaaattggtgtgtgtgtgtgtgtgtgtgtgtgtgtgtgtgtttaatttttaaaaagtttttattgagatacaagtcaataccataaagctctcacccttctaaagtgtacaattcagtggtgtgagtatattcataagatttatacttggtgtctattcataagacttatatccagcatattcataactagagccatatcacagatgcattcatcataataattccagacattttcatcaccctaaaaggaaaccctgaaacccattagcagtcattccccattcctccaacccattctctccctaatccctagaaaccaccaatctgctgtgtatttcatctattgccaacatttcatataaatggcatcatacaa

SEQ ID NO: 245 - DNA, 6262 bp, Homo sapiens
  source 1..6262: mol_type = unassigned DNA
gccctgcttccccttgcacctgcgccgggcggccatggacttgtacagcaccccggccgctgcgctggacaggttcgtggccagaaggctgcagccgcggaaggagttcgtagagaaggcgcggcgcgctctgggcgccctggccgctgccctgagggagcgcgggggccgcctcggtgctgctgccccgcgggtgctgaaaactgtcaagggaggctcctcgggccggggcacagctctcaagggtggctgtgattctgaacttgtcatcttcctcgactgcttcaagagctatgtggaccagagggcccgccgtgcagagatcctcagtgagatgcgggcatcgctggaatcctggtggcagaacccagtccctggtctgagactcacgtttcctgagcagagcgtgcctggggccctgcagttccgcctgacatccgtagatcttgaggactggatggatgttagcctggtgcctgccttcaatgtcctgggtcaggccggctccggcgtcaaacccaagccacaagtctactctaccctcctcaacagtggctgccaagggggcgagcatgcggcctgcttcacagagctgcggaggaactttgtgaacattcgcccagccaagttgaagaacctaatcttgctggtgaagcactggtaccaccaggtgtgcctacaggggttgtggaaggagacgctgcccccggtctatgccctggaattgctgaccatcttcgcctgggagcagggctgtaagaaggatgctttcagcctagccgaaggcctccgaactgtcctgggcctgatccaacagcatcagcacctgtgtgttttctggactgtcaactatggcttcgaggaccctgcagttgggcagttcttgcagcggcagcttaagagacccaggcctgtgatcctggacccagctgaccccacatgggacctggggaatggggcagcctggcactgggatttgctagcccaggaggcagcatcctgctatgaccacccatgctttctgagggggatgggggacccagtgcagtcttggaaggggccgggccttccacgtgctggatgctcaggtttgggccaccccatccagctagaccctaaccagaagacccctgaaaacagcaagagcctcaatgctgtgtacccaagagcagggagcaaacctccctcatgcccagctcctggccccactgggcagccagcatcgtcctctgtgccgggaatggccttggacctgtctcagatccccaccaaggagctggaccgcttcatccaggaccacctgaagccgagcccccagttccaggagcaggtgaaaaaggccattgacatcatcttgcgctgcctccatgagaactgtgttcacaaggcctcaagagtcagtaaagggggctcatttggccggggcacagacctaagggatggctgtgatgttgaactcatcatcttcctcaactgcttcacggactacaaggaccaggggccccgccgcgcagagatccttgatgagatgcgagcgcagctagaatcctggtggcaggaccaggtgcccagcctgagccttcagtttcctgagcagaatgtgcctgaggctctgcagttccagctggtgtccacagccctgaagagctggacggatgttagcctgctgcctgccttcgatgctgtggggcagctcagttctggcaccaaaccaaatccccaggtctactcgaggctcctcaccagtggctgccaggagggcgagcataaggcctgcttcgcagagctgcggaggaacttcatgaacattcgccctgtcaagctgaagaacctgattctgctggtgaagcactggtaccgccaggttgcggctcagaacaaaggaaaaggaccagcccctgcctctctgcccccagcctatgccctggagctcctcaccatctttgcctgggagcagggctgcaggcaggattgtttcaacatggcccaaggcttccggacggtgctggggctcgtgcaacagcatcagcagctctgtgtctactggacggtcaactatagcactgaggacccagccatgagaatgcaccttcttggccagcttcgaaaacccagacccctggtcctggaccccgctgatcccacctggaacgtgggccacggtagctgggagctgttggcccaggaagcagcagcgctggggatgcaggcctgctttctgagtagagacgggacatctgtgcagccctgggatgtgatgccagccctcctttaccaaaccccagctggggaccttgacaagttcatcagtgaatttctccagcccaaccgccagttcctggcccaggtgaacaaggccgttgataccatctgttcatttttgaaggaaaactgcttccggaattctcccatcaaagtgatcaaggtggtcaagggtggctcttcagccaaaggcacagctctgcgaggccgctcagatgccgacctcgtggtgttcctcagctgcttcagccagttcactgagcagggcaacaagcgggccgagatcatctccgagatccgagcccagctggaggcatgtcaacaggagcggcagttcgaggtcaagtttgaagtctccaaatgggagaatccccgcgtgctgagcttctcactgacatcccagacgatgctggaccagagtgtggactttgatgtgctgccagcctttgacgccctaggccagctggtctctggctccaggcccagctctcaagtctacgtcgacctcatccacagctacagcaatgcgggcgagtactccacctgcttcacagagctacaacgggacttcatcatctctcgccctaccaagctgaagagcctgatccggctggtgaagcactggtaccagcagtgtaccaagatctccaaggggagaggctccctacccccacagcacgggctggaactcctgactgtgtatgcctgggagcagggcgggaaggactcccagttcaacatggctgagggcttccgcacggtcctggagctggtcacccagtaccgccagctctgtatctactggaccatcaactacaacgccaaggacaagactgttggagacttcctgaaacagcagcttcagaagcccaggcctatcatcctggatccggctgacccgacaggcaacctgggccacaatgcccgctgggacctgctggccaaggaagctgcagcctgcacatctgccctgtgctgcatgggacggaatggcatccccatccagccatggccagtgaaggctgctgtgtgaagttgagaaaatcagcggtcctactggatgaagagaagatggacaccagccctcagcatgaggaaattcagggtcccctaccagatgagagagattgtgtacatgtgtgtgtgagcacatgtgtgcatgtgtgtgcacacgtgtgcatgtgtgtgttttagtgaatctgctctcccagctcacacactcccctgcctcccatggcttacacactaggatccagactccatggtttgacaccagcctgcgtttgcagcttctctgtcacttccatgactctatcctcataccaccactgctgcttcccacccagctgagaatgccccctcctccctgactcctctctgcccatgcaaattagctcacatctttcctcctgctgcaatccatcccttcctcccattggcctctccttgccaaatctaaatagtttatatagggatggcagagagttcccatctcatctgtcagccacagtcatttggtactggctacctggagccttatcttctgaagggttttaaagaatggccaattagctgagaagaattatctaatcaattagtgatgtctgccatggatgcagtagaggaaagtggtggtacaagtgccatgattgattagcaatgtctgcactggatacggaaaaaagaaggtgcttgcaggtttacagtgtatatgtgggctattgaagagccctctgagctcggttgctagcaggagagcatgcccatattggcttactttgtctgccacagacacagacagagggagttgggacatgcatgctatggggaccctcttgttggacacctaattggatgcctcttcatgagaggcctccttttcttcaccttttatgctgcactcctcccctagtttacacatcttgatgctgtggctcagtttgccttcctgaatttttattgggtccctgttttctctcctaacatgctgagattctgcatccccacagcctaaactgagccagtggccaaacaaccgtgctcagcctgtttctctctgccctctagagcaaggcccaccaggtccatccaggaggctctcctgacctcaagtccaacaacagtgtccacactagtcaaggttcagcccagaaaacagaaagcactctaggaatcttaggcagaaagggattttatctaaatcactggaaaggctggaggagcagaaggcagaggccaccactggactattggtttcaatattagaccactgtagccgaatcagaggccagagagcagccactgctactgctaatgccaccactacccctgccatcactgccccacatggacaaaactggagtcgagacctaggttagattcctgcaaccacaaacatccatcagggatggccagctgccagagctgcgggaagacggatcccacctccctttcttagcagaatctaaattacagccagacctctggctgcagaggagtctgagacatgtatgattgaatgggtgccaagtgccagggggcggagtccccagcagatgcatcctggccatctgttgcgtggatgagggagtgggtctatctcagaggaaggaacaggaaacaaagaaaggaagccactgaacatcccttctctgctccacaggagtgccttagacagcctgactctccacaaaccactgttaaaacttacctgctaggaatgctagattgaatgggatgggaagagccttccctcattattgtcattcttggagagaggtgagcaaccaagggaagctcctctgattcacctagaacctgttctctgccgtctttggctcagcctacagagactagagtaggtgaagggacagaggacagggcttctaatacctgtgccatattgacagcctccatccctgtcccccatcttggtgctgaaccaacgctaagggcaccttcttagactcacctcatcgatactgcctggtaatccaaagctagaactctcaggaccccaaactccacctcttggattggccctggctgctgccacacacatatccaagagctcagggccagttctggtgggcagcagagacctgctctgccaagttgtccagcagcagagtggccctggcctgggcatcacaagccagtgatgctcctgggaagaccaggtggcaggtcgcagttgggtaccttccattcccaccacacagactctgggcctccccgcaaaatggctccagaattagagtaattatgagatggtgggaaccagagcaactcaggtgcatgatacaaggagaggttgtcatctgggtagggcagagaggagggcttgctcatctgaacaggggtgtatttcattccaggccctcagtctttggcaatggccaccctggtgttggcatattggccccactgtaacttttgggggcttcccggtctagccacaccctcggatggaaagacttgactgcataaagatgtcagttctccctgagttgattgataggcttaatggtcaccctaaaaacacccacatatgcttttcgatggaaccaggtaagttgacgctaaagttcttatggaaaaatacacacgcaatagctaggaaaacacagggaaagaagagttctgagcagggcctagtcttagccaatattaaaacatactatgaagcctctgatacttaaacagcatggcgctggtacgtaaatagaccaatgcagttaggtggctctttccaagactctggggaaaaaagtagtaaaaagctaaatgcaatcaatcagcaattgaaagctaagtgagagagccagagggcctccttggtggtaaaagagggttgcatttcttgcagccagaaggcagagaaagtgaagaccaagtccagaactgaatcctaagaaatgcaggactgcaaagaaattggtgtgtgtgtgtgtgtgtgtgtgtgtgtgtgtgtttaatttttaaaaagtttttattgaga

SEQ ID NO: 246 - DNA, 2059 bp, Homo sapiens
  source 1..2059: mol_type = unassigned DNA
tgactagacggccagcctgttaaggtggccccagatattccagcctcagcccagagtcctcctgtgcccctactgcagcaagggtgtctccaagaagggggacctggagtcagcccgtcacacctggtttcctctctgctagggtccctcctcccacagagcactggagggcagctgaggaggagctaccttaaaaaaggaggtgtgtgccagggagctgggtaggagcctggctatatatctgcccagcagcggtactctcgggacagagatggcactgatgcaggaactgtatagcacaccagcctccaggctggactccttcgtggctcagtggctgcagccccaccgggagtggaaggaagaggtgctagacgctgtgcggaccgtggaggagtttctgaggcaggagcatttccaggggaagcgtgggctggaccaggatgtgcgggtgctgaaggtagtcaaggtgggctccttcgggaatggcacggttctcaggagcaccagagaggtggagctggtggcgtttctgagctgtttccacagcttccaggaggcagccaagcatcacaaagatgttctgaggctgatatggaaaaccatgtggcaaagccaggacctgctggacctcgggctcgaggacctgaggatggagcagagagtccccgatgctctcgtcttcaccatccagaccagggggactgcggagcccatcacggtcaccattgtgcctgcctacagagccctggggccttctcttcccaactcccagccaccccctgaggtctatgtgagcctgatcaaggcctgcggtggtcctggaaatttctgcccatccttcagcgagctgcagagaaatttcgtgaaacatcggccaactaagctgaagagcctcctgcgcctggtgaaacactggtaccagcagtatgtgaaagccaggtcccccagagccaatctgccccctctctatgctcttgaacttctaaccatctatgcctgggaaatgggtactgaagaagacgagaatttcatgttggacgaaggcttcaccactgtgatggacctgctcctggagtatgaagtcatctgtatctactggaccaagtactacacactccacaatgcaatcattgaggattgtgtcagaaaacagctcaaaaaagagaggcccatcatcctggatccggccgaccccaccctcaacgtggcagaagggtacagatgggacatcgttgctcagagggcctcccagtgcctgaaacaggactgttgctatgacaacagggagaaccccatctccagctggaacgtgaagagggcacgagacatccacttgacagtggagcagaggggttacccagatttcaacctcatcgtgaacccttatgagcccataaggaaggttaaagagaaaatccggaggaccaggggctactctggcctgcagcgtctgtccttccaggttcctggcagtgagaggcagcttctcagcagcaggtgctccttagccaaatatgggatcttctcccacactcacatctatctgctggagaccatcccctccgagatccaggtcttcgtgaagaatcctgatggtgggagctacgcctatgccatcaaccccaacagcttcatcctgggtctgaagcagcagattgaagaccagcaggggcttcctaaaaagcagcagcagctggaattccaaggccaagtcctgcaggactggttgggtctggggatctatggcatccaagacagtgacactctcatcctctcgaagaagaaaggagaggctctgtttccagccagttagttttctctgggagacttctctgtacatttctgccatgtactccagaactcatcctgtcaatcactctgtcccattgtctactgggaaggtcccaggtcttcaccagttttacaatgagttatcccaggccagacgtggtagctcacacctgtaatcccagaactttgggaggccgaggtgggaggagcgcttgagccgaggagttcaagaccagcctgggtatcacagggagaccccgtctct

SEQ ID NO: 247 - DNA, 1492 bp, Homo sapiens
  source 1..1492: mol_type = unassigned DNA
tctccaagaagggggacctggagtcagcccgtcacacctggtttcctctctgctagggtccctcctcccacagagcactggagggcagctgaggaggagctaccttaaaaaaggaggtgtgtgccagggagctgggtaggagcctggctatatatctgcccagcagcggtactctcgggacagagatggcactgatgcaggaactgtatagcacaccagcctccaggctggactccttcgtggctcagtggctgcagccccaccgggagtggaaggaagaggtgctagacgctgtgcggaccgtggaggagtttctgaggcaggagcatttccaggggaagcgtgggctggaccaggatgtgcgggtgctgaaggtagtcaaggtgggctccttcgggaatggcacggttctcaggagcaccagagaggtggagctggtggcgtttctgagctgtttccacagcttccaggaggcagccaagcatcacaaagatgttctgaggctgatatggaaaaccatgtggcaaagccaggacctgctggacctcgggctcgaggacctgaggatggagcagagagtccccgatgctctcgtcttcaccatccagaccagggggactgcggagcccatcacggtcaccattgtgcctgcctacagagccctggggccttctcttcccaactcccagccaccccctgaggtctatgtgagcctgatcaaggcctgcggtggtcctggaaatttctgcccatccttcagcgagctgcagagaaatttcgtgaaacatcggccaactaagctgaagagcctcctgcgcctggtgaaacactggtaccagcaggcccatcatcctggatccggccgaccccaccctcaacgtggcagaagggtacagatgggacatcgttgctcagagggcctcccagtgcctgaaacaggactgttgctatgacaacagggagaaccccatctccagctggaacgtgaagagggcacgagacatccacttgacagtggagcagaggggttacccagatttcaacctcatcgtgaacccttatgagcccataaggaaggttaaagagaaaatccggaggaccaggggctactctggcctgcagcgtctgtccttccaggttcctggcagtgagaggcagcttctcagcagcaggtgctccttagccaaatatgggatcttctcccacactcacatctatctgctggagaccatcccctccgagatccaggtcttcgtgaagaatcctgatggtgggagctacgcctatgccatcaaccccaacagcttcatcctgggtctgaagcagcagattgaagaccagcaggggcttcctaaaaagcagcagcagctggaattccaaggccaagtcctgcaggactggttgggtctggggatctatggcatccaagacagtgacactctcatcctctcgaagaagaaaggagaggctctgtttccagccagttagtttt

SEQ ID NO: 248 - DNA, 2266 bp, Homo sapiens
  source 1..2266: mol_type = unassigned DNA
aaacgctccagctggccgactcggagacaatggcgagaggcctcagagttcggcttcttacctgctttgcataggcagcaatctcctgctagtcccgcctccctctggcattctggcgcgcgaatggaggagccgagaagagagcgcagttctgattggagaacgcgcgtgtttacattctcacctctcccgggaagtggacgaatttagaccgcctcttccttcccgttgtttaaggcagttggttgccctcctgtccgtcagaggtgcagtaccagaggtggcgtgctgccgatttcgcgtttgccttgctggatgattccgcttgtttgccggctgcgtgagtgcttagagcttttcggtggaagatgccggacagtaacttcgcagagcgcagcgaggagcaggtgtctggtgctaaagtcatcgctcaggccctgaaaacgcaagatgtggagtacatatttggcatcgtaggcatcccagtgaccgaaatcgccattgctgcccagcagctaggcatcaagtacatcgggatgaggaatgagcaagcggcttgttatgctgcctccgcgattggatatctgacaagcaggccaggagtctgccttgttgtttctggcccaggtctcatccatgccttgggcggtatggcaaatgcaaacatgaactgctggcccttgcttgtgattggtggttcctctgaaagaaaccaagaaacaatgggagctttccaggagtttcctcaggttgaagcttgtagattatataccaagttctctgcccgcccaagcagcatagaagctattccttttgttattgaaaaggcagtgagaagcagtatctatggtcgtccaggtgcttgctatgttgacataccagcagattttgtgaaccttcaggtgaatgtgaattctataaagtacatggaacgctgcatgtcacctcctattagcatggcagaaacctctgctgtgtgcacggcggcttctgttattaggaatgccaaacaaccccttcttatcatcgggaaaggtgctgcttacgctcatgcagaagagagtatcaagaaattggtggagcaatataaactgccatttttgcccacccctatggggaagggtgttgtccctgacaaccatccatactgtgtaggtgcagccagatccagggctttgcaatttgctgatgtaattgtgttatttggtgccagactaaattggattttacattttggactgcctccaagatatcagccagatgtgaagtttatccaggttgatatctgtgcagaagaattggggaataatgtaaagcccgctgttactttgctaggaaacatacatgctgtcactaagcagcttttagaggaacttgataaaacaccatggcagtatcctccagagagcaagtggtggaaaactctgagagaaaaaatgaagagcaatgaagctgcatccaaggaactagcttctaaaaaatccctgcctatgaattattacacagtattctaccatgttcaagaacaactacctagagactgtttcgtggtaagtgaaggagcaaatactatggacattggacggactgtgcttcagaactaccttcctcgtcacaggcttgatgctggtactttcggaacaatgggagttggtttgggatttgctattgcagctgccgtggtggctaaagatagaagccctgggcaatggatcatctgtgtggaaggagacagtgcatttgggttttctggcatggaggtagaaaccatctgcaggtacaacttgccaatcatactgttggtagtgaataacaatggaatttaccaaggttttgatacagatacttggaaagaaatgttaaaatttcaagatgctactgcagtggtccctccaatgtgtttgctgccaaattcacattatgagcaagtcatgactgcatttggaggcaaagggtattttgtacaaacaccagaagaactccaaaaatccctgaggcagagcctagcagacacaactaaaccttctcttatcaacatcatgattgagccacaagccacacggaaggcccaggattttcattggctgacccgctctaatatgtaaataaagacgccagttggtggtcttgagttttctctttcttgcaagatgaaattttattttccacagcaaaattactctactgttaaaattgtgcaaaataaaataaacatttaaaatgacattttacagtaaaggaattgattaaaaacagaaaaagttag

SEQ ID NO: 249 - DNA, 3506 bp, Homo sapiens
  source 1..3506: mol_type = unassigned DNA
gtcccgcctcccagcgactctcggcggtgccggagtcgggtgggttggcggctataaagctggtggcgaaggggaggcgccgcggactgtcctttcgtggctcactccctttcctctgctgccgctcggtcacgcttgtgcccgaaggaggaaacagtgacagacctggagactgcagttctctatccttcacacagctctttcaccatgcctggatcacttcctttgaatgcagaagcttgctggccaaaagatgtgggaattgttgcccttgagatctattttccttctcaatatgttgatcaagcagagttggaaaaatatgatggtgtagatgctggaaagtataccattggcttgggccaggccaagatgggcttctgcacagatagagaagatattaactctctttgcatgactgtggttcagaatcttatggagagaaataacctttcctatgattgcattgggcggctggaagttggaacagagacaatcatcgacaaatcaaagtctgtgaagactaatttgatgcagctgtttgaagagtctgggaatacagatatagaaggaatcgacacaactaatgcatgctatggaggcacagctgctgtcttcaatgctgttaactggattgagtccagctcttgggatggacggtatgccctggtagttgcaggagatattgctgtatatgccacaggaaatgctagacctacaggtggagttggagcagtagctctgctaattgggccaaatgctcctttaatttttgaacgagggcttcgtgggacacatatgcaacatgcctatgatttttacaagcctgatatgctatctgaatatcctatagtagatggaaaactctccatacagtgctacctcagtgcattagaccgctgctattctgtctactgcaaaaagatccatgcccagtggcagaaagagggaaatgataaagattttaccttgaatgattttggcttcatgatctttcactcaccatattgtaaactggttcagaaatctctagctcggatgttgctgaatgacttccttaatgaccagaatagagataaaaatagtatctatagtggcctggaagcctttggggatgttaaattagaagacacctactttgatagagatgtggagaaggcatttatgaaggctagctctgaactcttcagtcagaaaacaaaggcatctttacttgtatcaaatcaaaatggaaatatgtacacatcttcagtatatggttcccttgcatctgttctagcacagtactcacctcagcaattagcagggaagagaattggagtgttttcttatggttctggtttggctgccactctgtactctcttaaagtcacacaagatgctacaccggggtctgctcttgataaaataacagcaagtttatgtgatcttaaatcaaggcttgattcaagaactggtgtggcaccagatgtcttcgctgaaaacatgaagctcagagaggacacccatcatttggtcaactatattccccagggttcaatagattcactctttgaaggaacgtggtacttagttagggtggatgaaaagcacagaagaacttacgctcggcgtcccactccaaatgatgacactttggatgaaggagtaggacttgtgcattcaaacatagcaactgagcatattccaagccctgccaagaaagtaccaagactccctgccacagcagcagaacctgaagcagctgtcattagtaatggggaacattaagatactctgtgaggtgcaagacttcagggtggggtgggcatggggtgggggtatgggaacagttggaggaatgggatatctggggataattttaaaggattacatgttatgtaaatttttatgtgactgacatggagcctggatgactatcgtgtacttgggaaagtctctttgctctatttgctgacatgcttcctgttgtggtctggccaatgccaaatgtactcgaatgatgttaagggctctgtaaaacttcatacctctttggccatttgtatgcatgatgtttggtttttaaacatggtataatgaattgtgtacttctgtcagaagaaagcagaggtactaatctccaattaaaaaattttttaacatgtaagaattttgtactttgaacaacaagattacagaaagtacctgtggtttttggaaaacatttctagcttggggaatgtgacaacattccccagtgtggtaaaattggggtaaaatgtggtaaaatgtgatacgcacaaaccctttgaaaatagcaaaacaaacatgccctttttctaaaattgataaatcctaaagaggaagaaaagagctgggacaataaaacactggctctggaatctggaatgttaagtccaggccagcagtgacaaaagttattgtaatgacctctgaacagagaaacactgccattgaagaggcttctggtatagaaaacatggtacattcaggagctgtgaatatagctctaggtgtgctcctgaatcagttcatggtagattatgctgaacaacagtgagatgttattggaggtgtggatgagggagtttgttgttgcagtccttctttgcaccttattttaaagaataaatgaaacatttttctggttacttttttaaaaatttaaaatggaagggaagaataggggcagggcattattaggctatttctgatgcttcagtgttataaattcaacatagaggctgacaacctaaattcatggtgtaacacagctcttttccttttccttttttttttttttttggtatctgttcaatgaaaataaggtatgacccaagtttttacctagtctgactagaagtattccacttcaaggtctgaagtaggacttttaccttaaaaaacaacaacaaacaaaactatcacacaggatagataagaagattggttaaacagttttgtgtagatctttttggtgctgaactatgacatgagccttatagattgtaaaatagggatagttggaactaatgtacagaactaaattttttaaactttatttgctgttaaattctgtgaagtttcagttatctaaaataaatatacacaaatatgaaatataatgtttcagattgcaaggtaatatgtaatagtagtgtttgtaagatactcttgtctaatattaactagtagtattttgatttgtacagtcataatttgttaaaatgacttcatttaacattcactgatgtagattaataatgtaagttctgatttaaagaatggtggcaaaatggtgcatgtaatacttttgcaagtgttggggagatcggtatgttttgaaaagagtaatttaacttttgggtgccaggaaatgggttttctcaaagtccattgccggcaatgggcaggcctgcaaatactggcacagagcattaatcatacaccttattaacggtgaggtgaataactttgaaataaagttttagagaaatgtttca

SEQ ID NO: 250 - DNA, 3466 bp, Homo sapiens
  source 1..3466: mol_type = unassigned DNA
attggctgtgggagccaccgtcccgcctcccagcgactctcggcggtgccggagtcgggtgggttggcggctataaagctggtggcgaaggggaggcgccgcggactgtcctttcgtggctcactccctttcctctgctgccgctcggtcacgcttgctctttcaccatgcctggatcacttcctttgaatgcagaagcttgctggccaaaagatgtgggaattgttgcccttgagatctattttccttctcaatatgttgatcaagcagagttggaaaaatatgatggtgtagatgctggaaagtataccattggcttgggccaggccaagatgggcttctgcacagatagagaagatattaactctctttgcatgactgtggttcagaatcttatggagagaaataacctttcctatgattgcattgggcggctggaagttggaacagagacaatcatcgacaaatcaaagtctgtgaagactaatttgatgcagctgtttgaagagtctgggaatacagatatagaaggaatcgacacaactaatgcatgctatggaggcacagctgctgtcttcaatgctgttaactggattgagtccagctcttgggatggacggtatgccctggtagttgcaggagatattgctgtatatgccacaggaaatgctagacctacaggtggagttggagcagtagctctgctaattgggccaaatgctcctttaatttttgaacgagggcttcgtgggacacatatgcaacatgcctatgatttttacaagcctgatatgctatctgaatatcctatagtagatggaaaactctccatacagtgctacctcagtgcattagaccgctgctattctgtctactgcaaaaagatccatgcccagtggcagaaagagggaaatgataaagattttaccttgaatgattttggcttcatgatctttcactcaccatattgtaaactggttcagaaatctctagctcggatgttgctgaatgacttccttaatgaccagaatagagataaaaatagtatctatagtggcctggaagcctttggggatgttaaattagaagacacctactttgatagagatgtggagaaggcatttatgaaggctagctctgaactcttcagtcagaaaacaaaggcatctttacttgtatcaaatcaaaatggaaatatgtacacatcttcagtatatggttcccttgcatctgttctagcacagtactcacctcagcaattagcagggaagagaattggagtgttttcttatggttctggtttggctgccactctgtactctcttaaagtcacacaagatgctacaccggggtctgctcttgataaaataacagcaagtttatgtgatcttaaatcaaggcttgattcaagaactggtgtggcaccagatgtcttcgctgaaaacatgaagctcagagaggacacccatcatttggtcaactatattccccagggttcaatagattcactctttgaaggaacgtggtacttagttagggtggatgaaaagcacagaagaacttacgctcggcgtcccactccaaatgatgacactttggatgaaggagtaggacttgtgcattcaaacatagcaactgagcatattccaagccctgccaagaaagtaccaagactccctgccacagcagcagaacctgaagcagctgtcattagtaatggggaacattaagatactctgtgaggtgcaagacttcagggtggggtgggcatggggtgggggtatgggaacagttggaggaatgggatatctggggataattttaaaggattacatgttatgtaaatttttatgtgactgacatggagcctggatgactatcgtgtacttgggaaagtctctttgctctatttgctgacatgcttcctgttgtggtctggccaatgccaaatgtactcgaatgatgttaagggctctgtaaaacttcatacctctttggccatttgtatgcatgatgtttggtttttaaacatggtataatgaattgtgtacttctgtcagaagaaagcagaggtactaatctccaattaaaaaattttttaacatgtaagaattttgtactttgaacaacaagattacagaaagtacctgtggtttttggaaaacatttctagcttggggaatgtgacaacattccccagtgtggtaaaattggggtaaaatgtggtaaaatgtgatacgcacaaaccctttgaaaatagcaaaacaaacatgccctttttctaaaattgataaatcctaaagaggaagaaaagagctgggacaataaaacactggctctggaatctggaatgttaagtccaggccagcagtgacaaaagttattgtaatgacctctgaacagagaaacactgccattgaagaggcttctggtatagaaaacatggtacattcaggagctgtgaatatagctctaggtgtgctcctgaatcagttcatggtagattatgctgaacaacagtgagatgttattggaggtgtggatgagggagtttgttgttgcagtccttctttgcaccttattttaaagaataaatgaaacatttttctggttacttttttaaaaatttaaaatggaagggaagaataggggcagggcattattaggctatttctgatgcttcagtgttataaattcaacatagaggctgacaacctaaattcatggtgtaacacagctcttttccttttccttttttttttttttttggtatctgttcaatgaaaataaggtatgacccaagtttttacctagtctgactagaagtattccacttcaaggtctgaagtaggacttttaccttaaaaaacaacaacaaacaaaactatcacacaggatagataagaagattggttaaacagttttgtgtagatctttttggtgctgaactatgacatgagccttatagattgtaaaatagggatagttggaactaatgtacagaactaaattttttaaactttatttgctgttaaattctgtgaagtttcagttatctaaaataaatatacacaaatatgaaatataatgtttcagattgcaaggtaatatgtaatagtagtgtttgtaagatactcttgtctaatattaactagtagtattttgatttgtacagtcataatttgttaaaatgacttcatttaacattcactgatgtagattaataatgtaagttctgatttaaagaatggtggcaaaatggtgcatgtaatacttttgcaagtgttggggagatcggtatgttttgaaaagagtaatttaacttttgggtgccaggaaatgggttttctcaaagtccattgccggcaatgggcaggcctgcaaatactggcacagagcattaatcatacaccttattaacggtgaggtgaataactttgaaataaagttttagagaaatgtttca

SEQ ID NO: 251 - DNA, 500 bp, Homo sapiens
  source 1..500: mol_type = unassigned DNA
tttgcccgggaggatggggcaccgtgagcggggccgggcgggggttccctcgtgagggacctgaggccgaccgtagcggatctgagaagatccgagaacacaggcgagtcgcggaggggagaacgcgagagggcgttgaggtctaggtattctaacgacagaggagttggaggtgccagagaggcagctgtgaccgcctagagctctttcaccatgcctggatcacttcctttgaatgcagaagcttgctggccaaaagatgtgggaattgttgcccttgagatctattttccttctcaatatgttgatcaagcagagttggaaaaatatgatggtgtagatgctggaaagtataccattggcttgggccaggccaagatgggcttctgcacagatagagaagatattaactctctttgcatgactgtggttcagaatcttatggagagaaataacctttcctatgattgcattgggcggctggaagttggaacagagac

SEQ ID NO: 252 - DNA, 3195 bp, Homo sapiens
  source 1..3195: mol_type = unassigned DNA
gcggactgtcctttcgtggctcactccctttcctctgctgccgctcggtcacgcttgctctttcaccatgcctggatcacttcctttgaatgcagaagcttgctggccaaaagatgtgggaattgttgcccttgagatctattttccttctcaatatgttgatcaagcagagttggaaaaatatgatggtgtagatgctggaaagtataccattggcttgggccaggccaagatgggcttctgcacagatagagaagatattaactctctttgcatgactgtggttcagaatcttatggagagaaataacctttcctatgattgcattgggcggctggaagttggaacagagacaatcatcgacaaatcaaagtctgtgaagactaatttgatgcagctgtttgaagagtctgggaatacagatatagaaggaatcgacacaactaatgctgttaactggattgagtccagctcttgggatggacggtatgccctggtagttgcaggagatattgctgtatatgccacaggaaatgctagacctacaggtggagttggagcagtagctctgctaattgggccaaatgctcctttaatttttgaacgagggcttcgtgggacacatatgcaacatgcctatgatttttacaagcctgatatgctatctgaatatcctatagtagatggaaaactctccatacagtgctacctcagtgcattagaccgctgctattctgtctactgcaaaaagatccatgcccagtggcagaaagagggaaatgataaagattttaccttgaatgattttggcttcatgatctttcactcaccatattgtaaactggttcagaaatctctagctcggatgttgctgaatgacttccttaatgaccagaatagagataaaaatagtatctatagtggcctggaagcctttggggatgttaaattagaagacacctactttgatagagatgtggagaaggcatttatgaaggctagctctgaactcttcagtcagaaaacaaaggcatctttacttgtatcaaatcaaaatggaaatatgtacacatcttcagtatatggttcccttgcatctgttctagcacagtactcacctcagcaattagcagggaagagaattggagtgttttcttatggttctggtttggctgccactctgtactctcttaaagtcacacaagatgctacaccggggtctgctcttgataaaataacagcaagtttatgtgatcttaaatcaaggcttgattcaagaactggtgtggcaccagatgtcttcgctgaaaacatgaagctcagagaggacacccatcatttggtcaactatattccccagggttcaatagattcactctttgaaggaacgtggtacttagttagggtggatgaaaagcacagaagaacttacgctcggcgtcccactccaaatgatgacactttggatgaaggagtaggacttgtgcattcaaacatagcaactgagcatattccaagccctgccaagaaagtaccaagactccctgccacagcagcagaacctgaagcagctgtcattagtaatggggaacattaagatactctgtgaggtgcaagacttcagggtggggtgggcatggggtgggggtatgggaacagttggaggaatgggatatctggggataattttaaaggattacatgttatgtaaatttttatgtgactgacatggagcctggatgactatcgtgtacttgggaaagtctctttgctctatttgctgacatgcttcctgttgtggtctggccaatgccaaatgtactcgaatgatgttaagggctctgtaaaacttcatacctctttggccatttgtatgcatgatgtttggtttttaaacatggtataatgaattgtgtacttctgtcagaagaaagcagaggtactaatctccaattaaaaaattttttaacatgtaagaattttgtactttgaacaacaagattacagaaagtacctgtggtttttggaaaacatttctagcttggggaatgtgacaacattccccagtgtggtaaaattggggtaaaatgtggtaaaatgtgatacgcacaaaccctttgaaaatagcaaaacaaacatgccctttttctaaaattgataaatcctaaagaggaagaaaagagctgggacaataaaacactggctctggaatctggaatgttaagtccaggccagcagtgacaaaagttattgtaatgacctctgaacagagaaacactgccattgaagaggcttctggtatagaaaacatggtacattcaggagctgtgaatatagctctaggtgtgctcctgaatcagttcatggtagattatgctgaacaacagtgagatgttattggaggtgtggatgagggagtttgttgttgcagtccttctttgcaccttattttaaagaataaatgaaacatttttctggttacttttttttttttttttggtatctgttcaatgaaaataaggtatgacccaagtttttacctagtctgactagaagtattccacttcaaggtctgaagtaggacttttaccttaaaaaacaacaacaaacaaaactatcacacaggatagataagaagattggttaaacagttttgtgtagatctttttggtgctgaactatgacatgagccttatagattgtaaaatagggatagttggaactaatgtacagaactaaattttttaaactttatttgctgttaaattctgtgaagtttcagttatctaaaataaatatacacaaatatgaaatataatgtttcagattgcaaggtaatatgtaatagtagtgtttgtaagatactcttgtctaatattaactagtagtattttgatttgtacagtcataatttgttaaaatgacttcatttaacattcactgatgtagattaataatgtaagttctgatttaaagaatggtggcaaaatggtgcatgtaatacttttgcaagtgttggggagatcggtatgttttgaaaagagtaatttaacttttgggtgccaggaaatgggttttctcaaagtccattgccggcaatgggcaggcctgcaaatactggcacagagcattaatcatacaccttattaacggtgaggtgaataactttgaaataaagttttagagaaatgtttc

SEQ ID NO: 253 - DNA, 2428 bp, Homo sapiens
  source 1..2428: mol_type = unassigned DNA
ggtttctgctgggtttctgaactgctgggtttctgcttgctcctctggagatgcagcgtctgttgactccagtgaagcgcattctgcaactgacaagagcggtgcaggaaacctccctcacacctgctcgcctgctcccagtagcccaccaaaggttttctacagcctctgctgtccccctggccaaaacagatacttggccaaaggacgtgggcatcctggccctggaggtctacttcccagcccaatatgtggaccaaactgacctggagaagtataacaatgtggaagcaggaaagtatacagtgggcttgggccagacccgtatgggcttctgctcagtccaagaggacatcaactccctgtgcctgacggtggtgcaacggctgatggagcgcatacagctcccatgggactctgtgggcaggctggaagtaggcactgagaccatcattgacaagtccaaagctgtcaaaacagtgctcatggaactcttccaggattcaggcaatactgatattgagggcatagataccaccaatgcctgctacggtggtactgcctccctcttcaatgctgccaactggatggagtccagttcctgggatggtcgttatgccatggtggtctgtggagacattgccgtctatcccagtggtaatgctcgtcccacaggtggggccggagctgtggctatgctgattgggcccaaggcccctctggccctggagcgagggctgaggggaacccatatggagaatgtgtatgacttctacaaaccaaatttggcctcggagtacccaatagtggatgggaagctttccatccagtgctacttgcgggccttggatcgatgttacacatcataccgtaaaaaaatccagaatcagtggaagcaagctggcagcgatcgacccttcacccttgacgatttacagtacatgatctttcatacacccttttgcaagatggtccagaagtctctggctcgcctgatgttcaatgacttcctgtcagccagcagtgacacacaaaccagcttatataaggggctggaggctttcggggggctaaagctggaagacacctacaccaacaaggacctggataaagcacttctaaaggcctctcaggacatgttcgacaagaaaaccaaggcttccctttacctctccactcacaatgggaacatgtacacctcatccctgtacgggtgcctggcctcgcttctgtcccaccactctgcccaagaactggctggctccaggattggtgccttctcttatggctctggtttagcagcaagtttcttttcatttcgagtatcccaggatgctgctccaggctctcccctggacaagttggtgtccagcacatcagacctgccaaaacgcctagcctcccgaaagtgtgtgtctcctgaggagttcacagaaataatgaaccaaagagagcaattctaccataaggtgaatttctccccacctggtgacacaaacagccttttcccaggtacttggtacctggagcgagtggacgagcagcatcgccgaaagtatgcccggcgtcccgtctaaaggtgttctgcagatccatggaaagcttcctgggaaacgtatgctagcagagcttctccccgtgaatcatatttttaagatcccactcttagctggtaaatgaatttgaatcgacatagtagccccataagcatcagccctgtagagtgaggagccatctctagcgggcccttcattcctctccatgctgcaatcactgtcctgggcttatggtgctatggactaggggtcctttgtgaaagagcaagatggagcaatggagagaagacctcttcctgaatcactggactccagaaatgtgcatgcagatcagctgttgccttcaagatccagataaactttcctgtcatgtgttagaactttattattattaatattgttaaacttctgtgctgttcctgtgaatctccaaattttgtaccttgttctaagctaatatatagcaattaaaaagagagaaagaggaaatgattcctgcgtttcttggaacccagaatacaaacccagcctaacatgcagcaagcctgctagaccttgtgggtcagagggctgggtccttgcctcacaggctgcctctgtccccttgcaattccattctatttctgccacatgccaagtgctatgacaggtacaaggcaaataagaacggtagaacacagcttcccccagcccacttccctgttctaaagacaccacatagacagagagcagcagacaggggccagcaggagctgtagttcagatcttcttggtcattccttgccgctgttatttgaacaaataaacacagcgcaaaggttaacaagtttttgccttctatagccaaaaataaaaaaataaataaattttga

SEQ ID NO: 254 - DNA, 1925 bp, Homo sapiens
  source 1..1925: mol_type = unassigned DNA
atctctttcaaggtttctgctgggtttctgaactgctgggtttctgcttgctcctctggagatgcagcgtctgttgactccagtgaagcgcattctgcaactgacaagagcggtgcaggaaacctccctcacacctgctcgcctgctcccagtagcccaccaaaggttttctacagcctctgctgtccccctggccaaaacagatacttggccaaaggacgtgggcatcctggccctggaggtctacttcccagcccaatatgtggaccaaactgacctggagaagtataacaatgtggaagcaggaaagtatacagtgggcttgggccagacccgtatgggcttctgctcagtccaagaggacatcaactccctgtgcctgacggtggtgcaacggctgatggagcgcatacagctcccatgggactctgtgggcaggctggaagtaggcactgagaccatcattgacaagtccaaagctgtcaaaacagtgctcatggaactcttccaggattcaggcaatactgatattgagggcatagataccaccaatgcctgctacggtggtactgcctccctcttcaatgctgccaactggatggagtccagttcctgggatgggctgaggggaacccatatggagaatgtgtatgacttctacaaaccaaatttggcctcggagtacccaatagtggatgggaagctttccatccagtgctacttgcgggccttggatcgatgttacacatcataccgtaaaaaaatccagaatcagtggaagcaagctggcagcgatcgacccttcacccttgacgatttacagtacatgatctttcatacacccttttgcaagatggtccagaagtctctggctcgcctgatgttcaatgacttcctgtcagccagcagtgacacacaaaccagcttatataaggggctggaggctttcggggggctaaagctggaagacacctacaccaacaaggacctggataaagcacttctaaaggcctctcaggacatgttcgacaagaaaaccaaggcttccctttacctctccactcacaatgggaacatgtacacctcatccctgtacgggtgcctggcctcgcttctgtcccaccactctgcccaagaactggctggctccaggattggtgccttctcttatggctctggtttagcagcaagtttcttttcatttcgagtatcccaggatgctgctccaggctctcccctggacaagttggtgtccagcacatcagacctgccaaaacgcctagcctcccgaaagtgtgtgtctcctgaggagttcacagaaataatgaaccaaagagagcaattctaccataaggtgaatttctccccacctggtgacacaaacagccttttcccaggtacttggtacctggagcgagtggacgagcagcatcgccgaaagtatgcccggcgtcccgtctaaaggtgttctgcagatccatggaaagcttcctgggaaacgtatgctagcagagcttctccccgtgaatcatatttttaagatcccactcttagctggtaaatgaatttgaatcgacatagtagccccataagcatcagccctgtagagtgaggagccatctctagcgggcccttcattcctctccatgctgcaatcactgtcctgggcttatggtgctatggactaggggtcctttgtgaaagagcaagatggagcaatggagagaagacctcttcctgaatcactggactccagaaatgtgcatgcagatcagctgttgccttcaagatccagataaactttcctgtcatgtgttagaactttattattattaatattgttaaacttctgtgctgttcctgtgaatctccaaattttgtaccttgttctaagctaatatatagcaattaaaaagagagaaaga

SEQ ID NO: 255 - DNA, 1939 bp, Homo sapiens
  source 1..1939: mol_type = unassigned DNA
cctgcgaatccgccctagtccgttctatcctccctcttcccgctccgcctcagctcgctctccgccttctccctggcccggtccccgatcccttcctctccctcaactatttcctccaggcgtcgttcttgccccgcccttccccgtcgcgtagcggaaacggtcgctctggcttcctggaggacttgtcatctgtgcccggcggcgcaggacggcggtgggcggggctcacgcgaggcgctggaacggtccgggagattctcgctctgctgctttagcttcggagtgtttggcgatggggcagcgcgagatgtggaggctcatgtcgaggtttaatgcattcaaaaggactaataccatactgcaccatttgagaatgtccaagcacacagatgcagcagaagaggtgctattggaaaaaaaaggttgcacgggagtcataacactaaacagaccaaagttcctcaatgcactgactcttaatatgattcggcagatttatccacagctaaagaagtgggaacaagatcctgaaactttcctgatcattataaagggagcaggaggaaaggctttctgtgccgggggtgatatcagagtgatctcggaagctgaaaaggcaaaacagaagatagctccagttttcttcagagaagaatatatgctgaataatgctgttggttcttgccagaaaccttatgttgcacttattcatggaattacaatgggtgggggagttggtctctcagtccatgggcaatttcgagtggctacagaaaagtgtctttttgctatgccagaaactgcaataggactgttccctgatgtgggtggaggttatttcttgccacgactccaaggaaaacttggttacttccttgcattaacaggattcagactaaaaggaagagatgtgtacagagcaggaattgctacacactttgtagattctgaaaagttggccatgttagaggaagatttgttagccttgaaatctccttcaaaagaaaatattgcatctgtcttagaaaattaccatacagagtctaagattgatcgagacaagtcttttatacttgaggaacacatggacaaaataaacagttgtttttcagccaatactgtggaagaaattattgaaaacttacagcaagatggttcatcttttgccctagagcaattgaaggtaattaataaaatgtctccaacatctctaaagatcacactaaggcaactcatggaggggtcttcaaagaccttgcaagaagtactaactatggagtatcggctaagtcaagcttgtatgagaggtcatgactttcatgaaggcgttagagctgttttaattgataaagaccagagtccaaaatggaaaccagctgatctaaaagaagttactgaggaagatttgaataatcactttaagtctttgggaagcagtgatttgaaattttgaggtgacaggcttttaaggtatattttgtagcatgggttggcaatctacagcatgtgggccaaatccagcctgctgcctgtttttatataccctgtaagctaagaatggtttccgcatttttaaatggttgggaaaagaaatcaaagactaataattcatgacgtgaaaattatcagaattcacaaataaagctttattggaactagctatactcatctgtttatatattatctgtggctgctttgaaatgagtagttgcaatagagatggtaaagcctacaaagcctaattatttactgtctggtttttgtcagaaaaaagtttgtcaatccttgttttagaagatggaaaaatgtgaagatctttggagattctcttgagtggtatatctaattgaaatgggatcttcgtttggcttgtatgttgatgaaatcaacttaggtatacaatataaaaaataaagaccctgaaaattgttttgga

SEQ ID NO: 256 - DNA, 2463 bp, Homo sapiens
  source 1..2463: mol_type = unassigned DNA
ggaaacggtcgctctggcttcctggaggacttgtcatctgtgcccggcggcgcaggacggcggtgggcggggctcacgcgaggcgctggaacggtccgggagattctcgctctgctgctttagcttcggagtgtttggcgatggggcagcgcgagatgtggaggctcatgtcgaggtttaatgcattcaaaaggactaataccatactgcaccatttgagaatgtccaagcacacagatgcagcagaagaggtgctattggaaaaaaaaggttgcacgggagtcataacactaaacagaccaaagttcctcaatgcactgactcttaatatgattcggcagatttatccacagctaaagaagtgggaacaagatcctgaaactttcctgatcattataaagggagcaggaggaaaggctttctgtgccgggggtgatatcagagtgatctcggaagctgaaaaggcaaaacagaagatagctccagttttcttcagagaagaatatatgctgaataatgctgttggttcttgccagaaaccttatgttgcacttattcatggaattacaatgggtgggggagttggtctctcagtccatgggcaatttcgagtggctacagaaaagtgtctttttgctatgccagaaactgcaataggactgttccctgatgtgggtggaggttatttcttgccacgactccaaggaaaacttggttacttccttgcattaacaggattcagactaaaaggaagagatgtgtacagagcaggaattgctacacactttgtagattctgaaaagttggccatgttagaggaagatttgttagccttgaaatctccttcaaaagaaaatattgcatctgtcttagaaaattaccatacagagtctaagattgatcgagacaagtcttttatacttgaggaacacatggacaaaataaacagttgtttttcagccaatactgtggaagaaattattgaaaacttacagcaagatggttcatcttttgccctagagcaattgaaggtaattaataaaatgtctccaacatctctaaagatcacactaaggcaactcatggaggggtcttcaaagaccttgcaagaagtactaactatggagtatcggctaagtcaagcttgtatgttttaattgataaagaccagagtccaaaatggaaaccagctgatctaaaagaagttactgaggaagatttgaataatcactttaagtctttgggaagcagtgatttgaaattttgaggtgacaggcttttaaggtatattttgtagcatgggttggcaatctacagcatgtgggccaaatccagcctgctgcctgtttttatataccctgtaagctaagaatggtttccgcatttttaaatggttgggaaaagaaatcaaagactaataattcatgacgtgaaaattatcagaattcacaaataaagctttattggaactagctatactcatctgtttatatattatctgtggctgctttgaaatgagtagttgcaatagagatggtaaagcctacaaagcctaattatttactgtctggtttttgtcagaaaaaagtttgtcaatccttgttttagaagatggaaaaatgtgaagatctttggagattctcttgagtggtatatctaattgaaatgggatcttcgtttggcttgtatgttgatgaaatcaacttaggtatacaatataaaaaataaagaccctgaaaattgttttggatactgtgttaatgcctcatagaatttttgttttggatactgtgttaatgcctcatagaattttctccatatatgagtgtgttttaaagtaactgagttactgtagcagaagagctccttttataaacattagaaaccttgggcagagagaaaagatttttattaacgtccctcttcagtattaactcagacttggtcttccctaaaataatcagaataccatcccatggtgaaactgaaaggattattttcttgttatttgtgatatttgttaatctggtagaatgagaaattaggaaactccaatctcttagatagagacactctgtttttttataatttacgtaagacttttgtgtgataattatccttacaaacaaggttcaagtcaggagaaaaaaattaattgaaagcaagaagacttttgttcaaaagatatattcaataattgatattgttaatgaagtaagtactttttaaggtatgaaagaactaaaaggtattccagactcagaaccttaaagttctaggcaagaataatttttaaactaaaggtaagtttataaattaacaaagtaaacaaaatttatgattttgttttttgtttgtaatttttgtttaattttaaaggtaagtttataaattaacaaacaaaatttataattttttgtttgtaatttttgtttataaacaaaataaattttttgtaacttg

SEQ ID NO: 257 - DNA, 396 bp, Homo sapiens
  source 1..396: mol_type = unassigned DNA
ttttaattgataaagaccagagtccaaaatggaaaccagctgatctaaaagaagttactgaggaagatttgaataatcactttaagtctttgggaagcagtgatttgaaattttgaggtgacaggcttttaagaccgcctatgggcagcatccagagcggaccagctccctgtgctggaggactccagtgtgaggcctgctgcttcctttctacattggcctgaaaccagcccaactcagtggtcataatcttctgggcctaccgaagagcaaaagcctacttctagttcttccagttgccagttcaagggctttatctgtcacttcctttgggaacaggtagagtgctttgatttagaatgatggcaataaatgagaaaccaatttgaaattgga

SEQ ID NO: 258 - DNA, 2151 bp, Homo sapiens
  source 1..2151: mol_type = unassigned DNA
agtgccaggctgctcaaacctctaggggggcatacagacaggcagaggctgtgggcctccaaccccacggcagcatgtaggggtggatgcttacagctcctggagccccagtgggcgtgtgttacagggtgctcttttagttttgctgtctataggcgacttgtgttagttaaccagctcgagtgggctctcaaccttgtcataggacagagagggctttctatatgccgggttcttgccttggtgtaccagaagaattggatcacacctgggcttagagaatgggtgcaaggttttattgagtagaggtagctcttagcagatgttggaagccagaagagaatggagtaggaaggttttcccctggagtggggccactcagcagcccgggacccccttccacagtcccagccaaactctgcgtcgttctgctggtcagcggcctgctggcgtgccagtgcctgctgatgtgctcctctggacgtccagccgcctgtgtgttcctccactgatgtgctcctctccatgtccggctacctgtgtgtctgcctgctaaggtatgaaatctaaggatgccccctctctggagctgcctgcctgtgtttgaatcctgaagatcgtgatgcgtgagttaatccgtgctaagaactcggaacagtcagcacctcatctatgggcactttaccaaagcgggtgaaaattgtggaagttggtccccgagatggactacaaaatgaaaagaatatcgtatctactccagtgaaaatcaagctgatagacatgctttctgaagcaggactctctgttatagaaaccaccagctttgtgtctcctaagtgggttccccagatgggtgaccacactgaagtcttgaagggcattcagaagtttcctggcatcaactacccagtcctgaccccaaatttgaaaggcttcgaggcagcggttgctgctggagccaaggaagtagtcatctttggagctgcctcagagctcttcaccaagaagaacatcaattgttccatagaggagagttttcagaggtttgacgcaatcctgaaggcagcgcagtcagccaatatttctgtgcgggggtacgtctcctgtgctcttggctgcccttatgaagggaagatctccccagctaaagtagctgaggtcaccaagaagttctactcaatgggctgctacgagatctccctgggggacaccattggtgtgggcaccccagggatcatgaaagacatgctatctgctgtcatgcaggaagtgcctctggctgccctggctgtccactgccatgacacctatggtcaagccctggccaacaccttgatggccctgcagatgggagtgagtgtcgtggactcttctgtggcaggacttggaggctgtccctacgcacagggggcatcaggaaacttggccacagaagacctggtctacatgctagagggcttgggcattcacacgggtgtgaatctccagaagcttctggaagctggaaactttatctgtcaagccctgaacagaaaaactagctccaaagtggctcaggctacctgtaaactctgagccccttgcccacctgaagccctggggatgatgtggaaataggggcacacacagatgattcatggatggggacatggaaatgagaataggttaaatggtgcaggtacctcatagccagctctacacagaggtctctcctggcagaaagcaggcgaagggcaggaggagctgcttggcagaaggacctcctgcccagacctgaggagtgagaggctttgagggctgaagtctccctttgttacggaccctggcccaggagttgaatgcctgaggacgtgtgggaaccccgttccctacttagcatgatccttgagtctcctctctggatggaatccgcgagctggccacctggccaccctctacacggctccaccctgccatggccgtggggcccttgctctctgacttctcaggacacaggtcatggaggttcttcccaagctggcagaggccatttgtggaaagtggagagctacgtggtggccgtctgccaactccagcatctctggaaaatctccacgctgaatgtgatttttgaaaacagcttatgtaattaaaggttgaatggcacatcat

SEQ ID NO: 259 - DNA, 1600 bp, Homo sapiens
  source 1..1600: mol_type = unassigned DNA
cacgcggggcccagctggactgccgcgggggattctgggccaagatggcagcaatgaggaaggcgcttccgcggcgactggtgggcttggcgtccctccgggctgtcagcacctcatctatgggcactttaccaaagcgggtgaaaattgtggaagttggtccccgagatggactacaaaatgaaaagaatatcgtatctactccagtgaaaatcaagctgatagacatgctttctgaagcaggactctctgttatagaaaccaccagctttgtgtctcctaagtgggttccccagatgggtgaccacactgaagtcttgaagggcattcagaagtttcctggcatcaactacccagtcctgaccccaaatttgaaaggcttcgaggcagcggttgctgctggagccaaggaagtagtcatctttggagctgcctcagagctcttcaccaagaagaacatcaattgttccatagaggagagttttcagaggtttgacgcaatcctgaaggcagcgcagtcagccaatatttctgtgcgggggtacgtctcctgtgctcttggctgcccttatgaagggaagatctccccagctaaagtagctgaggtcaccaagaagttctactcaatgggctgctacgagatctccctgggggacaccattggtgtgggcaccccagggatcatgaaagacatgctatctgctgtcatgcaggaagtgcctctggctgccctggctgtccactgccatgacacctatggtcaagccctggccaacaccttgatggccctgcagatgggagtgagtgtcgtggactcttctgtggcaggacttggaggctgtccctacgcacagggggcatcaggaaacttggccacagaagacctggtctacatgctagagggcttgggcattcacacgggtgtgaatctccagaagcttctggaagctggaaactttatctgtcaagccctgaacagaaaaactagctccaaagtggctcaggctacctgtaaactctgagccccttgcccacctgaagccctggggatgatgtggaaataggggcacacacagatgattcatggatggggacatggaaatgagaataggttaaatggtgcaggtacctcatagccagctctacacagaggtctctcctggcagaaagcaggcgaagggcaggaggagctgcttggcagaaggacctcctgcccagacctgaggagtgagaggctttgagggctgaagtctccctttgttacggaccctggcccaggagttgaatgcctgaggacgtgtgggaaccccgttccctacttagcatgatccttgagtctcctctctggatggaatccgcgagctggccacctggccaccctctacacggctccaccctgccatggccgtggggcccttgctctctgacttctcaggacacaggtcatggaggttcttcccaagctggcagaggccatttgtggaaagtggagagctacgtggtggccgtctgccaactccagcatctctggaaaatctccacgctgaatgtgatttttgaaaacagcttatgtaattaaaggttgaatggcacatcataa

SEQ ID NO: 260 - DNA, 1354 bp, Homo sapiens
  source 1..1354: mol_type = unassigned DNA
attctgggccaagatggcagcaatgaggaaggcgcttccgcggcgactggtgggcttggcgtccctccgggctgtcagcacctcatctatgggcactttaccaaagcgggtgaaaattgtggaagttggtccccgagatggactacaaaatgaaaagaatatcgtatctactccagtgaaaatcaagctgatagacatgctttctgaagcaggactctctgttatagaaaccaccagctttgtgtctcctaagtgggttccccagatgggtgaccacactgaagtcttgaagggcattcagaagtttcctggcatcaactacccagtcctgaccccaaatttgaaaggcttcgaggcagcggtcaccaagaagttctactcaatgggctgctacgagatctccctgggggacaccattggtgtgggcaccccagggatcatgaaagacatgctatctgctgtcatgcaggaagtgcctctggctgccctggctgtccactgccatgacacctatggtcaagccctggccaacaccttgatggccctgcagatgggagtgagtgtcgtggactcttctgtggcaggacttggaggctgtccctacgcacagggggcatcaggaaacttggccacagaagacctggtctacatgctagagggcttgggcattcacacgggtgtgaatctccagaagcttctggaagctggaaactttatctgtcaagccctgaacagaaaaactagctccaaagtggctcaggctacctgtaaactctgagccccttgcccacctgaagccctggggatgatgtggaaataggggcacacacagatgattcatggatggggacatggaaatgagaataggttaaatggtgcaggtacctcatagccagctctacacagaggtctctcctggcagaaagcaggcgaagggcaggaggagctgcttggcagaaggacctcctgcccagacctgaggagtgagaggctttgagggctgaagtctccctttgttacggaccctggcccaggagttgaatgcctgaggacgtgtgggaaccccgttccctacttagcatgatccttgagtctcctctctggatggaatccgcgagctggccacctggccaccctctacacggctccaccctgccatggccgtggggcccttgctctctgacttctcaggacacaggtcatggaggttcttcccaagctggcagaggccatttgtggaaagtggagagctacgtggtggccgtctgccaactccagcatctctggaaaatctccacgctgaatgtgatttttgaaaacagcttatgtaattaaaggttgaatggcacatcat

SEQ ID NO: 261 - DNA, 1160 bp, Homo sapiens
  source 1..1160: mol_type = unassigned DNA
ctgggccaagatggcagcaatgaggaaggcgcttccgcggcgactggtgggcttggcgtccctccgggctgtcagcacctcatctatgggcactttaccaaagcgggtgaaaattgtggaagttggtccccgagatggactacaaaatgaaaagaatatcgtatctactccagtgaaaatcaagctgatagacatgctttctgaagcaggactctctgttatagaaaccaccagctttgtgtctcctaagtgggttccccagatgggtgaccacactgaagtcttgaagggcattcagaagtttcctggcatcaactacccagtcctgaccccaaatttgaaaggcttcgaggcagcgatgggagtgagtgtcgtggactcttctgtggcaggacttggaggctgtccctacgcacagggggcatcaggaaacttggccacagaagacctggtctacatgctagagggcttgggcattcacacgggtgtgaatctccagaagcttctggaagctggaaactttatctgtcaagccctgaacagaaaaactagctccaaagtggctcaggctacctgtaaactctgagccccttgcccacctgaagccctggggatgatgtggaaataggggcacacacagatgattcatggatggggacatggaaatgagaataggttaaatggtgcaggtacctcatagccagctctacacagaggtctctcctggcagaaagcaggcgaagggcaggaggagctgcttggcagaaggacctcctgcccagacctgaggagtgagaggctttgagggctgaagtctccctttgttacggaccctggcccaggagttgaatgcctgaggacgtgtgggaaccccgttccctacttagcatgatccttgagtctcctctctggatggaatccgcgagctggccacctggccaccctctacacggctccaccctgccatggccgtggggcccttgctctctgacttctcaggacacaggtcatggaggttcttcccaagctggcagaggccatttgtggaaagtggagagctacgtggtggccgtctgccaactccagcatctctggaaaatctccacgctgaatgtgatttttgaaaacagcttatgtaattaaaggttgaatggcacatc

SEQ ID NO: 262 - DNA, 3388 bp, Homo sapiens
  source 1..3388: mol_type = unassigned DNA
agcagccagcagcgcgccggtggcgtgcggctcgaaaggccgggaggacgtcatcgacgcgctgtcgagcctccagcccgcccgggtttccttcgcagtcgcgcaccgacgctcaaacgcgcgctccaacccgcagcctcctcctgcctcaccgcccgaagatggcggctctcaaactcctctcctccgggcttcggctctgcgcctctgcccgcggatctggggcaacctggtacaagggatgtgtttgttccttttccaccagtgctcatcgccataccaagttttatacagatccagtagaagctgtaaaagacatccctgatggtgccacggttttggttggtggttttgggctatgtggaattccagagaatcttatagatgctttactgaaaactggagtaaaaggactaactgcagtcagcaacaatgcaggggttgacaattttggtttggggcttttgcttcggtccaagcagataaaacgcatggtctcttcatatgtgggagaaaatgcagaatttgaacgacagtacttatctggtgaattagaagtggagctgacaccacagggcacacttgcagagaggatccgtgcaggcggggctggagttcctgcattttacaccccaacagggtatgggaccctggtacaagaaggaggatcgcccatcaaatacaacaaagatggcagtgttgccattgccagtaagccaagagaggtgagggagttcaatggtcagcactttattttggaggaagcaattacaggggattttgctttggtgaaagcctggaaggcggaccgagcaggaaacgtgattttcaggaaaagtgcaaggaatttcaacttgccaatgtgcaaagctgcagaaaccacagtggtagaggttgaagaaattgtggatattggagcatttgctccagaagacatccatattcctcagatttatgtacatcgccttataaagggagaaaaatatgagaaaagaattgagcgtttatcaatccggaaagagggagatggggaagccaaatctgctaaacctggagatgacgtaagggaacgaatcatcaagagggccgctcttgagtttgaggatggcatgtatgctaatttgggcataggaatccctctcctggccagcaattttatcagcccaaatataactgttcatcttcaaagtgaaaatggagttctgggtttgggtccatatccacgacaacatgaagctgatgcagatctcatcaatgcaggcaaggaaacagttactattcttccaggagcctcttttttctccagcgatgaatcatttgcaatgattagaggtggacacgtcgatctgacaatgctaggagcgatgcaggtttccaaatatggtgacctggctaactggatgatacctgggaagatggtgaaaggaatgggaggtgctatggatttagtgtccagtgcgaaaaccaaagtggtggtcaccatggagcattctgcaaagggaaatgcacataaaatcatggagaaatgtacattaccattgactggaaagcaatgtgtcaaccgcattattactgaaaaggctgtgtttgatgtggacaagaagaaagggttgactctgattgagctctgggaaggcctgacagtggatgacgtacagaagagtactgggtgtgattttgcagtttcaccaaaactcatgccaatgcagcagatcgcaaattgaaatatggatatttgtaccaggctgcgtgtttttcattttaaacacacaagatttaattgaaaggacatcaataatcataattgtgtatttaacaggtggttttttattagttttcttgtgtttcagactttatgcagccatataaactgttctctaggcatgctgtgacattttaataaaaagcaaaaggagcatttataattatctcatttgttaaggctgagaaggttgtttttataataggtaattatattgaatgcattttcactgaatatggtatgtatgctaaattatatgaacctttccccaagaagggccctagaaattgatgtggctttcctcttaaatattaattattagtcctgaaagaaagataacatatgtgatttttgtggttaggagagttgctgtcatgattgttttttcttcagcctcctctgacttttcttttggggcttcagattttatgattacatcttgtccccctagaacatcccccttcctcccatactgcttttaaacagatgcccaagaaggcaagcaggaatgcctcttgtgggggagggcagggagaaataactagttcaaaccaactatctatctatgctttgcaaagactaaggcgtattataggaagagggctagaaacctaactgattcttctcagttttctcattttaaaacagcccagtattcctttgtatcctcaagggtccttgagaatacttctgttattgagaccctgtgggctacttgtactgtacctcctctcaagccaagaagggctgtgggataatttaccatgaatccttagtagcaatgacagcagagttaaaaaataaaaggtgttttactttcaggctcttgttttggttcagaggagattttaaatattgaatgacacttctacagaacaacggtttttcttctgccaaggctacttcctttaacgaagtgcctttaattcagccttatccaactagggaaaataatgttggacaagtctaggatttgaagagtcagtgaacttttagtgtcagggaataaacatggtgggtagattaggtttgaaaaaaacttccttagaggtatttattctcaatacctgacaggggcccatgggaatgacttcagaagcatcccggataatagatgggtaaaaagtctaggcaccctgaagaacaggtgagacagctggcctctggacagaggtaggcatagtacagtacgatatatcattcctctggtcctaaatatacaaacttattcatgtttttaggtgatgatggtcattgaaactcacttcttttcaggtgtagctacaattgtgtaatgtacaatattagagaaaggacaggctttttatgagtaacacacaccatatataaaacagcctttctggctgaccacatggttaaatgcataccttcccagtactggggggaaaaaatgacccttcttagaatgtgcaagttccatgagagtaatatattgatatgattttgaaaagaattgttgatagttacatcttcaaacttatcattccagtatgcatctttaagataatgtgattctaagtagatgactttatattcttgattgaagagtgctatacatgttaagaaatgcattaaggaatacaataaatattctaaagtgatgta

SEQ ID NO: 263 - DNA, 1441 bp, Homo sapiens
  source 1..1441: mol_type = unassigned DNA
cattttgtgcagtgatggagtgtggcaatggatgcttgttttaattcccggaaataaaccgtcaagaataaaagaacatgatggtgagggagttcaatggtcagcactttattttggaggaagcaattacaggggattttgctttggtgaaagcctggaaggcggaccgagcaggaaacgtgattttcaggaaaagtgcaaggaatttcaacttgccaatgtgcaaagctgcagaaaccacagtggtagaggttgaagaaattgtggatattggagcatttgctccagaagacatccatattcctcagatttatgtacatcgccttataaagggagaaaaatatgagaaaagaattgagcgtttatcaatccggaaagagggagatggggaagccaaatctgctaaacctggagatgacgtaagggaacgaatcatcaagagggccgctcttgagtttgaggatggcatgtatgctaatttgggcataggaatccctctcctggccagcaattttatcagcccaaatataactgttcatcttcaaagtgaaaatggagttctgggtttgggtccatatccacgacaacatgaagctgatgcagatctcatcaatgcaggcaaggaaacagttactattcttccaggagcctcttttttctccagcgatgaatcatttgcaatgattagaggtggacacgtcgatctgacaatgctaggagcgatgcaggtttccaaatatggtgacctggctaactggatgatacctgggaagatggtgaaaggaatgggaggtgctatggatttagtgtccagtgcgaaaaccaaagtggtggtcaccatggagcattctgcaaagggaaatgcacataaaatcatggagaaatgtacattaccattgactggaaagcaatgtgtcaaccgcattattactgaaaaggctgtgtttgatgtggacaagaagaaagggttgactctgattgagctctgggaaggcctgacagtggatgacgtacagaagagtactgggtgtgattttgcagtttcaccaaaactcatgccaatgcagcagatcgcaaattgaaatatggatatttgtaccaggctgcgtgtttttcattttaaacacacaagatttaattgaaaggacatcaataatcataattgtgtatttaacaggtggttttttattagttttcttgtgtttcagactttatgcagccatataaactgttctctaggcatgctgtgacattttaataaaaagcaaaaggagcatttataattatctcatttgttaaggctgagaaggttgtttttataataggtaattatattgaatgcattttcactgaatatggtatgtatgctaaattatatgaacctttccccaagaagggccctagaaattgatgtggctttcctcttaaatattaattatta

SEQ ID NO: 264 - DNA, 1441 bp, Homo sapiens
  source 1..1441: mol_type = unassigned DNA
atttcccagccagaaaactatcaggagtttgttcggctgcagggtgtgaaattattcacatcgaatgttgggcattgaatatccagcccactgttaggaaaagaacccccaaaatggaatccatgcctttgtgccaaccatactgaaataaacatttctaagtggacacgtcgatctgacaatgctaggagcgatgcaggtttccaaatatggtgacctggctaactggatgatacctgggaagatggtgaaaggaatgggaggtgctatggatttagtgtccagtgcgaaaaccaaagtggtggtcaccatggagcattctgcaaagggaaatgcacataaaatcatggagaaatgtacattaccattgactggaaagcaatgtgtcaaccgcattattactgaaaaggctgtgtttgatgtggacaagaagaaagggttgactctgattgagctctgggaaggcctgacagtggatgacgtacagaagagtactgggtgtgattttgcagtttcaccaaaactcatgccaatgcagcagatcgcaaattgaaatatggatatttgtaccaggctgcgtgtttttcattttaaacacacaagatttaattgaaaggacatcaataatcataattgtgtatttaacaggtggttttttattagttttcttgtgtttcagactttatgcagccatataaactgttctctaggcatgctgtgacattttaataaaaagcaaaaggagcatttataattatctcatttgttaaggctgagaaggttgtttttataataggtaattatattgaatgcattttcactgaatatggtatgtatgctaaattatatgaacctttccccaagaagggccctagaaattgatgtggctttcctcttaaatattaattattagtcctgaaagaaagataacatatgtgatttttgtggttaggagagttgctgtcatgattgttttttcttcagcctcctctgacttttcttttggggcttcagattttatgattacatcttgtccccctagaacatcccccttcctcccatactgcttttaaacagatgcccaagaaggcaagcaggaatgcctcttgtgggggagggcagggagaaataactagttcaaaccaactatctatctatgctttgcaaagactaaggcgtattataggaagagggctagaaacctaactgattcttctcagttttctcattttaaaacagcccagtattcctttgtatcctcaagggtccttgagaatacttctgttattgagaccctgtgggctacttgtactgtacctcctctcaagccaagaagggctgtgggataatttaccatgaatccttagtagcaatgacagcagagttaaaaaataaaaggtgttttactttcaggctcttgttttggttcagaggagatttt

SEQ ID NO: 265 - DNA, 1593 bp, Homo sapiens
  source 1..1593: mol_type = unassigned DNA
actttctagctagtgtttgtgttcaagtagtcacattctgcctcactgaaggaaacagtcttcctgtgtacacctgttcatagtttgttattgaaacaatgtatactgtaacttttttttcaaaaagaatttttagtgattatttctctgtcagcatggagctgatctattaggaaatcagttgtgtggtgggggaagcaagtatattttggtgtggacacgtcgatctgacaatgctaggagcgatgcaggtttccaaatatggtgacctggctaactggatgatacctgggaagatggtgaaaggaatgggaggtgctatggatttagtgtccagtgcgaaaaccaaagtggtggtcaccatggagcattctgcaaagggaaatgcacataaaatcatggagaaatgtacattaccattgactggaaagcaatgtgtcaaccgcattattactgaaaaggctgtgtttgatgtggacaagaagaaagggttgactctgattgagctctgggaaggcctgacagtggatgacgtacagaagagtactgggtgtgattttgcagtttcaccaaaactcatgccaatgcagcagatcgcaaattgaaatatggatatttgtaccaggctgcgtgtttttcattttaaacacacaagatttaattgaaaggacatcaataatcataattgtgtatttaacaggtggttttttattagttttcttgtgtttcagactttatgcagccatataaactgttctctaggcatgctgtgacattttaataaaaagcaaaaggagcatttataattatctcatttgttaaggctgagaaggttgtttttataataggtaattatattgaatgcattttcactgaatatggtatgtatgctaaattatatgaacctttccccaagaagggccctagaaattgatgtggctttcctcttaaatattaattattagtcctgaaagaaagataacatatgtgatttttgtggttaggagagttgctgtcatgattgttttttcttcagcctcctctgacttttcttttggggcttcagattttatgattacatcttgtccccctagaacatcccccttcctcccatactgcttttaaacagatgcccaagaaggcaagcaggaatgcctcttgtgggggagggcagggagaaataactagttcaaaccaactatctatctatgctttgcaaagactaaggcgtattataggaagagggctagaaacctaactgattcttctcagttttctcattttaaaacagcccagtattcctttgtatcctcaagggtccttgagaatacttctgttattgagaccctgtgggctacttgtactgtacctcctctcaagccaagaagggctgtgggataatttaccatgaatccttagtagcaatgacagcagagttaaaaaataaaaggtgttttactttcaggctcttgttttggttcagaggagattttaaatattgaatgacacttctacagaacaacggtttttcttctgccaaggctacttcctttaacgaagtgcctttaattcagccttatccaactagggaaa

SEQ ID NO: 266 - DNA, 2962 bp, Homo sapiens
  source 1..2962: mol_type = unassigned DNA
tcaaatgcctataaggttgacaattttggtttggggcttttgcttcggtccaagcagataaaacgcatggtctcttcatatgtgggagaaaatgcagaatttgaacgacagtacttatctggtgaattagaagtggagctgacaccacagggcacacttgcagagaggatccgtgcaggcggggctggagttcctgcattttacaccccaacagggtatgggaccctggtacaagaaggaggatcgcccatcaaatacaacaaagatggcagtgttgccattgccagtaagccaagagaggtgagggagttcaatggtcagcactttattttggaggaagcaattacaggggattttgctttggtgaaagcctggaaggcggaccgagcaggaaacgtgattttcaggaaaagtgcaaggaatttcaacttgccaatgtgcaaagctgcagaaaccacagtggtagaggttgaagaaattgtggatattggagcatttgctccagaagacatccatattcctcagatttatgtacatcgccttataaagggagaaaaatatgagaaaagaattgagcgtttatcaatccggaaagagggagatggggaagccaaatctgctaaacctggagatgacgtaagggaacgaatcatcaagagggccgctcttgagtttgaggatggcatgtatgctaatttgggcataggaatccctctcctggccagcaattttatcagcccaaatataactgttcatcttcaaagtgaaaatggagttctgggtttgggtccatatccacgacaacatgaagctgatgcagatctcatcaatgcaggcaaggaaacagttactattcttccaggagcctcttttttctccagcgatgaatcatttgcaatgattagaggtggacacgtcgatctgacaatgctaggagcgatgcaggtttccaaatatggtgacctggctaactggatgatacctgggaagatggtgaaaggaatgggaggtgctatggatttagtgtccagtgcgaaaaccaaagtggtggtcaccatggagcattctgcaaagggaaatgcacataaaatcatggagaaatgtacattaccattgactggaaagcaatgtgtcaaccgcattattactgaaaaggctgtgtttgatgtggacaagaagaaagggttgactctgattgagctctgggaaggcctgacagtggatgacgtacagaagagtactgggtgtgattttgcagtttcaccaaaactcatgccaatgcagcagatcgcaaattgaaatatggatatttgtaccaggctgcgtgtttttcattttaaacacacaagatttaattgaaaggacatcaataatcataattgtgtatttaacaggtggttttttattagttttcttgtgtttcagactttatgcagccatataaactgttctctaggcatgctgtgacattttaataaaaagcaaaaggagcatttataattatctcatttgttaaggctgagaaggttgtttttataataggtaattatattgaatgcattttcactgaatatggtatgtatgctaaattatatgaacctttccccaagaagggccctagaaattgatgtggctttcctcttaaatattaattattagtcctgaaagaaagataacatatgtgatttttgtggttaggagagttgctgtcatgattgttttttcttcagcctcctctgacttttcttttggggcttcagattttatgattacatcttgtccccctagaacatcccccttcctcccatactgcttttaaacagatgcccaagaaggcaagcaggaatgcctcttgtgggggagggcagggagaaataactagttcaaaccaactatctatctatgctttgcaaagactaaggcgtattataggaagagggctagaaacctaactgattcttctcagttttctcattttaaaacagcccagtattcctttgtatcctcaagggtccttgagaatacttctgttattgagaccctgtgggctacttgtactgtacctcctctcaagccaagaagggctgtgggataatttaccatgaatccttagtagcaatgacagcagagttaaaaaataaaaggtgttttactttcaggctcttgttttggttcagaggagattttaaatattgaatgacacttctacagaacaacggtttttcttctgccaaggctacttcctttaacgaagtgcctttaattcagccttatccaactagggaaaataatgttggacaagtctaggatttgaagagtcagtgaacttttagtgtcagggaataaacatggtgggtagattaggtttgaaaaaaacttccttagaggtatttattctcaatacctgacaggggcccatgggaatgacttcagaagcatcccggataatagatgggtaaaaagtctaggcaccctgaagaacaggtgagacagctggcctctggacagaggtaggcatagtacagtacgatatatcattcctctggtcctaaatatacaaacttattcatgtttttaggtgatgatggtcattgaaactcacttcttttcaggtgtagctacaattgtgtaatgtacaatattagagaaaggacaggctttttatgagtaacacacaccatatataaaacagcctttctggctgaccacatggttaaatgcataccttcccagtactggggggaaaaaatgacccttcttagaatgtgcaagttccatgagagtaatatattgatatgattttgaaaagaattgttgatagttacatcttcaaacttatcattccagtatgcatctttaagataatgtgattctaagtagatgactttatattcttgattgaagagtgctatacatgttaagaaatgcattaaggaatacaataaatattctaaagtgatgt

SEQ ID NO: 267 - DNA, 1256 bp, Homo sapiens
  source 1..1256: mol_type = unassigned DNA
gagagcgtcatcgcccccgactgtggagaagtgtccggggtagccccgttacaggaatgtgtttctgatcatctgaatcttaatcatgtccaactgcctgcaaaatttcctgaaaattacaagcactcgtcttctatgttcaagattatgccaacagttaagaagtaaaaggaagtttttcggaactgtgccaatatccagattgcataggcgagttgtcattacaggcattggcttagtgactcctcttggtgttggaactcacctggtttgggatcgtcttatcggaggagagagtggaattgtttcactggttggtgaagagtataagagtatcccttgcagtgttgctgcttatgtgccaagaggtagtgatgaaggtcagttcaatgaacaaaactttgtgtccaaatcagatatcaagtccatgtcttctcccaccatcatggccattggggctgcagaattagccatgaaggattctggctggcatcctcagtcagaagctgatcaagtggctactggtgttgcaattggcatgggaatgattcctcttgaagttgtttctgaaactgctttgaattttcagacaaaaggttacaataaagttagcccattttttgtccctaagattctggtcaatatggcagcaggccaggtcagcattcgatataaactcaagggcccaaatcatgcagtatccacagcctgtaccacaggagctcatgctgtgggagactcatttagatttatagcccatggtgatgctggtcacataactgcccctgatcctgaaggagaaggtgccttaaggtgtatggctgctgctttaaaagatgcaggtgtgcagcctgaggagatatcctatatcaatgcacatgctacttccacaccattgggagatgctgctgaaaacaaagctatcaaacatctcttcaaagaccatgcatatgcccttgcagtttcctcaactaagggagcaacaggacatctgctgggagctgcaggggcagtcgaggcagcttttaccacattagcttgttattatcaaaaactaccacctactttaaacctggattgttcggaaccagaatttgatctcaactatgttccactaaaggcacaggaatggaaaactgagaaaagatttattggcctcaccaattcctttggttttggtggtactaatgcaacactttgtattgctggactgtagaacatataatttgtaattaaatactgatttttaaatgcta

SEQ ID NO: 268 - DNA, 1519 bp, Homo sapiens
  source 1..1519: mol_type = unassigned DNA
gtgcgcgtgcgctcgagagcgtcatcgcccccgactgtggagaagtgtccggggtagccccgttacaggaatgtgtttctgatcatctgaatcttaatcatgtccaactgcctgcaaaatttcctgaaaattacaagcactcgtcttctatgttcaagattatgccaacagttaagaagtaaaaggaagtttttcggaactgtgccaatatccagattgcataggcgagttgtcattacaggcattggcttagtgactcctcttggtgttggaactcacctggtttgggatcgtcttatcggaggagagagtggaattgtttcactggttggtgaagagtataagagtatcccttgcagtgttgctgcttatgtgccaagaggtagtgatgaaggtcagttcaatgaacaaaactttgtgtccaaatcagatatcaagtccatgtcttctcccaccatcatggccattggggctgcagaattagccatgaaggattctggctggcatcctcagtcagaagctgatcaagtggctactggtgttgcaattggcatgggaatgattcctcttgaagttgtttctgaaactgctttgaattttcagacaaaaggttacaataaagttagcccattttttgtccctaagattctggtcaatatggcagcaggccaggtcagcattcgatataaactcaagggcccaaatcatgcagtatccacagcctgtaccacaggagctcatgctgtgggagactcatttagatttatagcccatggtgatgctgatgtgatggtggctggaggtacagattcttgtattagccctttatctcttgctgggttttccagagcccgggctctgagcacaaactcagatcccaagttggcatgtcgaccatttcatccaaagagagatggttttgtaatgggagaaggtgcagctgtgctggtgctggaagaatatgaacatgctgttcaaagaagagcccggatctatgcagaagttttgggctatggactctcaggtgatgctggtcacataactgcccctgatcctgaaggagaaggtgccttaaggtgtatggctgctgctttaaaagatgcaggtgtgcagcctgaggagatatcctatatcaatgcacatgctacttccacaccattgggagatgctgctgaaaacaaagctatcaaacatctcttcaaagaccatgcatatgcccttgcagtttcctcaactaagggagcaacaggacatctgctgggagctgcaggggcagtcgaggcagcttttaccacattagcttgttattatcaaaaactaccacctactttaaacctggattgttcggaaccagaatttgatctcaactatgttccactaaaggcacaggaatggaaaactgagaaaagatttattggcctcaccaattcctttggttttggtggtactaatgcaacactttgtattgctggactgtagaacatataatttgtaattaaatactgatttttaaatgcta

SEQ ID NO: 269 - DNA, 756 bp, Homo sapiens
  source 1..756: mol_type = unassigned DNA
gtctgacggcacttaaggtctaaaaaagaaggaatgtgtttctgatcatctgaatcttaatcatgtccaactgcctgcaaaatttcctgaaaattacaagcactcgtcttctatgttcaagattatgccaacagttaagaagtaaaaggaagtttttcggaactgtgccaatatccagattgcataggcgagttgtcattacaggcattggcttagtgactcctcttggtgttggaactcacctggtttgggatcgtcttatcggaggagagagtggaattgtttcactggttggtgaagagtataagagtatcccttgcagtgttgctgcttatgtgccaagaggtagtgatgaaggtcagttcaatgaacaaaactttgtgtccaaatcagatatcaagtccatgtcttctcccaccatcatggccattggggctgcagaattagccatgaaggattctggctggcatcctcagtcagaagctgatcaagtggctactggtgttgcaattggcatgggaatgattcctcttgaagttgtttctgaaactgctttgaattttcagacaaaaggttacaataaagttagcccattttttgtccctaagattctggtcaatatggcagcaggccaggtcagcattcgatataaactcaagggcccaaatcatgcagtatccacagcctgtaccacaggagctcatgctgtgggagactcatttagatttatagcccatggtgatgctgatgtgatgg

SEQ ID NO: 270 - DNA, 899 bp, Homo sapiens
  source 1..899: mol_type = unassigned DNA
acttggccgggtcccgaggcccctggccggcgggctcggacgttaggagcagaaccagctccaggtcccggtctgtccgggcgtcgctgccctctgaagctcaggccggacgccccagtccctggccgaacaaggtgccgcggcccacccaccccggtacccgccgtccgaccccgttgccctgcacctgaggatgttgtcagcataggaatgtgtttctgatcatctgaatcttaatcatgtccaactgcctgcaaaatttcctgaaaattacaagcactcgtcttctatgttcaagattatgccaacagttaagaagtaaaaggaagtttttcggaactgtgccaatatccagattgcataggcgagttgtcattacaggcattggcttagtgactcctcttggtgttggaactcacctggtttgggatcgtcttatcggaggagagagtggaattgtttcactggttggtgaagagtataagagtatcccttgcagtgttgctgcttatgtgccaagaggtagtgatgaaggtcagttcaatgaacaaaactttgtgtccaaatcagatatcaagtccatgtcttctcccaccatcatggccattggggctgcagaattagccatgaaggattctggctggcatcctcagtcagaagctgatcaagtggctactggtgttgcaattggcatgggaatgattcctcttgaagttgtttctgaaactgctttgaattttcagacaaaaggttacaataaagttagcccattttttgtccctaagattctggtcaatatggcagcaggccaggtcagcattcgatataaactcaagggcccaaatcatgcagtatccacagcctgtaccacaggagctcatgctgtgggagactcattt

SEQ ID NO: 271 - DNA, 2731 bp, Homo sapiens
  source 1..2731: mol_type = unassigned DNA
gcgagcgctgaagctccgcccccagcttctacctccggttctatcccggcgtttcgcccttccccacagacctctgccccggacccatttccgaggcgcgccgcatgcgccgcgcaacccaggccacgagcacgggcgcgtgcttaagtcagcgcgcgcccgctccgacgcgaggaggccccgccctccagccccgccccgctcgctggcctgccctcctcttgctaccctcccggcgcagagaaccccggctgctcagcgcgctccgcggtcatggagatccccgggagcctgtgcaagaaagtcaaactgagcaataacgcgcagaactggggaatgcagagagcaaccaatgtcacctaccaagcccatcatgtcagcaggaacaagagaggtcaggtggtggggaccagaggtggctttcgtggttgcacagtttggctaacaggcttgtctggagcgggaaagactactgtgagcatggccttggaggagtacctggtttgtcatggtattccatgctacactctggatggtgacaatattcgtcaaggtctcaataaaaatcttggctttagtcctgaagacagagaagagaatgttcgacgcatcgcagaagttgctaaactgtttgcagatgctggcttagtgtgcatcacaagtttcatatcaccttacactcaggatcgcaacaatgcaaggcaaattcatgaaggtgcaagtttaccgttttttgaagtatttgttgatgctcctctgcatgtttgtgaacagagggatgtcaaaggactctacaaaaaagcccgggcaggagaaattaaaggtttcactgggatcgattctgaatatgaaaagccagaggcccctgagttggtgctgaaaacagactcctgtgatgtaaatgactgtgtccagcaagttgtggaacttctacaggaacgggatattgtacctgtggatgcatcttatgaagtaaaagaactatatgtgccagaaaataaacttcatttggcaaaaacagatgcggaaacattaccagcactgaaaattaataaagtggatatgcagtgggtgcaggttttggcagaaggttgggcaaccccattgaatggctttatgagagagagggagtacttgcagtgccttcattttgattgtcttctggatggaggtgtcattaacttgtcagtacctatagttctgactgcgactcatgaagataaagagaggctggacggctgtacagcatttgctctgatgtatgagggccgccgtgtggccattcttcgcaatccagagttttttgagcacaggaaagaggagcgctgtgccagacagtggggaacgacatgcaagaaccacccctatattaagatggtgatggaacaaggagattggctgattggaggagatcttcaagtcttggatcgagtttattggaatgatggtcttgatcagtatcgtcttactcctactgagctaaagcagaaatttaaagatatgaatgctgatgctgtctttgcatttcaactacgcaacccagtgcacaatggacatgccctgttaatgcaggatacccataagcaacttctagagaggggctaccggcgccctgtcctcctcctccaccctctgggtggctggacaaaggatgacgatgttcctttgatgtggcgtatgaagcagcatgctgcagtgttggaggaaggagttctgaatcctgagacgacagtggtggccatcttcccatctcccatgatgtatgctggaccaactgaggtccagtggcattgcagagcacggatggttgcaggagccaacttttacattgttggacgagaccctgctggcatgcctcatccagaaacagggaaggatctttatgagccaagtcatggtgccaaagtgctgacgatggcccctggtttaatcactttggaaatagttccctttcgagttgcagcttacaacaagaaaaagaagcgtatggactactatgactctgaacaccatgaagactttgaatttatttcaggaacacgaatgcgcaaacttgctcgagaaggccagaaaccacctgaaggtttcatggctcccaaggcttggaccgtgctgacagaatactacaaatccttggagaaagcttaggctgttaacccagtcactccacctttgacacattactagtaacaagaggggaccacatagtctctgttggcatttctttgtggtgtctgtctggacatgcttcctaaaaacagaccattttccttaacttgcatcagttttggtctgccttatgagttctgttttgaacaagtgtaacacactgatggttttaatgtatcttttccacttattatagttatattcctacaatacaattttaaaattgtctttttatattatatttatgcttctgtgtcatgattttttcaagctgttatattagttgtaaccagtagtattcacattaaatcttgctttttttccccttaaaaaaagaaaaaaattaccaaacaataaacttggctagaccttgttttgaggattttacaagacctttgtagcgattagattttttttctacattgaaaatagaaactgcttcctttcttctttccagtcagctattggtctttccagctgttataatctaaagtattcttatgatctgtgtaagctctgaatgaacttctttactcaataaaattaattttttggcttctta

SEQ ID NO: 272 - DNA, 3949 bp, Homo sapiens
  source 1..3949: mol_type = unassigned DNA
ggccgcgtgccgggcgtgccatctgccgctccgctgcaaggtctcgcccgggaccggggctggcggagcgcgcgcccgcgagtaggggccgggccggggaccccgcctaggcggcggcggccgggtccccaaggctgggcgctgcttgcggaaccgacggggcggagaggagcgtggcgggaggaggagtaggagaagggggctggtcaagggaagtgcgacgtgtctgcggagcctttttatacctccttcccgggagtccggcagccgctgctgctgctgctgctgctgctgccgccgccgccgccgccgtccctgcgtccttcggtctctgctcccgggacccgggctccgccgcagccagccagcatgtcggggatcaagaagcaaaagacggagaaccagcagaaatccaccaatgtagtctatcaggcccaccatgtgagcaggaataagagagggcaagtggttggaacaaggggtgggttccgaggatgtaccgtgtggctaacaggtctctctggtgctggaaaaacaacgataagttttgccctggaggagtaccttgtctcccatgccatcccttgttactccctggatggggacaatgtccgtcatggccttaacagaaatctcggattctctcctggggacagagaggaaaatatccgccggattgctgaggtggctaagctgtttgctgatgctggtctggtctgcattaccagctttatttctccattcgcaaaggatcgtgagaatgcccgcaaaatacatgaatcagcagggctgccattctttgaaatatttgtagatgcacctctaaatatttgtgaaagcagagacgtaaaaggcctctataaaagggccagagctggggagattaaaggatttacaggtattgattctgattatgagaaacctgaaactcctgagcgtgtgcttaaaaccaatttgtccacagtgagtgactgtgtccaccaggtagtggaacttctgcaagagcagaacattgtaccctatactataatcaaagatatccacgaactctttgtgccggaaaacaaacttgaccacgtccgagctgaggctgaaactctcccttcattatcaattactaagctggatctccagtgggtccaggttttgagcgaaggctgggccactcccctcaaaggtttcatgcgggagaaggagtacttacaggttatgcactttgacaccctgctagatgatggcgtgatcaacatgagcatccccattgtactgcccgtctctgcagaggataagacacggctggaagggtgcagcaagtttgtcctggcacatggtggacggagggtagctatcttacgagacgctgaattctatgaacacagaaaagaggaacgctgttcccgtgtttgggggacaacatgtacaaaacacccccatatcaaaatggtgatggaaagtggggactggctggttggtggagaccttcaggtgctggagaaaataagatggaatgatgggctggaccaataccgtctgacacctctggagctcaaacagaaatgtaaagaaatgaatgctgatgcggtgtttgcattccagttgcgcaatcctgtccacaatggccatgccctgttgatgcaggacactcgccgcaggctcctagagaggggctacaagcacccggtcctcctactacaccctctgggcggctggaccaaggatgacgatgtgcctctagactggcggatgaagcagcacgcggctgtgctcgaggaaggggtcctggatcccaagtcaaccattgttgccatctttccgtctcccatgttatatgctggccccacagaggtccagtggcactgcaggtcccggatgattgcgggtgccaatttctacattgtggggagggaccctgcaggaatgccccatcctgaaaccaagaaggatctgtatgaacccactcatgggggcaaggtcttgagcatggcccctggcctcacctctgtggaaatcattccattccgagtggctgcctacaacaaagccaaaaaagccatggacttctatgatccagcaaggcacaatgagtttgacttcatctcaggaactcgaatgaggaagctcgcccgggaaggagagaatcccccagatggcttcatggcccccaaagcatggaaggtcctgacagattattacaggtccctggagaagaactaagcctttggctccagagtttctttctgaagtgctctttgattaccttttctatttttatgattagatgctttgtattaaattgcttctcaatgatgcattttaatcttttataatgaagtaaaagttgtgtctataattaaaaaaaaatatatatatatacacacacacatatacatacaaagtcaaactgaagaccaaatcttagcaggtaaaagcaatattcttatacatttcataataaaattagctctatgtattttctactgcacctgagcaggcaggtcccagatttcttaaggctttgtttgaccatgtgtctagttacttgctgaaaagtgaatatattttccagcatgtcttgacaacctgtactcttccaatgtcatttatcagttgtaaaatatatcagattgtgtcctcttctgtacaattgacaaaaaaaaaaatttttttttctcactctaaaagaggtgtggctcacatcaagattcttcctgatattttacctcatgctgtacaaagccttaatgttgtaatcatatcttacgtgttgaagacctgactggagaaacaaaatgtgcaataacgtgaattttatcttagagatctgtgcagcctatttctgtcacaaaagttatattgtctaataagagaagtcttaatggcctctgtgaataatgtaactccagttacacggtgacttttaatagcatacagtgatttgatgaaaggacgtcaaacaatgtggcgatgtcgtggaaagttatctttcccgctctttgctgtggtcattgtgtcttgcagaaaggatggccctgatgcagcagcagcgccagctgtaataaaaaataattcacactatcagactagcaaggcactagaactggaaaagaccacagaaaacaaagaatccaaccctttcatcttacaggtgaacaaactgtgatgatgcacatgtatgtgttttgtaagctgtgagcaccgtaacaaaatgtaaatttgccattattaggaagtgctggtggcagtgaagaagcacccaggccacttgactcccagtctggtgccctgtctacaccagacaacacaggagctgggtcagattcccctcagctgcttaacaaagttcctcgaacagaaagtgcttacaaagctgccttctcggatactgaaaggtcgagttttctgaactgcactgattttattgcagttgaaaaaaaaaaaaagctattccaaagatttcaagctgttctgagacatcttctgatggctttacttcctgagaggcaatgtttttactttatgcataattcattgttgccaaggaataaagtgaagaaacagcaccttttaatatataggtctctctggaagagacctaaattagaaagagaaaactgtgacaattttcatattctcattcttaaaaaacactaatcttaactaacaaaagttcttttgagaataagttacacacaatggccacagcagtttgtctttaatagtatagtgcctatactcatgtaatcggttactcactactgcctttaaaaaaaaaaaccagcatatttattgaaaacatgagacaggattatagtgccttaaccgatatattttgtgacttaaaaaatacatttaaaactgctcttctgctctagtaccatgcttagtgcaaatgattatttctatgtacaactgatgcttgttcttattttaataaatttatcagagtgaa

SEQ ID NO: 273 - DNA, 3590 bp, Homo sapiens
  source 1..3590: mol_type = unassigned DNA
agtgggaagaagcaagaaaaagaggagaaccagcagaaatccaccaatgtagtctatcaggcccaccatgtgagcaggaataagagagggcaagtggttggaacaaggggtgggttccgaggatgtaccgtgtggctaacaggtctctctggtgctggaaaaacaacgataagttttgccctggaggagtaccttgtctcccatgccatcccttgttactccctggatggggacaatgtccgtcatggccttaacagaaatctcggattctctcctggggacagagaggaaaatatccgccggattgctgaggtggctaagctgtttgctgatgctggtctggtctgcattaccagctttatttctccattcgcaaaggatcgtgagaatgcccgcaaaatacatgaatcagcagggctgccattctttgaaatatttgtagatgcacctctaaatatttgtgaaagcagagacgtaaaaggcctctataaaagggccagagctggggagattaaaggatttacaggtattgattctgattatgagaaacctgaaactcctgagcgtgtgcttaaaaccaatttgtccacagtgagtgactgtgtccaccaggtagtggaacttctgcaagagcagaacattgtaccctatactataatcaaagatatccacgaactctttgtgccggaaaacaaacttgaccacgtccgagctgaggctgaaactctcccttcattatcaattactaagctggatctccagtgggtccaggttttgagcgaaggctgggccactcccctcaaaggtttcatgcgggagaaggagtacttacaggttatgcactttgacaccctgctagatggtatgtttttgttagatggcgtgatcaacatgagcatccccattgtactgcccgtctctgcagaggataagacacggctggaagggtgcagcaagtttgtcctggcacatggtggacggagggtagctatcttacgagacgctgaattctatgaacacagaaaagaggaacgctgttcccgtgtttgggggacaacatgtacaaaacacccccatatcaaaatggtgatggaaagtggggactggctggttggtggagaccttcaggtgctggagaaaataagatggaatgatgggctggaccaataccgtctgacacctctggagctcaaacagaaatgtaaagaaatgaatgctgatgcggtgtttgcattccagttgcgcaatcctgtccacaatggccatgccctgttgatgcaggacactcgccgcaggctcctagagaggggctacaagcacccggtcctcctactacaccctctgggcggctggaccaaggatgacgatgtgcctctagactggcggatgaagcagcacgcggctgtgctcgaggaaggggtcctggatcccaagtcaaccattgttgccatctttccgtctcccatgttatatgctggccccacagaggtccagtggcactgcaggtcccggatgattgcgggtgccaatttctacattgtggggagggaccctgcaggaatgccccatcctgaaaccaagaaggatctgtatgaacccactcatgggggcaaggtcttgagcatggcccctggcctcacctctgtggaaatcattccattccgagtggctgcctacaacaaagccaaaaaagccatggacttctatgatccagcaaggcacaatgagtttgacttcatctcaggaactcgaatgaggaagctcgcccgggaaggagagaatcccccagatggcttcatggcccccaaagcatggaaggtcctgacagattattacaggtccctggagaagaactaagcctttggctccagagtttctttctgaagtgctctttgattaccttttctatttttatgattagatgctttgtattaaattgcttctcaatgatgcattttaatcttttataatgaagtaaaagttgtgtctataattaaaaaaaaatatatatatatacacacacacatatacatacaaagtcaaactgaagaccaaatcttagcaggtaaaagcaatattcttatacatttcataataaaattagctctatgtattttctactgcacctgagcaggcaggtcccagatttcttaaggctttgtttgaccatgtgtctagttacttgctgaaaagtgaatatattttccagcatgtcttgacaacctgtactcttccaatgtcatttatcagttgtaaaatatatcagattgtgtcctcttctgtacaattgacaaaaaaaaaaatttttttttctcactctaaaagaggtgtggctcacatcaagattcttcctgatattttacctcatgctgtacaaagccttaatgttgtaatcatatcttacgtgttgaagacctgactggagaaacaaaatgtgcaataacgtgaattttatcttagagatctgtgcagcctatttctgtcacaaaagttatattgtctaataagagaagtcttaatggcctctgtgaataatgtaactccagttacacggtgacttttaatagcatacagtgatttgatgaaaggacgtcaaacaatgtggcgatgtcgtggaaagttatctttcccgctctttgctgtggtcattgtgtcttgcagaaaggatggccctgatgcagcagcagcgccagctgtaataaaaaataattcacactatcagactagcaaggcactagaactggaaaagaccacagaaaacaaagaatccaaccctttcatcttacaggtgaacaaactgtgatgatgcacatgtatgtgttttgtaagctgtgagcaccgtaacaaaatgtaaatttgccattattaggaagtgctggtggcagtgaagaagcacccaggccacttgactcccagtctggtgccctgtctacaccagacaacacaggagctgggtcagattcccctcagctgcttaacaaagttcctcgaacagaaagtgcttacaaagctgccttctcggatactgaaaggtcgagttttctgaactgcactgattttattgcagttgaaaaaaaaaaaaagctattccaaagatttcaagctgttctgagacatcttctgatggctttacttcctgagaggcaatgtttttactttatgcataattcattgttgccaaggaataaagtgaagaaacagcaccttttaatatataggtctctctggaagagacctaaattagaaagagaaaactgtgacaattttcatattctcattcttaaaaaacactaatcttaactaacaaaagttcttttgagaataagttacacacaatggccacagcagtttgtctttaatagtatagtgcctatactcatgtaatcggttactcactactgcctttaaaaaaaaaaaccagcatatttattgaaaacatgagacaggattatagtgccttaaccgatatattttgtgacttaaaaaatacatttaaaactgctcttctgctctagtaccatgcttagtgcaaatgattatttctatgtacaactgatgcttgttcttattttaataaatttatcagagtg

SEQ ID NO: 274 - DNA, 1958 bp, Homo sapiens
  source 1..1958: mol_type = unassigned DNA
gaacattctatcttcagccaccaccctgcaagcctcagatgattgtactggttactgaatgggttgacctctctctagagaaccagcagaaatccaccaatgtagtctatcaggcccaccatgtgagcaggaataagagagggcaagtggttggaacaaggggtgggttccgaggatgtaccgtgtggctaacaggtctctctggtgctggaaaaacaacgataagttttgccctggaggagtaccttgtctcccatgccatcccttgttactccctggatggggacaatgtccgtcatggccttaacagaaatctcggattctctcctggggacagagaggaaaatatccgccggattgctgaggtggctaagctgtttgctgatgctggtctggtctgcattaccagctttatttctccattcgcaaaggatcgtgagaatgcccgcaaaatacatgaatcagcagggctgccattctttgaaatatttgtagatgcacctctaaatatttgtgaaagcagagacgtaaaaggcctctataaaagggccagagctggggagattaaaggatttacaggtattgattctgattatgagaaacctgaaactcctgagcgtgtgcttaaaaccaatttgtccacagtgagtgactgtgtccaccaggtagtggaacttctgcaagagcagaacattgtaccctatactataatcaaagatatccacgaactctttgtgccggaaaacaaacttgaccacgtccgagctgaggctgaaactctcccttcattatcaattactaagctggatctccagtgggtccaggttttgagcgaaggctgggccactcccctcaaaggtttcatgcgggagaaggagtacttacaggttatgcactttgacaccctgctagatgatggcgtgatcaacatgagcatccccattgtactgcccgtctctgcagaggataagacacggctggaagggtgcagcaagtttgtcctggcacatggtggacggagggtagctatcttacgagacgctgaattctatgaacacagaaaagaggaacgctgttcccgtgtttgggggacaacatgtacaaaacacccccatatcaaaatggtgatggaaagtggggactggctggttggtggagaccttcaggtgctggagaaaataagatggaatgatgggctggaccaataccgtctgacacctctggagctcaaacagaaatgtaaagaaatgaatgctgatgcggtgtttgcattccagttgcgcaatcctgtccacaatggccatgccctgttgatgcaggacactcgccgcaggctcctagagaggggctacaagcacccggtcctcctactacaccctctgggcggctggaccaaggatgacgatgtgcctctagactggcggatgaagcagcacgcggctgtgctcgaggaaggggtcctggatcccaagtcaaccattgttgccatctttccgtctcccatgttatatgctggccccacagaggtccagtggcactgcaggtcccggatgattgcgggtgccaatttctacattgtggggagggaccctgcaggaatgccccatcctgaaaccaagaaggatctgtatgaacccactcatgggggcaaggtcttgagcatggcccctggcctcacctctgtggaaatcattccattccgagtggctgcctacaacaaagccaaaaaagccatggacttctatgatccagcaaggcacaatgagtttgacttcatctcaggaactcgaatgaggaagctcgcccgggaaggagagaatcccccagatggcttcatggcccccaaagcatggaaggtcctgacagattattacaggtccctggagaagaactaagcctttggctccagagtttctttctgaagtgctctttgattaccttttctatttttatgatta

SEQ ID NO: 275 - DNA, 3856 bp, Homo sapiens
  source 1..3856: mol_type = unassigned DNA
ctaggcggcggcggccgggtccccaaggctgggcgctgcttgcggaaccgacggggcggagaggagcgtggcgggaggaggagtaggagaagggggctggtcaagggaagtgcgacgtgtctgcggagcctttttatacctccttcccgggagtccggcagccgctgctgctgctgctgctgctgctgccgccgccgccgccgccgtccctgcgtccttcggtctctgctcccgggacccgggctccgccgcagccagccagcatgtcggggatcaagaagcaaaagacggagaaccagcagaaatccaccaatgtagtctatcaggcccaccatgtgagcaggaataagagagggcaagtggttggaacaaggggtgggttccgaggatgtaccgtgtggctaacaggtctctctggtgctggaaaaacaacgataagttttgccctggaggagtaccttgtctcccatgccatcccttgttactccctggatggggacaatgtccgtcatggccttaacagaaatctcggattctctcctggggacagagaggaaaatatccgccggattgctgaggtggctaagctgtttgctgatgctggtctggtctgcattaccagctttatttctccattcgcaaaggatcgtgagaatgcccgcaaaatacatgaatcagcagggctgccattctttgaaatatttgtagatgcacctctaaatatttgtgaaagcagagacgtaaaaggcctctataaaagggccagagctggggagattaaaggatttacaggtattgattctgattatgagaaacctgaaactcctgagcgtgtgcttaaaaccaatttgtccacagtgagtgactgtgtccaccaggtagtggaacttctgcaagagcagaacattgtaccctatactataatcaaagatatccacgaactctttgtgccggaaaacaaacttgaccacgtccgagctgaggctgaaactctcccttcattatcaattactaagctggatctccagtgggtccaggttttgagcgaaggctgggccactcccctcaaaggtttcatgcgggagaaggagtacttacaggttatgcactttgacaccctgctagatggcatggcccttcctgatggcgtgatcaacatgagcatccccattgtactgcccgtctctgcagaggataagacacggctggaagggtgcagcaagtttgtcctggcacatggtggacggagggtagctatcttacgagacgctgaattctatgaacacagaaaagaggaacgctgttcccgtgtttgggggacaacatgtacaaaacacccccatatcaaaatggtgatggaaagtggggactggctggttggtggagaccttcaggtgctggagaaaataagatggaatgatgggctggaccaataccgtctgacacctctggagctcaaacagaaatgtaaagaaatgaatgctgatgcggtgtttgcattccagttgcgcaatcctgtccacaatggccatgccctgttgatgcaggacactcgccgcaggctcctagagaggggctacaagcacccggtcctcctactacaccctctgggcggctggaccaaggatgacgatgtgcctctagactggcggatgaagcagcacgcggctgtgctcgaggaaggggtcctggatcccaagtcaaccattgttgccatctttccgtctcccatgttatatgctggccccacagaggtccagtggcactgcaggtcccggatgattgcgggtgccaatttctacattgtggggagggaccctgcaggaatgccccatcctgaaaccaagaaggatctgtatgaacccactcatgggggcaaggtcttgagcatggcccctggcctcacctctgtggaaatcattccattccgagtggctgcctacaacaaagccaaaaaagccatggacttctatgatccagcaaggcacaatgagtttgacttcatctcaggaactcgaatgaggaagctcgcccgggaaggagagaatcccccagatggcttcatggcccccaaagcatggaaggtcctgacagattattacaggtccctggagaagaactaagcctttggctccagagtttctttctgaagtgctctttgattaccttttctatttttatgattagatgctttgtattaaattgcttctcaatgatgcattttaatcttttataatgaagtaaaagttgtgtctataattaaaaaaaaatatatatatatacacacacacatatacatacaaagtcaaactgaagaccaaatcttagcaggtaaaagcaatattcttatacatttcataataaaattagctctatgtattttctactgcacctgagcaggcaggtcccagatttcttaaggctttgtttgaccatgtgtctagttacttgctgaaaagtgaatatattttccagcatgtcttgacaacctgtactcttccaatgtcatttatcagttgtaaaatatatcagattgtgtcctcttctgtacaattgacaaaaaaaaaaatttttttttctcactctaaaagaggtgtggctcacatcaagattcttcctgatattttacctcatgctgtacaaagccttaatgttgtaatcatatcttacgtgttgaagacctgactggagaaacaaaatgtgcaataacgtgaattttatcttagagatctgtgcagcctatttctgtcacaaaagttatattgtctaataagagaagtcttaatggcctctgtgaataatgtaactccagttacacggtgacttttaatagcatacagtgatttgatgaaaggacgtcaaacaatgtggcgatgtcgtggaaagttatctttcccgctctttgctgtggtcattgtgtcttgcagaaaggatggccctgatgcagcagcagcgccagctgtaataaaaaataattcacactatcagactagcaaggcactagaactggaaaagaccacagaaaacaaagaatccaaccctttcatcttacaggtgaacaaactgtgatgatgcacatgtatgtgttttgtaagctgtgagcaccgtaacaaaatgtaaatttgccattattaggaagtgctggtggcagtgaagaagcacccaggccacttgactcccagtctggtgccctgtctacaccagacaacacaggagctgggtcagattcccctcagctgcttaacaaagttcctcgaacagaaagtgcttacaaagctgccttctcggatactgaaaggtcgagttttctgaactgcactgattttattgcagttgaaaaaaaaaaaaagctattccaaagatttcaagctgttctgagacatcttctgatggctttacttcctgagaggcaatgtttttactttatgcataattcattgttgccaaggaataaagtgaagaaacagcaccttttaatatataggtctctctggaagagacctaaattagaaagagaaaactgtgacaattttcatattctcattcttaaaaaacactaatcttaactaacaaaagttcttttgagaataagttacacacaatggccacagcagtttgtctttaatagtatagtgcctatactcatgtaatcggttactcactactgcctttaaaaaaaaaaaccagcatatttattgaaaacatgagacaggattatagtgccttaaccgatatattttgtgacttaaaaaatacatttaaaactgctcttctgctctagtaccatgcttagtgcaaatgattatttctatgtacaactgatgcttgttcttattttaataaatttatcagagtg

SEQ ID NO: 276 - DNA, 4836 bp, Homo sapiens
  source 1..4836: mol_type = unassigned DNA
ggccgggacgctcggcggagccagggagtccggcgagtcgctgggggaagtcgagcagacacccagcgctgccggaactcggggcgcgcatcccgcaagtcggaacccggcggatcggatcccgcagatcggagacggggcctggagggtggcagcacgcaaagggtgtccctgtccctcaaggggtcatggcctccatgttgctcgcccagcgcctggcctgcagcttccagcacagctaccgcctgctggtgcctggatccagacacattagtcaagctgcagccaaagtcgacgttgaatttgattatgatgggcctctgatgaagacggaagtcccagggcctagatctcaggagttaatgaaacagctgaatataattcagaatgcagaggctgtgcattttttctgcaattacgaagagagccgaggcaattacctggttgatgtggacggcaaccgaatgctggatctttattcccagatctcctctgtccccataggttacagccaccccgccctgctgaaactcatccaacagcctcaaaatgcgagcatgtttgtcaacagacccgccctcggaatcctgcctccggagaactttgtggagaagctccggcagtccttgctctcggtggctcccaaagggatgtcccagctcatcaccatggcctgcggctcctgctccaatgaaaacgccttaaagaccatcttcatgtggtaccggagcaaggaaagagggcagaggggcttctcccaggaggagctggagacgtgcatgattaaccaggcccctggctgccccgactacagcatcctctccttcatgggcgcgttccatgggaggaccatgggttgcttagcgaccacgcactctaaagccattcacaagatcgacatcccttcctttgactggcccatcgcaccgttcccacggctgaaataccctctggaagagtttgtgaaagagaaccaacaggaggaggcccgctgtctggaagaggtggaggatctgattgtgaaatatcggaaaaagaagaagacggtggccgggatcatcgtggagcccatccagtccgagggtggagacaaccacgcatccgatgacttctttcggaagctgagagacatcgccaggaagcatggctgcgccttcttggtggacgaggtccagaccggaggaggctgcacgggcaagttctgggcccatgagcactggggcctggatgacccagcagacgtgatgaccttcagcaagaagatgatgactgggggcttcttccacaaggaggagttcaggcctaatgctccctaccggatcttcaacacctggctgggggacccgtccaagaacctgttgctggctgaggtcatcaacatcatcaagcgggaggacctgctaaataatgcagcccatgccgggaaggccctgctcacaggactgctggacctccaggcccggtacccccagttcatcagcagggtgagaggacgaggcaccttttgctccttcgatactcccgatgattccatacggaataagctcattttaattgccagaaacaaaggtgtggtgttgggtggctgtggtgacaaatccattcgtttccgtcccacgctggtcttcagggatcaccacgctcacctgttcctcaatattttcagtgacatcttagcagacttcaagtaaagaagccatttccactacagtgagaaagcccggatcccaacagttgtcaaattgattagtttgcctaattcatgttttcacttaaaagtatcagaggtgaatgcacagtgaagggtgatttgtggggagggagcatttttggtggtcttgggggaggggaggggagggaagggctggtgttgattttcctccctgcagagccaatggtgcacattggtttaagcccagagatcctgcttgagccctggactcatcttgggaagggccatgggaggtcctggctagagttctgcccaaccttgaccaaccccagcaatttttccaaaagccagtcaagggcattacatttgttcctgggactggcagctgggcctcctgggtgccagtccatctcaagtgccatattctgtgatcacggatgttggctccccctcgccctatgcaagcaaacacactctcacctcctctcccagcctcccggagctctgagcacgccccacgcatggtgcaggagggactggacagatctgaggaaggccgtaaaatggggacaggaggattcagctcaggagtaagggaagaggtcctctggccccctgaagatgagaatcacccctctcagtgcacctggggatccccctaaactgtgaattctgccctggacagggctttgcccttggaggatccccaggtggccttacccgtgattcttactcggcatcctccattccccaaactccctcctccctgttaaatgtcaacctagacctggacctgggtgggaggaaactgtagcctgagtgtccacagggacacacgtgagccacagggctagaagcacaggcccgtcaccccaggaggaaaagcccagggtctggggcagcagagccatcgcatcatgtttcccagggcaacttgaggtctgacttttggctccctcgccctaagaggctcttcctctcttttgctcatccaccttcacaccacttgtgagctgacccccaggaacagcttggctgttccaccagagcagagggaatcattgctggactggatttcttctggagggaagcaccatgaattaaaggtgccagagctccatgcatggaaaagtggcctgttggttcaacgtggtttccttgtacttgatcctcctgaaatgagagattttcctgagatgactgagtatggagattaccaggcagatgataccgaaatgcttaaaggggctgtggctgaggctgtagcatctctgctggaggtgagacactctgggaactgatttgacctcgaatgctcctaaaagagaacttgatagcctgacagcagagaagtattatttggtggggagtctgagaaagcctggcttgtattatctgtccaaaaggaagcctcttcatctcccggtgccttggttgactattttggaaataggcatatcaaggttcctgattcagcactttgctcttttaataacaaatcgtccaaagatctcaaagtaagggtttttttttttagcttccactcttccgcagacttggtcatcgacctatttttgttgaagaatgaaaggcaatgacaagtttaacatatacaaattcgtgaattcttgttcattttgcattcctgcagtcagtgctaatccgtcgttcttaatcaggagttctgccaggtttaaggtcacctgcactcccagccaagtggtgatgtatgcctcccactctctgcaaggttttcctcatttttatattcatttattcatcattcattcattcacctaactttcattaaatagctgcaccatcccaggccctgtgcggagcatcgggaatacaaagatgagataaaacattgtccctgcccccgggggctcacatgccactggaaacaacagactcttaaactaacaattcaagcaggcgccaagtgctatgacagaggtgtgaataaaagcatcaggaaatcggatggagaaccaccattcacccaagggtcagaggaggtttcaaagaaaaggtgtcattggagcagtgttttgcagaatgagccagagttcaccaagcaggcaaggcaaggaagggtgttgcagagagggaacagcatatgcaaaggcgtatcagttcatggcatcacatctttcactggggaagccagtttccacaggcagcatcccaaggttcaataaggccttatttaacaagcaagcaaaatgcaaaccaaaccattattcatttattggcttaagtatgctttctcctgaaaactttagcattgggtgcaaatattcagtatggttctcggagtccaaagggttttaagccagggcacaaccagaaaagtggctctctttggtagggagaggggctccaatatttcgttctctccccatggggcactgacagagaaatgaaatagttttatctggaaaattccagagctattatttactccttaccaagggaagttacttcttgtaaaaacttttaagccatttatcaacaagttcttgttgactcagggcataatgagttcctgagacatgctcttttgggggctggggctttagctagaagaatttcaaggaaaagaattctcagcagagctcaagattgtagaaactcagcagaagctggtaaaaacatggggagcccggaggacaggctgctgtccagggcagaggccatgaagaagtgcttccgtggccgacagtctggaaatgaatccatcatacattagtgccatagagtttagtaaccgtccagcaagtgtcatcacttttacagaaaacaaggtccagtaatagcaagtcttagtacatcctcacttttattataaatgggtgttttttcataatttttactgacgctcagtaaccatgcaaaattgtgtatagcattaatgtatctacatacctacacctatctatatataagctcatggtagaaaaccatagctaagtagcatcgcagacttaagcgtacaaagtgatcttgttcacaagtaatctgttgacagtgccaataaatgataaaaaaaaaattaacatgtcacaatgtaacggatgaccatatgcacaattccatgaattaaatctgtttcctgtgttagtcagtattcttaaataaaatttataattgaaacatga

SEQ ID NO: 277 - DNA, 5586 bp, Homo sapiens
  source 1..5586: mol_type = unassigned DNA
tcttgtgatcaccctcattacctcttctgggccccctgtggacctgcgttgacccagcatgggctacaatgggggagttgggtaatcgctcccggtaggttcctccccaacccccgaggcggggtcaggtggagcgtgggcgccagagcagcccctctgccttgggtgtcttggagatgacttggcgccccccggagccccgtcatggctgtggctgcgtccacaacactgcatcagcagagtcctggggaagccatttaggaatctgaagcccgggatttctgctttgtcccttcaggggttcctgagcctgttaaaaaaaaaaaaaaatctaggaagaggccctggaaggaaaaaggggagggagatagcctattttacaaggtctgaaatgatgtgtcttatccttctggcttaaaccaagctgggcttaaaacatcttttaaaaaaaatctgtattctatttttttctctctgtttatcgctctccttctgcctctgttaatctttgtttctgtgtagttgcatcctgtttctgtctgaaaacccttgtctttctgaatccatctttcagtctctcacattctgtctttcccctcctccttcaccttccctccgtccctctcccttgcgcacttgccgggtaccagctgagtgcatccttttcccaaacctgctctgcttccaaggggcccttttctgtctcctccacctgtccccatgttttggggactgcctggaaatccgggacaccctcctgaggagggagctggtgcccaacggcacctcttaggatgaacccagccagctgcgttcctggcctctgcagaatggcatacagaaggcattttaagcaagcgagctgagctcgccgcaggactccgactaccaggcaccggtggcagcacgcaaagggtgtccctgtccctcaaggggtcatggcctccatgttgctcgcccagcgcctggcctgcagcttccagcacagctaccgcctgctggtgcctggatccagacacattagtcaagctgcagccaaagtcgacgttgaatttgattatgatgggcctctgatgaagacggaagtcccagggcctagatctcaggagttaatgaaacagctgaatataattcagaatgcagaggctgtgcattttttctgcaattacgaagagagccgaggcaattacctggttgatgtggacggcaaccgaatgctggatctttattcccagatctcctctgtccccataggttacagccaccccgccctgctgaaactcatccaacagcctcaaaatgcgagcatgtttgtcaacagacccgccctcggaatcctgcctccggagaactttgtggagaagctccggcagtccttgctctcggtggctcccaaagggatgtcccagctcatcaccatggcctgcggctcctgctccaatgaaaacgccttaaagaccatcttcatgtggtaccggagcaaggaaagagggcagaggggcttctcccaggaggagctggagacgtgcatgattaaccaggcccctggctgccccgactacagcatcctctccttcatgggcgcgttccatgggaggaccatgggttgcttagcgaccacgcactctaaagccattcacaagatcgacatcccttcctttgactggcccatcgcaccgttcccacggctgaaataccctctggaagagtttgtgaaagagaaccaacaggaggaggcccgctgtctggaagaggtggaggatctgattgtgaaatatcggaaaaagaagaagacggtggccgggatcatcgtggagcccatccagtccgagggtggagacaaccacgcatccgatgacttctttcggaagctgagagacatcgccaggaagcatggctgcgccttcttggtggacgaggtccagaccggaggaggctgcacgggcaagttctgggcccatgagcactggggcctggatgacccagcagacgtgatgaccttcagcaagaagatgatgactgggggcttcttccacaaggaggagttcaggcctaatgctccctaccggatcttcaacacctggctgggggacccgtccaagaacctgttgctggctgaggtcatcaacatcatcaagcgggaggacctgctaaataatgcagcccatgccgggaaggccctgctcacaggactgctggacctccaggcccggtacccccagttcatcagcagggtgagaggacgaggcaccttttgctccttcgatactcccgatgattccatacggaataagctcattttaattgccagaaacaaaggtgtggtgttgggtggctgtggtgacaaatccattcgtttccgtcccacgctggtcttcagggatcaccacgctcacctgttcctcaatattttcagtgacatcttagcagacttcaagtaaagaagccatttccactacagtgagaaagcccggatcccaacagttgtcaaattgattagtttgcctaattcatgttttcacttaaaagtatcagaggtgaatgcacagtgaagggtgatttgtggggagggagcatttttggtggtcttgggggaggggaggggagggaagggctggtgttgattttcctccctgcagagccaatggtgcacattggtttaagcccagagatcctgcttgagccctggactcatcttgggaagggccatgggaggtcctggctagagttctgcccaaccttgaccaaccccagcaatttttccaaaagccagtcaagggcattacatttgttcctgggactggcagctgggcctcctgggtgccagtccatctcaagtgccatattctgtgatcacggatgttggctccccctcgccctatgcaagcaaacacactctcacctcctctcccagcctcccggagctctgagcacgccccacgcatggtgcaggagggactggacagatctgaggaaggccgtaaaatggggacaggaggattcagctcaggagtaagggaagaggtcctctggccccctgaagatgagaatcacccctctcagtgcacctggggatccccctaaactgtgaattctgccctggacagggctttgcccttggaggatccccaggtggccttacccgtgattcttactcggcatcctccattccccaaactccctcctccctgttaaatgtcaacctagacctggacctgggtgggaggaaactgtagcctgagtgtccacagggacacacgtgagccacagggctagaagcacaggcccgtcaccccaggaggaaaagcccagggtctggggcagcagagccatcgcatcatgtttcccagggcaacttgaggtctgacttttggctccctcgccctaagaggctcttcctctcttttgctcatccaccttcacaccacttgtgagctgacccccaggaacagcttggctgttccaccagagcagagggaatcattgctggactggatttcttctggagggaagcaccatgaattaaaggtgccagagctccatgcatggaaaagtggcctgttggttcaacgtggtttccttgtacttgatcctcctgaaatgagagattttcctgagatgactgagtatggagattaccaggcagatgataccgaaatgcttaaaggggctgtggctgaggctgtagcatctctgctggaggtgagacactctgggaactgatttgacctcgaatgctcctaaaagagaacttgatagcctgacagcagagaagtattatttggtggggagtctgagaaagcctggcttgtattatctgtccaaaaggaagcctcttcatctcccggtgccttggttgactattttggaaataggcatatcaaggttcctgattcagcactttgctcttttaataacaaatcgtccaaagatctcaaagtaagggtttttttttttagcttccactcttccgcagacttggtcatcgacctatttttgttgaagaatgaaaggcaatgacaagtttaacatatacaaattcgtgaattcttgttcattttgcattcctgcagtcagtgctaatccgtcgttcttaatcaggagttctgccaggtttaaggtcacctgcactcccagccaagtggtgatgtatgcctcccactctctgcaaggttttcctcatttttatattcatttattcatcattcattcattcacctaactttcattaaatagctgcaccatcccaggccctgtgcggagcatcgggaatacaaagatgagataaaacattgtccctgcccccgggggctcacatgccactggaaacaacagactcttaaactaacaattcaagcaggcgccaagtgctatgacagaggtgtgaataaaagcatcaggaaatcggatggagaaccaccattcacccaagggtcagaggaggtttcaaagaaaaggtgtcattggagcagtgttttgcagaatgagccagagttcaccaagcaggcaaggcaaggaagggtgttgcagagagggaacagcatatgcaaaggcgtatcagttcatggcatcacatctttcactggggaagccagtttccacaggcagcatcccaaggttcaataaggccttatttaacaagcaagcaaaatgcaaaccaaaccattattcatttattggcttaagtatgctttctcctgaaaactttagcattgggtgcaaatattcagtatggttctcggagtccaaagggttttaagccagggcacaaccagaaaagtggctctctttggtagggagaggggctccaatatttcgttctctccccatggggcactgacagagaaatgaaatagttttatctggaaaattccagagctattatttactccttaccaagggaagttacttcttgtaaaaacttttaagccatttatcaacaagttcttgttgactcagggcataatgagttcctgagacatgctcttttgggggctggggctttagctagaagaatttcaaggaaaagaattctcagcagagctcaagattgtagaaactcagcagaagctggtaaaaacatggggagcccggaggacaggctgctgtccagggcagaggccatgaagaagtgcttccgtggccgacagtctggaaatgaatccatcatacattagtgccatagagtttagtaaccgtccagcaagtgtcatcacttttacagaaaacaaggtccagtaatagcaagtcttagtacatcctcacttttattataaatgggtgttttttcataatttttactgacgctcagtaaccatgcaaaattgtgtatagcattaatgtatctacatacctacacctatctatatataagctcatggtagaaaaccatagctaagtagcatcgcagacttaagcgtacaaagtgatcttgttcacaagtaatctgttgacagtgccaataaatgataaaaaaaaaattaacatgtcacaatgtaacggatgaccatatgcacaattccatgaattaaatctgtttcctgtgttagtcagtattcttaaataaaatttataattgaaacatga

SEQ ID NO: 278 - DNA, 4908 bp, Homo sapiens
  source 1..4908: mol_type = unassigned DNA
tttgtgtccctttgagtctgcagagaagccagcagctggggctgcagacgggaaaggaatgtcctcagcgtctgccagcacttttgtcttggtcccaacggctgataggaaaatgagaggcagggtcttttctagagagatctggggggtccatttctagccgatgatgcatgcaaagagttcgtgttcacaggacctgggaagcagcggagtagaaagggtggcagcacgcaaagggtgtccctgtccctcaaggggtcatggcctccatgttgctcgcccagcgcctggcctgcagcttccagcacagctaccgcctgctggtgcctggatccagacacattagtcaagctgcagccaaagtcgacgttgaatttgattatgatgggcctctgatgaagacggaagtcccagggcctagatctcaggagttaatgaaacagctgaatataattcagaatgcagaggctgtgcattttttctgcaattacgaagagagccgaggcaattacctggttgatgtggacggcaaccgaatgctggatctttattcccagatctcctctgtccccataggttacagccaccccgccctgctgaaactcatccaacagcctcaaaatgcgagcatgtttgtcaacagacccgccctcggaatcctgcctccggagaactttgtggagaagctccggcagtccttgctctcggtggctcccaaagggatgtcccagctcatcaccatggcctgcggctcctgctccaatgaaaacgccttaaagaccatcttcatgtggtaccggagcaaggaaagagggcagaggggcttctcccaggaggagctggagacgtgcatgattaaccaggcccctggctgccccgactacagcatcctctccttcatgggcgcgttccatgggaggaccatgggttgcttagcgaccacgcactctaaagccattcacaagatcgacatcccttcctttgactggcccatcgcaccgttcccacggctgaaataccctctggaagagtttgtgaaagagaaccaacaggaggaggcccgctgtctggaagaggtggaggatctgattgtgaaatatcggaaaaagaagaagacggtggccgggatcatcgtggagcccatccagtccgagggtggagacaaccacgcatccgatgacttctttcggaagctgagagacatcgccaggaagcatggctgcgccttcttggtggacgaggtccagaccggaggaggctgcacgggcaagttctgggcccatgagcactggggcctggatgacccagcagacgtgatgaccttcagcaagaagatgatgactgggggcttcttccacaaggaggagttcaggcctaatgctccctaccggatcttcaacacctggctgggggacccgtccaagaacctgttgctggctgaggtcatcaacatcatcaagcgggaggacctgctaaataatgcagcccatgccgggaaggccctgctcacaggactgctggacctccaggcccggtacccccagttcatcagcagggtgagaggacgaggcaccttttgctccttcgatactcccgatgattccatacggaataagctcattttaattgccagaaacaaaggtgtggtgttgggtggctgtggtgacaaatccattcgtttccgtcccacgctggtcttcagggatcaccacgctcacctgttcctcaatattttcagtgacatcttagcagacttcaagtaaagaagccatttccactacagtgagaaagcccggatcccaacagttgtcaaattgattagtttgcctaattcatgttttcacttaaaagtatcagaggtgaatgcacagtgaagggtgatttgtggggagggagcatttttggtggtcttgggggaggggaggggagggaagggctggtgttgattttcctccctgcagagccaatggtgcacattggtttaagcccagagatcctgcttgagccctggactcatcttgggaagggccatgggaggtcctggctagagttctgcccaaccttgaccaaccccagcaatttttccaaaagccagtcaagggcattacatttgttcctgggactggcagctgggcctcctgggtgccagtccatctcaagtgccatattctgtgatcacggatgttggctccccctcgccctatgcaagcaaacacactctcacctcctctcccagcctcccggagctctgagcacgccccacgcatggtgcaggagggactggacagatctgaggaaggccgtaaaatggggacaggaggattcagctcaggagtaagggaagaggtcctctggccccctgaagatgagaatcacccctctcagtgcacctggggatccccctaaactgtgaattctgccctggacagggctttgcccttggaggatccccaggtggccttacccgtgattcttactcggcatcctccattccccaaactccctcctccctgttaaatgtcaacctagacctggacctgggtgggaggaaactgtagcctgagtgtccacagggacacacgtgagccacagggctagaagcacaggcccgtcaccccaggaggaaaagcccagggtctggggcagcagagccatcgcatcatgtttcccagggcaacttgaggtctgacttttggctccctcgccctaagaggctcttcctctcttttgctcatccaccttcacaccacttgtgagctgacccccaggaacagcttggctgttccaccagagcagagggaatcattgctggactggatttcttctggagggaagcaccatgaattaaaggtgccagagctccatgcatggaaaagtggcctgttggttcaacgtggtttccttgtacttgatcctcctgaaatgagagattttcctgagatgactgagtatggagattaccaggcagatgataccgaaatgcttaaaggggctgtggctgaggctgtagcatctctgctggaggtgagacactctgggaactgatttgacctcgaatgctcctaaaagagaacttgatagcctgacagcagagaagtattatttggtggggagtctgagaaagcctggcttgtattatctgtccaaaaggaagcctcttcatctcccggtgccttggttgactattttggaaataggcatatcaaggttcctgattcagcactttgctcttttaataacaaatcgtccaaagatctcaaagtaagggtttttttttttagcttccactcttccgcagacttggtcatcgacctatttttgttgaagaatgaaaggcaatgacaagtttaacatatacaaattcgtgaattcttgttcattttgcattcctgcagtcagtgctaatccgtcgttcttaatcaggagttctgccaggtttaaggtcacctgcactcccagccaagtggtgatgtatgcctcccactctctgcaaggttttcctcatttttatattcatttattcatcattcattcattcacctaactttcattaaatagctgcaccatcccaggccctgtgcggagcatcgggaatacaaagatgagataaaacattgtccctgcccccgggggctcacatgccactggaaacaacagactcttaaactaacaattcaagcaggcgccaagtgctatgacagaggtgtgaataaaagcatcaggaaatcggatggagaaccaccattcacccaagggtcagaggaggtttcaaagaaaaggtgtcattggagcagtgttttgcagaatgagccagagttcaccaagcaggcaaggcaaggaagggtgttgcagagagggaacagcatatgcaaaggcgtatcagttcatggcatcacatctttcactggggaagccagtttccacaggcagcatcccaaggttcaataaggccttatttaacaagcaagcaaaatgcaaaccaaaccattattcatttattggcttaagtatgctttctcctgaaaactttagcattgggtgcaaatattcagtatggttctcggagtccaaagggttttaagccagggcacaaccagaaaagtggctctctttggtagggagaggggctccaatatttcgttctctccccatggggcactgacagagaaatgaaatagttttatctggaaaattccagagctattatttactccttaccaagggaagttacttcttgtaaaaacttttaagccatttatcaacaagttcttgttgactcagggcataatgagttcctgagacatgctcttttgggggctggggctttagctagaagaatttcaaggaaaagaattctcagcagagctcaagattgtagaaactcagcagaagctggtaaaaacatggggagcccggaggacaggctgctgtccagggcagaggccatgaagaagtgcttccgtggccgacagtctggaaatgaatccatcatacattagtgccatagagtttagtaaccgtccagcaagtgtcatcacttttacagaaaacaaggtccagtaatagcaagtcttagtacatcctcacttttattataaatgggtgttttttcataatttttactgacgctcagtaaccatgcaaaattgtgtatagcattaatgtatctacatacctacacctatctatatataagctcatggtagaaaaccatagctaagtagcatcgcagacttaagcgtacaaagtgatcttgttcacaagtaatctgttgacagtgccaataaatgataaaaaaaaaattaacatgtcacaatgtaacggatgaccatatgcacaattccatgaattaaatctgtttcctgtgttagtcagtattcttaaataaaatttataattgaaacatga

SEQ ID NO: 279 - DNA, 720 bp, Homo sapiens
  source 1..720: mol_type = unassigned DNA
gtggacatggacggcgtcctggccgacttcgaggccggcctcctgcggggcttccgccgccgcttccctgaggagccgcacgtgccgctggagcaacgccgcggcttcctggcccgcgagcagtaccgcgccctgcggcccgacctggcggataaagtggccagtgtgtacgaagccccgggctttttcctggacctggagcccatcccgggagccttggacgctgtgcgggagatgaacgacctaccggacacgcaggtcttcatctgcaccagccccctgctgaagtaccaccactgtgtgggtgagaaggaggagaccccaagctgggagcacatcttgttcacctgctgccacaatcggcacctggtcctgcccccgacaaggagacggctgctctcctggagtgacaactggagggagatcttagatagcaagcgcggagctgcgcagcgggaatgagcggggatgccgcgggcagcagctggagctaaaggaagggcaggcccacaggggccaccgcagagccgagtcggggcggcatcgtgctggtgcctctggccccgtggagtggagcaggcagataccgttaagcgctgtgctaccgggccccaggcccagccacccggtacctcccgagaggctgtccctggaccctggctggcatggaaatacagtgggaaaaccagtcgggacctttaataaaagaccttggctttc

SEQ ID NO: 280 - DNA, 940 bp, Homo sapiens
  source 1..940: mol_type = unassigned DNA
agcagcgctccctccgcttccggccgagcccgcgccccccagaccccgagagctcgcagctccggcccggcggcgatggcgcggagcgtgcgcgtgctggtggacatggacggcgtcctggccgacttcgaggccggcctcctgcggggcttccgccgccgcttccctgaggagccgcacgtgccgctggagcaacgccgcggcttcctggcccgcgagcagtaccgcgccctgcggcccgacctggcggataaagtggccagtgtgtacgaagccccgggctttttcctggacctggagcccatcccgggagccttggacgctgtgcgggagatgaacgacctaccggacacgcaggtcttcatctgcaccagccccctgctgaagtaccaccactgtgtgggtgagaagtaccgctgggtggagcagcacctggggccccagttcgtagaacgaattatcctgacaagggacaagacggtggtcttgggggacctgctcattgatgacaaggacacagttcgaggccaggaggagaccccaagctgggagcacatcttgttcacctgctgccacaatcggcacctggtcctgcccccgacaaggagacggctgctctcctggagtgacaactggagggagatcttagatagcaagcgcggagctgcgcagcgggaatgagcggggatgccgcgggcagcagctggagctaaaggaagggcaggcccacaggggccaccgcagagccgagtcggggcggcatcgtgctggtgcctctggccccgtggagtggagcaggcagataccgttaagcgctgtgctaccgggccccaggcccagccacccggtacctcccgagaggctgtccctggaccctggctggcatggaaatacagtgggaaaaccagtcgggacctttaataaaagaccttggctttct

SEQ ID NO: 281 - DNA, 1586 bp, Homo sapiens
  source 1..1586: mol_type = unassigned DNA
cggcctcgctctggggccggtacttgcgcgcccgcaccccgcgctccccgccccgctccccgtcccgcgctccacgcgcgccccagcgttgggggcttctcctccgcggcgggaatgtctggccggctccggcagcacggcgcggcccaggtccccgcgcccacgacgggccagcgcgctgggccatgatccggctgggcggctggtgtgcgcggcggctctgcagcgcggcggttcccgcggggcggcgcggggcggcgggcgggctgggcctggcgggaggccgcgccctacgggtgctggtggacatggacggcgtgctggctgacttcgagggcggattcctcaggaagttccgcgcgcgctttcccgaccagcccttcatcgcgctggaggaccggcgcggcttctgggtgtcggagcagtacggccgcctgcggccagggctgagcgagaaggccatcagcatttgggagtcaaagaatttcttttttgaacttgagcctctgccaggggccgtggaagctgtcaaggagatggccagcctacaaaacactgacgtcttcatctgcacaagccccatcaagatgttcaagtactgtccctatgagaagtatgcctgggtggagaagtactttggccctgactttctggagcagattgtgctgaccagagacaagaccgtggtctctgctgaccttctcatagacgaccggccggacatcacaggggccgagccaacccccagctgggagcatgtcctcttcaccgcctgccacaaccagcacctgcagctgcagcccccccgccgcaggctgcactcgtgggcggacgactggaaggccattctggacagcaagcggccctgctgagctggactgtgcttcgggctcctctgtggggctctgacctcagggctcccagctcggggcctgtggggccagtatgctggtctgggagtccctcctagactcctgggccccatgacctcctgctgcatgtcccttcccttccccagccctgccaggccttaacctgatcacggggcagggctgggccctctgggcgcttggacatagacacgtggtcccaggccgttcagcctgacctcaggcagcaggcaccaagctgccagaagcccaggggctcaggacagggaggagttgaggccactgttcagggggctggtggccgtctccactccctaggcaagttctctgaggcagaagggggttccctgttcccagagtctgcagccatcagcaaggaggaccaggaacccggcgactgaggtgcttccaggtggggacaagcccctcttggtctcagccacagcaccccttattccagctgccctgcccaacctgctcaccccacatgaccttctgtgtattcagcaaacactcactaggtgacagcggccaccaggctctgtgctgggggacgatactggccctggcctcgaccagcttagaggtttctcacacctctgttcccagggccccgctcagggcccagcagagagtccgtaggcttgaacatgtgttgagtgcatgaaaaataaatgctgttcatgtgtgtagctc

SEQ ID NO: 282 - DNA, 1615 bp, Homo sapiens
  source 1..1615: mol_type = unassigned DNA
gcgcgtgttcctttagggaccgcgcgcgccgcggcctcgctctggggccggtacttgcgcgcccgcaccccgcgctccccgccccgctccccgtcccgcgctccacgcgcgccccagcgttgggggcttctcctccgcggcgggaatgtctggccggctccggcagcacggcgcggcccaggtccccgcgcccacgacgggccagcgcgctgggccatgatccggctgggcggctggtgtgcgcggcggctctgcagcgcggcggttcccgcggggcggcgcggggcggcgggcgggctgggcctggcgggaggccgcgccctacgggtgctggtggacatggacggcgtgctggctgacttcgagggcggattcctcaggaagttccgcgcgcgctttcccgaccagcccttcatcgcgctggaggaccggcgcggcttctgggtgtcggagcagtacggccgcctgcggccagggctgagcgagaaggccatcagcatttgggagtcaaagaatttcttttttgaacttgagcctctgccaggggccgtggaagctgtcaaggagatggccagcctacaaaacactgacgtcttcatctgcacaagccccatcaagatgttcaagtactgtccctatgagaagtatgcctgggtggagaagtactttggccctgactttctggagcagattgtgctgaccagagacaagaccgtggtctctgctgaccttctcatagacgaccggccggacatcacaggcaaccaacccccagctgggagcatgtcctcttcaccgcctgccacaaccagcacctgcagctgcagcccccccgccgcaggctgcactcgtgggcggacgactggaaggccattctggacagcaagcggccctgctgagctggactgtgcttcgggctcctctgtggggctctgacctcagggctcccagctcggggcctgtggggccagtatgctggtctgggagtccctcctagactcctgggccccatgacctcctgctgcatgtcccttcccttccccagccctgccaggccttaacctgatcacggggcagggctgggccctctgggcgcttggacatagacacgtggtcccaggccgttcagcctgacctcaggcagcaggcaccaagctgccagaagcccaggggctcaggacagggaggagttgaggccactgttcagggggctggtggccgtctccactccctaggcaagttctctgaggcagaagggggttccctgttcccagagtctgcagccatcagcaaggaggaccaggaacccggcgactgaggtgcttccaggtggggacaagcccctcttggtctcagccacagcaccccttattccagctgccctgcccaacctgctcaccccacatgaccttctgtgtattcagcaaacactcactaggtgacagcggccaccaggctctgtgctgggggacgatactggccctggcctcgaccagcttagaggtttctcacacctctgttcccagggccccgctcagggcccagcagagagtccgtaggcttgaacatgtgttgagtgcatgaaaaataaatgctgttcatgtgtgtagctcaa

SEQ ID NO: 283 - DNA, 3435 bp, Homo sapiens
  source 1..3435: mol_type = unassigned DNA
acgtgggaggaagtgctggtgccctctgccgctgctcccgtctctttggttacgctcgtcagccggtcggccgccgcctccagccgtgtgccgctatgggagtcccggcgttcttccgctggctcagccgcaagtacccgtccatcatagtcaactgcgtggaagagaagccaaaagaatgcaatggtgtaaagattccagttgatgccagtaaacctaatccaaatgatgtggagtttgataatctgtatttggatatgaatggaatcatccatccctgtactcatcctgaagacaaaccagcaccaaaaaatgaagatgaaatgatggttgcaatttttgagtacattgacagacttttcagtattgtaagaccaagaagacttctctacatggcaatagatggagtggcaccacgtgctaaaatgaaccagcagcgttcaaggaggttcagggcatcaaaagaaggaatggaagcagcagtcgagaagcagcgagtcagggaagaaatattggcaaaaggtggctttcttcctccagaagaaataaaagaaagatttgacagcaactgtattacaccaggaactgaattcatggacaatcttgctaaatgccttcgctattacatagctgatcgtttaaataatgaccctgggtggaaaaatttgacagttattttatctgatgctagtgctcctggtgaaggagaacataaaatcatggattacattagaaggcaaagagcccagcctaaccatgacccaaatactcatcattgtttatgtggagcagatgctgatctcattatgcttggccttgccacacatgaaccgaactttaccattattagagaagaattcaaaccaaacaagcccaaaccatgtggtctttgtaatcagtttggacatgaggtcaaagattgtgaaggtttgccaagagaaaagaagggaaagcatgatgaacttgccgatagtcttccttgtgcagaaggagagtttatcttccttcggcttaatgttcttcgtgagtatttggaaagagaactcacaatggccagcctaccattcacatttgatgttgagaggagcattgatgactgggttttcatgtgcttctttgtgggaaatgacttcctccctcatttgccatcgttagagattagggaaaatgcaattgaccgtttggttaacatatacaaaaatgtggtacacaaaactgggggttaccttacagaaagtggttatgtcaatctgcaaagagtacagatgatcatgttagcagttggtgaagttgaggatagcatttttaaaaagagaaaggatgatgaggacagttttagaagacgacagaaagaaaaaagaaagagaatgaagagagatcaaccagctttcactcctagtggaatattaactcctcatgccttgggttcaagaaattcaccaggttctcaagtagccagtaatccgagacaagcagcctatgaaatgaggatgcagaataactctagtccttcgatatctcctaatacgagtttcacatctgatggctccccgtctccattaggaggaattaagcgaaaagcagaagacagtgacagtgaacctgagccagaggataatgtcaggttatgggaagctggctggaagcagcggtactacaagaacaaatttgatgtggatgcagctgatgagaaattccgtcggaaagttgtgcagtcgtacgttgaaggactttgctgggttcttagatattattaccagggctgtgcttcctggaagtggtattatccatttcattatgcaccatttgcttcagactttgaaggcattgcagacatgccatctgattttgagaagggtacgaaaccgtttaaaccactagaacaacttatgggggtatttccagctgcaagtggtaattttctacctccatcatggcggaagctcatgagtgatcctgattctagtataattgacttctatcctgaagattttgctattgatttgaatgggaagaaatatgcatggcaaggtgttgctctcttgccattcgtggatgagcgaaggctacgagctgccctagaagaggtatacccagacctcactccagaagagaccagaagaaacagccttggaggtgatgtcttatttgtggggaaacatcacccactccatgacttcattttagagctgtaccagacaggttccacagagccagtggaggtaccccctgaactatgtcatgggattcaaggaaagttttctttggatgaagaagccattcttccagatcaaatagtatgttctcctgttcctatgttaagggatctgacacagaacactgtagtcagtattaattttaaagacccacagtttgctgaagattacatttttaaagctgtaatgcttccaggagcaagaaagccagcagcagtactgaaacctagtgactgggaaaaatccagcaatggacggcagtggaagcctcagcttggctttaaccgtgaccggaggcctgtgcacctggatcaggcagccttcaggactttgggccatgtgatgccaagaggctcaggaactggcatttacagcaatgctgcaccaccacctgtgacttaccagggaaacttatacaggccgcttttgagaggacaagcccagattccaaaacttatgtcaaatatgaggccccaggattcctggcgaggtcctcctccccttttccagcagcaaaggtttgacagaggcgttggggctgaacctctgctcccatggaaccggatgctgcaaacccagaatgcagccttccagccaaaccagtaccagatgctagctgggcctggtgggtatccacccagacgagatgatcgtggagggagacagggatatcccagagaaggaaggaaataccctttgccaccaccctcaggaagatacaattggaattaagcttttgtaaagctttcccaaatcctttcatcattctacagttttatgctatttgtggaaagatttctttctcaagtagtagtttttaataaaactacagtactttgtgtatttcttttaactgtgtatatttctactgatctgatctcactgtttatgttgctttccaaagatgtatgttgcataatacagtggatctgaatttattattgcttataaaacacatttgatggaataggagtactggtttttcataatggttaaaaatgaaaccagctgtggatttcaaaacacagtgtattctagatcatctaagatccatgctgatttttattgcacaagaattaggtttgaactcgagctggaacctcagcaaactagagtatatattgttcagtatttctttggaaacatttcattaatgtacttgtcttacagaaatttctgaactttagtaaaaaaaaataaagttaaacttttaaaactc

SEQ ID NO: 284 - DNA, 3066 bp, Homo sapiens
  source 1..3066: mol_type = unassigned DNA
ctctttggttacgctcgtcagccggtcggccgccgcctccagccgtgtgccgctatgggagtcccggcgttcttccgctggctcagccgcaagtacccgtccatcatagtcaactgcgtggaagagaagaccagcaccaaaaaatgaagatgaaatgatggttgcaatttttgagtacattgacagacttttcagtattgtaagaccaagaagacttctctacatggcaatagatggagtggcaccacgtgctaaaatgaaccagcagcgttcaaggaggttcagggcatcaaaagaaggaatggaagcagcagtcgagaagcagcgagtcagggaagaaatattggcaaaaggtggctttcttcctccagaagaaataaaagaaagatttgacagcaactgtattacaccaggaactgaattcatggacaatcttgctaaatgccttcgctattacatagctgatcgtttaaataatgaccctgggtggaaaaatttgacagttattttatctgatgctagtgctcctggtgaaggagaacataaaatcatggattacattagaaggcaaagagcccagcctaaccatgacccaaatactcatcattgtttatgtggagcagatgctgatctcattatgcttggccttgccacacatgaaccgaactttaccattattagagaagaattcaaaccaaacaagcccaaaccatgtggtctttgtaatcagtttggacatgaggtcaaagattgtgaaggtttgccaagagaaaagaagggaaagcatgatgaacttgccgatagtcttccttgtgcagaaggagagtttatcttccttcggcttaatgttcttcgtgagtatttggaaagagaactcacaatggccagcctaccattcacatttgatgttgagaggagcattgatgactgggttttcatgtgcttctttgtgggaaatgacttcctccctcatttgccatcgttagagattagggaaaatgcaattgaccgtttggttaacatatacaaaaatgtggtacacaaaactgggggttaccttacagaaagtggttatgtcaatctgcaaagagtacagatgatcatgttagcagttggtgaagttgaggatagcatttttaaaaagagaaaggatgatgaggacagttttagaagacgacagaaagaaaaaagaaagagaatgaagagagatcaaccagctttcactcctagtggaatattaactcctcatgccttgggttcaagaaattcaccaggttctcaagtagccagtaatccgagacaagcagcctatgaaatgaggatgcagaataactctagtccttcgatatctcctaatacgagtttcacatctgatggctccccgtctccattaggaggaattaagcgaaaagcagaagacagtgacagtgaacctgagccagaggataatgtcaggttatgggaagctggctggaagcagcggtactacaagaacaaatttgatgtggatgcagctgatgagaaattccgtcggaaagttgtgcagtcgtacgttgaaggactttgctgggttcttagatattattaccagggctgtgcttcctggaagtggtattatccatttcattatgcaccatttgcttcagactttgaaggcattgcagacatgccatctgattttgagaagggtacgaaaccgtttaaaccactagaacaacttatgggggtatttccagctgcaagtggtaattttctacctccatcatggcggaagctcatgagtgatcctgattctagtataattgacttctatcctgaagattttgctattgatttgaatgggaagaaatatgcatggcaaggtgttgctctcttgccattcgtggatgagcgaaggctacgagctgccctagaagaggtatacccagacctcactccagaagagaccagaagaaacagccttggaggtgatgtcttatttgtggggaaacatcacccactccatgacttcattttagagctgtaccagacaggttccacagagccagtggaggtaccccctgaactatgtcatgggattcaaggaaagttttctttggatgaagaagccattcttccagatcaaatagtatgttctcctgttcctatgttaagggatctgacacagaacactgtagtcagtattaattttaaagacccacagtttgctgaagattacatttttaaagctgtaatgcttccaggagcaagaaagccagcagcagtactgaaacctagtgactgggaaaaatccagcaatggacggcagtggaagcctcagcttggctttaaccgtgaccggaggcctgtgcacctggatcaggcagccttcaggactttgggccatgtgatgccaagaggctcaggaactggcatttacagcaatgctgcaccaccacctgtgacttaccagggaaacttatacaggccgcttttgagaggacaagcccagattccaaaacttatgtcaaatatgaggccccaggattcctggcgaggtcctcctccccttttccagcagcaaaggtttgacagaggcgttggggctgaacctctgctcccatggaaccggatgctgcaaacccagaatgcagccttccagccaaaccagtaccagatgctagctgggcctggtgggtatccacccagacgagatgatcgtggagggagacagggatatcccagagaaggaaggaaataccctttgccaccaccctcaggaagatacaattggaattaagcttttgtaaagctttcccaaatcctttcatcattctacagttttatgctatttgtggaaagatttctttctcaagtagtagtttttaataaaactacagtactttgtgtatttcttttaactgtgtatatttctactgatctgatctcactgtttatgttgctttccaaagatgtatgttgcataatacagtggatctgaatttattattgcttataaaacacatttgatggaataggagtactggtttttcataatggttaaaaatgaaaccagctgtggatttc

SEQ ID NO: 285 - DNA, 3319 bp, Homo sapiens
  source 1..3319: mol_type = unassigned DNA
gcattttgggtctcggaagaggttcagaggctgttgttgagcaatgcatgccagccaaaagaatgcaatggtgtaaagattccagttgatgccagtaaacctaatccaaatgatgtggagtttgataatctgtatttggatatgaatggaatcatccatccctgtactcatcctgaagacaaaccagcaccaaaaaatgaagatgaaatgatggttgcaatttttgagtacattgacagacttttcagtattgtaagaccaagaagacttctctacatggcaatagatggagtggcaccacgtgctaaaatgaaccagcagcgttcaaggaggttcagggcatcaaaagaaggaatggaagcagcagtcgagaagcagcgagtcagggaagaaatattggcaaaaggtggctttcttcctccagaagaaataaaagaaagatttgacagcaactgtattacaccaggaactgaattcatggacaatcttgctaaatgccttcgctattacatagctgatcgtttaaataatgaccctgggtggaaaaatttgacagttattttatctgatgctagtgctcctggtgaaggagaacataaaatcatggattacattagaaggcaaagagcccagcctaaccatgacccaaatactcatcattgtttatgtggagcagatgctgatctcattatgcttggccttgccacacatgaaccgaactttaccattattagagaagaattcaaaccaaacaagcccaaaccatgtggtctttgtaatcagtttggacatgaggtcaaagattgtgaaggtttgccaagagaaaagaagggaaagcatgatgaacttgccgatagtcttccttgtgcagaaggagagtttatcttccttcggcttaatgttcttcgtgagtatttggaaagagaactcacaatggccagcctaccattcacatttgatgttgagaggagcattgatgactgggttttcatgtgcttctttgtgggaaatgacttcctccctcatttgccatcgttagagattagggaaaatgcaattgaccgtttggttaacatatacaaaaatgtggtacacaaaactgggggttaccttacagaaagtggttatgtcaatctgcaaagagtacagatgatcatgttagcagttggtgaagttgaggatagcatttttaaaaagagaaaggatgatgaggacagttttagaagacgacagaaagaaaaaagaaagagaatgaagagagatcaaccagctttcactcctagtggaatattaactcctcatgccttgggttcaagaaattcaccaggttctcaagtagccagtaatccgagacaagcagcctatgaaatgaggatgcagaataactctagtccttcgatatctcctaatacgagtttcacatctgatggctccccgtctccattaggaggaattaagcgaaaagcagaagacagtgacagtgaacctgagccagaggataatgtcaggttatgggaagctggctggaagcagcggtactacaagaacaaatttgatgtggatgcagctgatgagaaattccgtcggaaagttgtgcagtcgtacgttgaaggactttgctgggttcttagatattattaccagggctgtgcttcctggaagtggtattatccatttcattatgcaccatttgcttcagactttgaaggcattgcagacatgccatctgattttgagaagggtacgaaaccgtttaaaccactagaacaacttatgggggtatttccagctgcaagtggtaattttctacctccatcatggcggaagctcatgagtgatcctgattctagtataattgacttctatcctgaagattttgctattgatttgaatgggaagaaatatgcatggcaaggtgttgctctcttgccattcgtggatgagcgaaggctacgagctgccctagaagaggtatacccagacctcactccagaagagaccagaagaaacagccttggaggtgatgtcttatttgtggggaaacatcacccactccatgacttcattttagagctgtaccagacaggttccacagagccagtggaggtaccccctgaactatgtcatgggattcaaggaaagttttctttggatgaagaagccattcttccagatcaaatagtatgttctcctgttcctatgttaagggatctgacacagaacactgtagtcagtattaattttaaagacccacagtttgctgaagattacatttttaaagctgtaatgcttccaggagcaagaaagccagcagcagtactgaaacctagtgactgggaaaaatccagcaatggacggcagtggaagcctcagcttggctttaaccgtgaccggaggcctgtgcacctggatcaggcagccttcaggactttgggccatgtgatgccaagaggctcaggaactggcatttacagcaatgctgcaccaccacctgtgacttaccagggaaacttatacaggccgcttttgagaggacaagcccagattccaaaacttatgtcaaatatgaggccccaggattcctggcgaggtcctcctccccttttccagcagcaaaggtttgacagaggcgttggggctgaacctctgctcccatggaaccggatgctgcaaacccagaatgcagccttccagccaaaccagtaccagatgctagctgggcctggtgggtatccacccagacgagatgatcgtggagggagacagggatatcccagagaaggaaggaaataccctttgccaccaccctcaggaagatacaattggaattaagcttttgtaaagctttcccaaatcctttcatcattctacagttttatgctatttgtggaaagatttctttctcaagtagtagtttttaataaaactacagtactttgtgtatttcttttaactgtgtatatttctactgatctgatctcactgtttatgttgctttccaaagatgtatgttgcataatacagtggatctgaatttattattgcttataaaacacatttgatggaataggagtactggtttttcataatggttaaaaatgaaaccagctgtggatttcaaaacacagtgtattctagatcatctaagatccatgctgatttttattgcacaagaattaggtttgaactcgagctggaacctcagcaaactagagtatatattgttcagtatttctttggaaacatttcattaatgtacttgtcttacagaaatttctgaactttagtaaaaaaaaataaagttaaacttttaaaactc

SEQ ID NO: 286 - DNA, 2213 bp, Homo sapiens
  source 1..2213: mol_type = unassigned DNA
actttggggtcgtgggcagatcgctggctcccacgcctggacttcgggatcgcaggcaggatcccttccagcccaagcactccgcccaggcgcgccaggcagagccccaccccatcccgccgttcccttcagccccggggcgcggatcttgcatctgaaactgagcagagcagggcgccgggcagggccggcgggccacgtgataagcccggaaacagctccgccccctcgcttcctgagccgccacatcccggcagccctcctacctgcgcacgtggtgccgccgctgctgcctcccgctcgccctgaacccagtgcctgcagccatggctcccggccagctcgccttatttagtgtctctgacaaaaccggccttgtggaatttgcaagaaacctgaccgctcttggtttgaatctggtcgcttccggagggactgcaaaagctctcagggatgctggtctggcagtcagagatgtctctgagttgacgggatttcctgaaatgttggggggacgtgtgaaaactttgcatcctgcagtccatgctggaatcctagctcgtaatattccagaagataatgctgacatggccagacttgatttcaatcttataagagttgttgcctgcaatctctatccctttgtaaagacagtggcttctccaggtgtaactgttgaggaggctgtggagcaaattgacattggtggagtaaccttactgagagctgcagccaaaaaccacgctcgagtgacagtggtgtgtgaaccagaggactatgtggtggtgtccacggagatgcagagctccgagagtaaggacacctccttggagactagacgccagttagccttgaaggcattcactcatacggcacaatatgatgaagcaatttcagattatttcaggaaacagtacagcaaaggcgtatctcagatgcccttgagatatggaatgaacccacatcagacccctgcccagctgtacacactgcagcccaagcttcccatcacagttctaaatggagcccctggatttataaacttgtgcgatgctttgaacgcctggcagctggtgaaggaactcaaggaggctttaggtattccagccgctgcctctttcaaacatgtcagcccagcaggtgctgctgttggaattccactcagtgaagatgaggccaaagtctgcatggtttatgatctctataaaaccctcacacccatctcagcggcatatgcaagagcaagaggggctgataggatgtcttcatttggtgattttgttgcattgtccgatgtttgtgatgtaccaactgcaaaaattatttccagagaagtatctgatggtataattgccccaggatatgaagaagaagccttgacaatactttccaaaaagaaaaatggaaactattgtgtccttcagatggaccaatcttacaaaccagatgaaaatgaagttcgaactctctttggtcttcatttaagccagaagagaaataatggtgtcgtcgacaagtcattatttagcaatgttgttaccaaaaataaagatttgccagagtctgccctccgagacctcatcgtagccaccattgctgtcaagtacactcagtctaactctgtgtgctacgccaagaacgggcaggttatcggcattggagcaggacagcagtctcgtatacactgcactcgccttgcaggagataaggcaaactattggtggcttagacaccatccacaagtgctttcgatgaagtttaaaacaggagtgaagagagcagaaatctccaatgccatcgatcaatatgtgactggaaccattggcgaggatgaagatttgataaagtggaaggcactgtttgaggaagtccctgagttactcactgaggcagagaagaaggaatgggttgagaaactgactgaagtttctatcagctctgatgccttcttccctttccgagataacgtagacagagctaaaaggagtggtgtggcgtacattgcggctccctccggttctgctgctgacaaagttgtgattgaggcctgcgacgaactgggaatcatcctcgctcatacgaaccttcggctcttccaccactgattttaccacacactgttttttggcttgcttatgtgtaggtgaacagtcacgcctgaaactttgaggataactttttaaaaaaataaaacagtatctcttaatcactgg

SEQ ID NO: 287 - DNA, 2187 bp, Homo sapiens
  source 1..2187: mol_type = unassigned DNA
agccctcctacctgcgcacgtggtgccgccgctgctgcctcccgctcgccctgaacccagtgcctgcagccatggctcccggccagctcggtgaggccctagcggagcggcgcggtctgcgtcctcgcctgcggccccccacgctcccgccttggcggcggccggcgggacccggcactgcaggggcggcgctgcgggattgaaagccagcgtccccgctccccggccgggccgcagcctgcgtggggcccgccttagagcagctcgcgggtgtaagacctggggaggcccggaccaggcctgcgaacgcagggtccagccttatttagtgtctctgacaaaaccggccttgtggaatttgcaagaaacctgaccgctcttggtttgaatctggtcgcttccggagggactgcaaaagctctcagggatgctggtctggcagtcagagatgtctctgagttgacgggatttcctgaaatgttggggggacgtgtgaaaactttgcatcctgcagtccatgctggaatcctagctcgtaatattccagaagataatgctgacatggccagacttgatttcaatcttataagagttgttgcctgcaatctctatccctttgtaaagacagtggcttctccaggtgtaactgttgaggaggctgtggagcaaattgacattggtggagtaaccttactgagagctgcagccaaaaaccacgctcgagtgacagtggtgtgtgaaccagaggactatgtggtggtgtccacggagatgcagagctccgagagtaaggacacctccttggagactagacgccagttagccttgaaggcattcactcatacggcacaatatgatgaagcaatttcagattatttcaggaaacagtacagcaaaggcgtatctcagatgcccttgagatatggaatgaacccacatcagacccctgcccagctgtacacactgcagcccaagcttcccatcacagttctaaatggagcccctggatttataaacttgtgcgatgctttgaacgcctggcagctggtgaaggaactcaaggaggctttaggtattccagccgctgcctctttcaaacatgtcagcccagcaggtgctgctgttggaattccactcagtgaagatgaggccaaagtctgcatggtttatgatctctataaaaccctcacacccatctcagcggcatatgcaagagcaagaggggctgataggatgtcttcatttggtgattttgttgcattgtccgatgtttgtgatgtaccaactgcaaaaattatttccagagaagtatctgatggtataattgccccaggatatgaagaagaagccttgacaatactttccaaaaagaaaaatggaaactattgtgtccttcagatggaccaatcttacaaaccagatgaaaatgaagttcgaactctctttggtcttcatttaagccagaagagaaataatggtgtcgtcgacaagtcattatttagcaatgttgttaccaaaaataaagatttgccagagtctgccctccgagacctcatcgtagccaccattgctgtcaagtacactcagtctaactctgtgtgctacgccaagaacgggcaggttatcggcattggagcaggacagcagtctcgtatacactgcactcgccttgcaggagataaggcaaactattggtggcttagacaccatccacaagtgctttcgatgaagtttaaaacaggagtgaagagagcagaaatctccaatgccatcgatcaatatgtgactggaaccattggcgaggatgaagatttgataaagtggaaggcactgtttgaggaagtccctgagttactcactgaggcagagaagaaggaatgggttgagaaactgactgaagtttctatcagctctgatgccttcttccctttccgagataacgtagacagagctaaaaggagtggtgtggcgtacattgcggctccctccggttctgctgctgacaaagttgtgattgaggcctgcgacgaactgggaatcatcctcgctcatacgaaccttcggctcttccaccactgattttaccacacactgttttttggcttgcttatgtgtaggtgaacagtcacgcctgaaactttgaggataactttttaaaaaaataaaacagtatctcttaatcactgg

SEQ ID NO: 288 - DNA, 3673 bp, Homo sapiens
  source 1..3673: mol_type = unassigned DNA
gacgggctggggaggtggtgccaggctggttgctagctgccgccgctgctcaccccggccgtccggccgcttcattgtcaccgggcctcggggcagtgttgggggtggcggggcgccaggtcgccgacccgaggtttgggcgcgactggttccgcatcccctccccgccggccgaatctgcaggccccgcgcgccaggcaggcttcgcggctgcgcccccggcccgcgcaggacctgccttgtccaccatgaaaggcacccgggccatcggcagcgtcccggagcgcagcccagcaggtgtggacctgagtctgacaggtctccctccgcctgtgtcccggcgtcctggcagtgccgccaccaccaagcccatcgtccgctctgtctccgtggtcacaggcagcgagcagaagaggaaggtgctggaggccacagggcctgggggctcccaggccatcaacaaccttagaagatccaacagcaccacgcaggtcagccagcctcggagcggctcccccaggccaacggagcccacagacttcctgatgctcttcgagggcagccccagtgggaaaaagaggcctgccagcctgagcacagcccccagcgagaagggagccacctggaacgtcctggatgaccagccccggggcttcaccttgccatccaatgcccggagttccagtgcccttgactcaccagcgggcccgcggaggaaagaatgcaccgtggccctggcccccaacttcactgctaacaacaggagcaacaagggagcagtgggcaactgcgtcaccaccatggtgcacaaccgctacaccccctcggagagggcgcctccgctcaagagctccaaccagactgccccctccctcaacaacatcatcaaggcagccacctgtgagggcagtgagagcagcggctttgggaagctgccgaagaatgtctccagtgccacccactcagcccggaacaatactgggggcagcacgggcttgcccaggcggaaggaggtgacggaggaggaggctgagaggtttatccaccaggtgaaccaggccactgtcaccatccagcgctggtaccggcaccaggtgcagcggcgcggagcaggagctgcccgcctggagcacttgcttcaggccaagcgggaggagcagcggcagcggtcaggcgaggggaccctcttggacctgcaccagcagaaagaggcagccaggaggaaggcccgggaggagaaggcacgccaagccaggcgagcagccattcaggagctgcaacagaaacgagccctgagagcccagaaggcgagcactgccgagcgtgggccacctgagaatcccagggagaccagagtgccaggaatgcggcagcctgctcaggagctgtcccccacaccaggcggcactgcccaccaggccctcaaggccaacaatactggtggtggcctccctgctgcaggccccggagaccgctgcctgcccacctccgactcatccccagaaccacagcagcctccagaggacaggacgcaggacgttcttgcccaggatgcagctggggacaacctggagatgatggccccgagcagggggagcgccaagtccagggggccactggaggagctgctgcacacactgcagctgctggagaaggagccggacgtgctgccccgccccaggacccatcacaggggcagatacgcctgggccagcgaggtgaccacggaggatgacgccagctctctgacagctgacaacttggagaaatttggaaaactcagtgcgttccccgaacctcctgaggatgggacgctgctatcggaggccaagctacaaagcatcatgagcttcttggacgagatggagaagtctgggcaggaccagctggactcccagcaggaggggtgggtgccggaggcggggccggggcccctggagctggggtccgaggtgagcacgtctgtgatgcggctgaagctggaggtggaggagaagaagcaggccatgctgctgctgcagagagcgctggcgcagcagcgagacctcacggcccggcgggtcaaggagacagagaaggcgctgagccggcagctgcagcggcagagggagcactacgaggccaccatccagcggcacttggccttcattgaccagctgattgaggacaagaaggtcctgagtgaaaagtgcgaggctgtggtggccgagctgaagcaggaggaccagagatgcaccgagcgtgtggcccaggcacaggcgcagcacgagctggagattaaaaaactcaaagaattaatgagcgccaccgagaaagcccgccgggagaagtggatcagtgagaaaaccaagaagatcaaggaggtcactgtccgaggtctggagcccgagatccagaagctgattgcaaggcacaagcaggaagtgcggaggctcaagagcctgcacgaggcggagctgctgcagtcggatgagcgggcctcgcagcgctgcctgcgccaggccgaggagctgcgggagcagctggagcgggagaaggaggcgctgggccagcaggagcgcgaacgtgctcggcagcggttccagcagcacctggagcaggagcagtgggcgctgcagcagcaacggcagcggctgtacagtgaggtggctgaggagagggagcggctgggccagcaggcagccaggcagcgggcggagctggaagagctgaggcagcagctggaggagagcagctctgcactgacccgagccctgagggctgagtttgagaagggcagggaggagcaggagcgccggcaccagatggagctgaataccctgaagcagcagctggagctggagaggcaggcgtgggaggccggccgcaccaggaaggaggaggcgtggctgctgaaccgggaacaggagctgagggaagaaatccggaaaggccgggacaaggagattgagctggtcattcaccggctggaggccgacatggcgctggccaaggaggagagtgagaaggctgccgagagccgcatcaagcgcttacgggacaagtacgaggccgagctctccgagctggagcagtcggagcggaagcttcaggagcggtgctcggagctgaagggccagcttggggaggccgagggcgagaatctgcgtctgcagggccttgtgcggcagaaggagcgggcgctggaggatgcgcaggcggtgaacgagcagctttctagcgagcgcagcaacctggcccaggtgatccgccaggagttcgaggaccggctggcagcctctgaggaggagacgcggcaggccaaggccgagctggccacgctgcaggcccgccagcagctggagctggaggaggtgcaccggagggtgaagacagccctcgcgaggaaggaggaggccgtgagcagcctccggacacaacatgaggctgcggtgaagcgggccgaccacctggaggagctgctggagcagcacaggaggcccacgccaagtaccaagtgaccagggatgccgggaacactgtcgaagaacggaaggcagaggacagaggctggacgtgggcccagaggcccacagggacgcccacctgccccccacagaggctggtggttgagatgcccacggctaagcacctgtggctgcattttaacagtaaaggaggccgttgttttcag

SEQ ID NO: 289 - DNA, 3511 bp, Homo sapiens
  source 1..3511: mol_type = unassigned DNA
ctcaccccggccgtccggccgcttcattgtcaccgggcctcggggcagtgttgggggtggcggggcgccaggtcgccgacccgaggtttgggcgcgactggttccgcatcccctccccgccggccgaatctgcaggccccgcgcgccaggcaggcttcgcggctgcgcccccggcccgcgcaggacctgccttgtccaccatgaaaggcacccgggccatcggcagcgtcccggagcgcagcccagcaggtgtggacctgagtctgacaggtctccctccgcctgtgtcccggcgtcctggcagtgccgccaccaccaagcccatcgtccgctctgtctccgtggtcacaggcagcgagcagaagaggaaggtgctggaggccacagggcctgggggctcccaggccatcaacaaccttagaagatccaacagcaccacgcaggtcagccagcctcggagcggctcccccaggccaacggagcccacagacttcctgatgctcttcgagggcagccccagtgggaaaaagaggcctgccagcctgagcacagcccccagcgagaagggagccacctggaacgtcctggatgaccagccccggggcttcaccttgccatccaatgcccggagttccagtgcccttgactcaccagcgggcccgcggaggaaagaatgcaccgtggccctggcccccaacttcactgctaacaacaggagcaacaagggagcagtgggcaactgcgtcaccaccatggtgcacaaccgctacaccccctcggagagggcgcctccgctcaagagctccaaccagactgccccctccctcaacaacatcatcaaggcagccacctgtgagggcagtgagagcagcggctttgggaagctgccgaagaatgtctccagtgccacccactcagcccggaacaatactgggggcagcacgggcttgcccaggcggaaggaggtgacggaggaggaggctgagaggtttatccaccaggtgaaccaggccactgtcaccatccagcgctggtaccggcaccaggtgcagcggcgcggagcaggagctgcccgcctggagcacttgcttcaggccaagcgggaggagcagcggcagcggtcaggcgaggggaccctcttggacctgcaccagcagaaagaggcagccaggaggaaggcccgggaggagaaggcacgccaagccaggcgagcagccattcaggagctgcaacagaaacgagccctgagagcccagaaggcgagcactgccgagcgtgggccacctgagaatcccagggagaccagagtgccaggaatgcggcagcctgctcaggagctgtcccccacaccaggcggcactgcccaccaggccctcaaggccaacaatactggtggtggcctccctgctgcaggccccggagaccgctgcctgcccacctccgactcatccccagaaccacagcagcctccagaggacaggacgcaggacgttcttgcccaggatgcagctggggacaacctggagatgatggccccgagcagggggagcgccaagtccagggggccactggaggagctgctgcacacactgcagctgctggagaaggagccggacgtgctgccccgccccaggacccatcacaggggcagatacgcctgggccagcgaggaggatgacgccagctctctgacagctgacaacttggagaaatttggaaaactcagtgcgttccccgaacctcctgaggatgggacgctgctatcggaggccaagctacaaagcatcatgagcttcttggacgagatggagaagtctgggcaggaccagctggactcccagcaggaggggtgggtgccggaggcggggccggggcccctggagctggggtccgaggtgagcacgtctgtgatgcggctgaagctggaggtggaggagaagaagcaggccatgctgctgctgcagagagcgctggcgcagcagcgagacctcacggcccggcgggtcaaggagacagagaaggcgctgagccggcagctgcagcggcagagggagcactacgaggccaccatccagcggcacttggccttcattgaccagctgattgaggacaagaaggtcctgagtgaaaagtgcgaggctgtggtggccgagctgaagcaggaggaccagagatgcaccgagcgtgtggcccaggcacaggcgcagcacgagctggagattaaaaaactcaaagaattaatgagcgccaccgagaaagcccgccgggagaagtggatcagtgagaaaaccaagaagatcaaggaggtcactgtccgaggtctggagcccgagatccagaagctgattgcaaggcacaagcaggaagtgcggaggctcaagagcctgcacgaggcggagctgctgcagtcggatgagcgggcctcgcagcgctgcctgcgccaggccgaggagctgcgggagcagctggagcgggagaaggaggcgctgggccagcaggagcgcgaacgtgctcggcagcggcagcgggcggagctggaagagctgaggcagcagctggaggagagcagctctgcactgacccgagccctgagggctgagtttgagaagggcagggaggagcaggagcgccggcaccagatggagctgaataccctgaagcagcagctggagctggagaggcaggcgtgggaggccggccgcaccaggaaggaggaggcgtggctgctgaaccgggaacaggagctgagggaagaaatccggaaaggccgggacaaggagattgagctggtcattcaccggctggaggccgacatggcgctggccaaggaggagagtgagaaggctgccgagagccgcatcaagcgcttacgggacaagtacgaggccgagctctccgagctggagcagtcggagcggaagcttcaggagcggtgctcggagctgaagggccagcttggggaggccgagggcgagaatctgcgtctgcagggccttgtgcggcagaaggagcgggcgctggaggatgcgcaggcggtgaacgagcagctttctagcgagcgcagcaacctggcccaggtgatccgccaggagttcgaggaccggctggcagcctctgaggaggagacgcggcaggccaaggccgagctggccacgctgcaggcccgccagcagctggagctggaggaggtgcaccggagggtgaagacagccctcgcgaggaaggaggaggccgtgagcagcctccggacacaacatgaggctgcggtgaagcgggccgaccacctggaggagctgctggagcagcacaggaggcccacgccaagtaccaagtgaccagggatgccgggaacactgtcgaagaacggaaggcagaggacagaggctggacgtgggcccagaggcccacagggacgcccacctgccccccacagaggctggtggttgagatgcccacggctaagcacctgtggctgcattttaacagtaaaggaggccgttgttttcagcgc

SEQ ID NO: 290 - DNA, 3619 bp, Homo sapiens
  source 1..3619: mol_type = unassigned DNA
ctcaccccggccgtccggccgcttcattgtcaccgggcctcggggcagtgttgggggtggcggggcgccaggtcgccgacccgaggtttgggcgcgactggttccgcatcccctccccgccggccgaatctgcaggccccgcgcgccaggcaggcttcgcggctgcgcccccggcccgcgcaggacctgccttgtccaccatgaaaggcacccgggccatcggcagcgtcccggagcgcagcccagcaggtgtggacctgagtctgacaggtctccctccgcctgtgtcccggcgtcctggcagtgccgccaccaccaagcccatcgtccgctctgtctccgtggtcacaggcagcgagcagaagaggaaggtgctggaggccacagggcctgggggctcccaggccatcaacaaccttagaagatccaacagcaccacgcaggtcagccagcctcggagcggctcccccaggccaacggagcccacagacttcctgatgctcttcgagggcagccccagtgggaaaaagaggcctgccagcctgagcacagcccccagcgagaagggagccacctggaacgtcctggatgaccagccccggggcttcaccttgccatccaatgcccggagttccagtgcccttgactcaccagcgggcccgcggaggaaagaatgcaccgtggccctggcccccaacttcactgctaacaacaggagcaacaagggagcagtgggcaactgcgtcaccaccatggtgcacaaccgctacaccccctcggagagggcgcctccgctcaagagctccaaccagactgccccctccctcaacaacatcatcaaggcagccacctgtgagggcagtgagagcagcggctttgggaagctgccgaagaatgtctccagtgccacccactcagcccggaacaatactgggggcagcacgggcttgcccaggcggaaggaggtgacggaggaggaggctgagaggtttatccaccaggtgaaccaggccactgtcaccatccagcgctggtaccggcaccaggtgcagcggcgcggagcaggagctgcccgcctggagcacttgcttcaggccaagcgggaggagcagcggcagcggtcaggcgaggggaccctcttggacctgcaccagcagaaagaggcagccaggaggaaggcccgggaggagaaggcacgccaagccaggcgagcagccattcaggagctgcaacagaaacgagccctgagagcccagaaggcgagcactgccgagcgtgggccacctgagaatcccagggagaccagagtgccaggaatgcggcagcctgctcaggagctgtcccccacaccaggcggcactgcccaccaggccctcaaggccaacaatactggtggtggcctccctgctgcaggccccggagaccgctgcctgcccacctccgactcatccccagaaccacagcagcctccagaggacaggacgcaggacgttcttgcccaggatgcagctggggacaacctggagatgatggccccgagcagggggagcgccaagtccagggggccactggaggagctgctgcacacactgcagctgctggagaaggagccggacgtgctgccccgccccaggacccatcacaggggcagatacgcctgggccagcgaggaggatgacgccagctctctgacagctgacaacttggagaaatttggaaaactcagtgcgttccccgaacctcctgaggatgggacgctgctatcggaggccaagctacaaagcatcatgagcttcttggacgagatggagaagtctgggcaggaccagctggactcccagcaggaggggtgggtgccggaggcggggccggggcccctggagctggggtccgaggtgagcacgtctgtgatgcggctgaagctggaggtggaggagaagaagcaggccatgctgctgctgcagagagcgctggcgcagcagcgagacctcacggcccggcgggtcaaggagacagagaaggcgctgagccggcagctgcagcggcagagggagcactacgaggccaccatccagcggcacttggccttcattgaccagctgattgaggacaagaaggtcctgagtgaaaagtgcgaggctgtggtggccgagctgaagcaggaggaccagagatgcaccgagcgtgtggcccaggcacaggcgcagcacgagctggagattaaaaaactcaaagaattaatgagcgccaccgagaaagcccgccgggagaagtggatcagtgagaaaaccaagaagatcaaggaggtcactgtccgaggtctggagcccgagatccagaagctgattgcaaggcacaagcaggaagtgcggaggctcaagagcctgcacgaggcggagctgctgcagtcggatgagcgggcctcgcagcgctgcctgcgccaggccgaggagctgcgggagcagctggagcgggagaaggaggcgctgggccagcaggagcgcgaacgtgctcggcagcggttccagcagcacctggagcaggagcagtgggcgctgcagcagcaacggcagcggctgtacagtgaggtggctgaggagagggagcggctgggccagcaggcagccaggcagcgggcggagctggaagagctgaggcagcagctggaggagagcagctctgcactgacccgagccctgagggctgagtttgagaagggcagggaggagcaggagcgccggcaccagatggagctgaataccctgaagcagcagctggagctggagaggcaggcgtgggaggccggccgcaccaggaaggaggaggcgtggctgctgaaccgggaacaggagctgagggaagaaatccggaaaggccgggacaaggagattgagctggtcattcaccggctggaggccgacatggcgctggccaaggaggagagtgagaaggctgccgagagccgcatcaagcgcttacgggacaagtacgaggccgagctctccgagctggagcagtcggagcggaagcttcaggagcggtgctcggagctgaagggccagcttggggaggccgagggcgagaatctgcgtctgcagggccttgtgcggcagaaggagcgggcgctggaggatgcgcaggcggtgaacgagcagctttctagcgagcgcagcaacctggcccaggtgatccgccaggagttcgaggaccggctggcagcctctgaggaggagacgcggcaggccaaggccgagctggccacgctgcaggcccgccagcagctggagctggaggaggtgcaccggagggtgaagacagccctcgcgaggaaggaggaggccgtgagcagcctccggacacaacatgaggctgcggtgaagcgggccgaccacctggaggagctgctggagcagcacaggaggcccacgccaagtaccaagtgaccagggatgccgggaacactgtcgaagaacggaaggcagaggacagaggctggacgtgggcccagaggcccacagggacgcccacctgccccccacagaggctggtggttgagatgcccacggctaagcacctgtggctgcattttaacagtaaaggaggccgttgttttcagcgc

SEQ ID NO: 291 - DNA, 943 bp, Homo sapiens
  source 1..943: mol_type = unassigned DNA
ggggcggccctacgtagcctggcttctggttgtcatggatgcactggtagaagatgatatctgtattctgaatcatgaaaaagcccataagagagatacagtgactccagtttcaatatattcaggagatgaatctgttgcttcccattttgctcttgtcactgcatatgaagacatcaaaaaacgacttaaggattcagagaaagagaactctttgttaaagaagagaataagatttttggaagaaaagctaatagctcgatttgaagaagaaacaagttccgtgggacgagaacaagtaaataaggcctatcatgcatatcgagaggtttgcattgatagagataatttgaagagcaaactggacaaaatgaataaagacaactctgaatctttgaaagtattgaatgagcagctacaatctaaagaagtagaactcctccagctgaggacagaggtggaaactcagcaggtgatgaggaatttaaatccaccttcatcaaactgggaggtggaaaagttgagctgtgacctgaagatccatggtttggaacaagagctggaactgatgaggaaagaatgtagcgatctcaaaatagaactacagaaagccaaacaaacggatccatatcaggaagacaatctgaagagcagagatctccaaaaactaagcatttcaagagtatctgtagcacagcctggagtgcagtggcgcaatcatgggatagcatgaattttgaggactgttccctcttcgcataagaatagaagtagccatcagagttcatatactttttcaaccctttttcctcaaatacgtatcatttttacttaagtaacttcaattctgtgttttaagctatctaataattgttgtttctactatgttaagatagcctctctacattgttaccctccatccaataaaaaatactgatctgac

SEQ ID NO: 292 - DNA, 1061 bp, Homo sapiens
  source 1..1061: mol_type = unassigned DNA
cccgtgctggtcccgacggcgggcctgggtctcgcgcgcgtattgctgggtaacgggccttctctcgcgtcggcccggcccctcctgcctcggctcgtccctccttccagaacgtcccgggctcctgccgagtcagaagaaatgggactccctccgcgacgtgcccggagcagctcccttcgctgtggaagcggcggtgtcttcgaagaaaccggaagcccgtggtgacccctggcgacccggtttgttttcggtccgtttccaaacactaaggaatcgaaactcggcggccttgggggcggccctacgtagcctggcttctgggaacctaactctcagagaagtaatgctgaacctaacagcaaaagtagatgttcagagcaagtcagtttttcgttaaacaatgaagttgtcatggatgcactggtagaagatgatatctgtattctgaatcatgaaaaagcccataagagagatacagtgactccagtttcaatatattcaggagatgaatctgttgcttcccattttgctcttgtcactgcatatgaagacatcaaaaaacgacttaaggattcagagaaagagaactctttgttaaagaagagaataagatttttggaagaaaagctaatagctcgatttgaagaagaaacaagttccgtgggacgagaacaagtaaataaggcctatcatgcatatcgagaggtttgcattgatagagataatttgaagagcaaactggacaaaatgaataaagacaactctgaatctttgaaagtattgaatgagcagctacaatctaaagaagtagaactcctccagctgaggacagaggtggaaactcagcaggtgatgaggaatttaaatccaccttcatcaaactgggaggtggaaaagttgagctgtgacctgaagatccatggtttggaacaagagctggaactgatgaggaaagaatgtagcgatctcaaaatagaactacagaaagccaaacaaacggatccatatcaggaagacaatctgaagagcagagatctccaaaaactaagcatttcaag

SEQ ID NO: 293 - DNA, 608 bp, Homo sapiens
  source 1..608: mol_type = unassigned DNA
ctttgactagggagcggcccactcctgggcatccctttccccagtcacccccacacccagctgtccacaccctttcccctgtcaccctcacccccagctgtccaggcccttcttggtcattcacttctctaattactccttttcttttcgtactcttactggggcgccttcagttttttttcattcattgagactgctaaatgcttctttccgatacaaattatcggaaagaaaagagggacattggctaggacggtactccctggggcatctgagtggtgaatatcgaccccctgcacttgatcgagggctaacagttgtcatggatgcactggtagaagatgatatctgtattctgaatcatgaaaaagcccataagagagatacagtgactccagtttcaatatattcaggagatgaatctgttgcttcccattttgctcttgtcactgcatatgaagacatcaaaaaacgacttaaggattcagagaaagagaactctttgttaaagaagagaataagatttttggaagaaaagctaatagctcgatttgaagaagaaacaagttccgtgggacgagaacaagtaaataaggcctatcatgcat

SEQ ID NO: 294 - DNA, 1366 bp, Homo sapiens
  source 1..1366: mol_type = unassigned DNA
cgggcctgacttccggtttcctcgcgcgtccctggcgccgagcccgcggacagcggcagccccttttccggctgagagctcatccacacttccaatcactttccggagtgcttcccctccctccggcccgtgctggtcccgacggcgggcctgggtctcgcgcgcgtattgctgggtaacgggccttctctcgcgtcggcccggcccctcctgcctcggctcgtccctccttccagaacgtcccgggctcctgccgagtcagaagaaatgggactccctccgcgacgtgcccggagcagctcccttcgctgtggaagcggcggtgtcttcgaagaaaccggaagcccgtggtgacccctggcgacccggtttgttttcggtccgtttccaaacactaaggaatcgaaactcggcggccttgggggcggccctacgtagcctggcttctggttgtcatggatgcactggtagaagatgatatctgtattctgaatcatgaaaaagcccataagagagatacagtgactccagtttcaatatattcaggagatgaatctgttgcttcccattttgctcttgtcactgcatatgaagacatcaaaaaacgacttaaggattcagagaaagagaactctttgttaaagaagagaataagatttttggaagaaaagctaatagctcgatttgaagaagaaacaagttccgtgggacgagaacaagtaaataaggcctatcatgcatatcgagaggtttgcattgatagagataatttgaagagcaaactggacaaaatgaataaagacaactctgaatctttgaaagtattgaatgagcagctacaatctaaagaagtagaactcctccagctgaggacagaggtggaaactcagcaggtgatgaggaatttaaatccaccttcatcaaactgggaggtggaaaagttgagctgtgacctgaagatccatggtttggaacaagagctggaactgatgaggaaagaatgtagcgatctcaaaatagaactacagaaagccaaacaaacggatccatatcaggaagacaatctgaagagcagagatctccaaaaactaagcatttcaagacagagtatctgtagcacagcctggagtgcagtggcgcaatcatgggatagcatgaattttgaggactgttccctcttcgcataagaatagaagtagccatcagagttcatatactttttcaaccctttttcctcaaatacgtatcatttttacttaagtaacttcaattctgtgttttaagctatctaataattgttgtttctactatgttaagatagcctctctacattgttaccctccatccaataaaaaatactgatctg

SEQ ID NO: 295 - DNA, 1136 bp, Homo sapiens
  source 1..1136: mol_type = unassigned DNA
tccagaacgtcccgggctcctgccgagtcagaagaaatgggactccctccgcgacgtgcccggagcagctcccttcgctgtggaagcggcggtgtcttcgaagaaaccggaagcccgtggtgacccctggcgacccggtttgttttcggtccgtttccaaacactaaggaatcgaaactcggcggccttgggggcggccctacgtagcctggcttctgggaggtcttaaaaggttttagccacagtttctccttccatcatgtttttcaggaacctaactctcagagaagtaatgctgaacctaacagcaaaagtagatgttcagagcaagtcagtttttcgttaaacaatgaagttgtcatggatgcactggtagaagatgatatctgtattctgaatcatgaaaaagcccataagagagatacagtgactccagtttcaatatattcaggagatgaatctgttgcttcccattttgctcttgtcactgcatatgaagacatcaaaaaacgacttaaggattcagagaaagagaactctttgttaaagaagagaataagatttttggaagaaaagctaatagctcgatttgaagaagaaacaagttccgtgggacgagaacaagtaaataaggcctatcatgcatatcgagaggtttgcattgatagagataatttgaagagcaaactggacaaaatgaataaagacaactctgaatctttgaaagtattgaatgagcagctacaatctaaagaagtagaactcctccagctgaggacagaggtggaaactcagcaggtgatgaggaatttaaatccaccttcatcaaactgggaggtggaaaagttgagctgtgacctgaagatccatggtttggaacaagagctggaactgatgaggaaagaatgtagcgatctcaaaatagaactacagaaagccaaacaaacggatccatatcaggaagacaatctgaagagcagagatctccaaaaactaagcatttcaagacagagtatctgtagcacagcctggagtgcagtggcgcaatcatgggatagcatgaattttgaggactgttccctcttcgcataagaatagaagtagccatcagagttcatatactttttcaacccttt

SEQ ID NO: 296 - DNA, 4706 bp, Homo sapiens
  source 1..4706: mol_type = unassigned DNA
agtacgccgcgcgccactcctgcacttccccacccccacgaccgaacctggcttcgctaacgccctcccagctccctcgggcctgacttccggtttcctcgcgcgtccctggcgccgagcccgcggacagcggcagccccttttccggctgagagctcatccacacttccaatcactttccggagtgcttcccctccctccggcccgtgctggtcccgacggcgggcctgggtctcgcgcgcgtattgctgggtaacgggccttctctcgcgtcggcccggcccctcctgcctcggctcgtccctccttccagaacgtcccgggctcctgccgagtcagaagaaatgggactccctccgcgacgtgcccggagcagctcccttcgctgtggaagcggcggtgtcttcgaagaaaccggaagcccgtggtgacccctggcgacccggtttgttttcggtccgtttccaaacactaaggaatcgaaactcggcggccttgggggcggccctacgtagcctggcttctggttgtcatggatgcactggtagaagatgatatctgtattctgaatcatgaaaaagcccataagagagatacagtgactccagtttcaatatattcaggagatgaatctgttgcttcccattttgctcttgtcactgcatatgaagacatcaaaaaacgacttaaggattcagagaaagagaactctttgttaaagaagagaataagatttttggaagaaaagctaatagctcgatttgaagaagaaacaagttccgtgggacgagaacaagtaaataaggcctatcatgcatatcgagaggtttgcattgatagagataatttgaagagcaaactggacaaaatgaataaagacaactctgaatctttgaaagtattgaatgagcagctacaatctaaagaagtagaactcctccagctgaggacagaggtggaaactcagcaggtgatgaggaatttaaatccaccttcatcaaactgggaggtggaaaagttgagctgtgacctgaagatccatggtttggaacaagagctggaactgatgaggaaagaatgtagcgatctcaaaatagaactacagaaagccaaacaaacggatccatatcaggaagacaatctgaagagcagagatctccaaaaactaagcatttcaagtgataatatgcagcatgcatactgggaactgaagagagaaatgtctaatttacatctggtgactcaagtacaagctgaactactaagaaaactgaaaacctcaactgcaatcaagaaagcctgtgcccctgtaggatgcagtgaagaccttggaagagacagcacaaaactgcacttgatgaattttactgcaacatacacaagacatccccctctcttaccaaatggcaaagctctttgtcataccacatcttcccctttaccaggagatgtaaaggttttatcagagaaagcaatcctccaatcatggacagacaatgagagatccattcctaatgatggtacatgctttcaggaacacagttcttatggcagaaattctctggaagacaattcctgggtatttccaagtcctcctaaatcaagtgagacagcatttggggaaactaaaactaaaactttgcctttacccaaccttccaccactgcattacttggatcaacataatcagaactgcctttataagaattaatttggaagagattcacgatttcaccatgaggacacttatctctttcagtggtcctcccaagaaattatttaacaaactgaaaggagattttgattaaaattttgcagaggtcttcagtatctatatttgaacacactgtacaatagtacaaaaaccaacatagttggttttctagtatgaaagagcaccctctagctccatattctaagaatctgaaatatgctactatactaattaataagtaaacttaaggtgtttaaaaaactctgccttctatattaattgtaaaattttgcctctcagaagaatggaattggagattgtagacgtggttttacaaaatgtgaaatgtctaaatatctgttcataaaaataaaaggaaaacatgtttcttcaaattgcataatggaacaaatggcaatgtgagtaggttacatttctgttgttataatgcgtaaagatattgaaaatataatgaaataaaagcatcttaggttataccatctttatatgctattgcgtttcaatatttaagatttaaagtgattttttggtcacagtgttttgttgataaaatttttttagaattgaagtttgaattctaagacttgaaacaacctgatcactgaagccaactttgtcccagcacattccttaagtcctaattgggaaaaaaaaaaaaaaaaatgaaatagttgaaaaactctggggtgtaaacaaatgattgtaaccctacacactattcaataagtagtagaaggagcatcacacagatttcagtctaatctgcccttctgtgggccataatataaacataaatgtgtgtaatgataaaaagtcattttcttcaaagagactacagctagctgcacattgtgtagagcagcttctaaattgttagactttgtgttgaaatgtaatattctatttattgagaaagtgatttaaaattattatttttaatcatagaaatcagggtttgggctgtattgatattgtcgatcatgaaatgtccacacttattctaagtggccaattatttggaaataaagaaggaaataaagatggcttcacatggaaatttaagttctttcagggtggagatttacttggttcatacaccttttgcctgaattaaagtatttcatgtaggaggacttttatcctttttgatagacagtttcatatatcttgaactcaatatctcagatctcttctactgtattactgaatagcatacatacatagacaatgttcgccattcactagatatttttttctattatcttacacttattcaagcttgtctgtgattaatggaattggtgtcagatgctggaatttattctgaccaatgaacacagctgactcaggggagtacaatctcctgccaagtaatagaaccaaacccaatatgcataaaagaaatacaatactccaggctttagctgaaggaagcaactacctgtgtaataacaaagcagcaaaaactatttctcatgtggctgcataggctgtatattatatctgatctctaatgtagcttactggtttgccttttttaaaaccaaaattggaaattttcctttgtaaagaaaaaaagtcttatgagataattgcttgattaatgttttgaacaataccaagaaattgtttaattaaaataaatatttttgtttgaaattgaagtggatgtgaaatattgtccttgcctatagatctcaaaatctagtactaattgttggttgttaatatgattcatacaatagacatttgttaaaccagcttttgagtggagaaaattattttccatttaaacagtacagtgatgatagctatcaaacaggtatactaaaaagtcagtgactgtgacagtttaaagtgttagacaaatgatgtataaggttctttagtaaggaaagattagccaaaaattttttacccagctagaagcttttaaatctacacttgatatctctgttctaggtaaaattcaaacaaccaaaaaacagtggcccatctgtagcttatgaatctatttaaaattgaatattttatgttgacttctttcatactagctgaaacttgctctaaagagcttcctttggaatctttagatttctttttataaggttcaattcagtacatccataaatcgacagaatgaagaaaacataacaaaaagccacctattccttcctcttgctcccttattagctaaagtaaaatttacatctgtaagacttactgagttgctgccaaaatggaactgaattcttaaaagcaggaacatgcctatgtgaaacattagaaaaccaaaataaatgggaaaattcagacttgaagagctgaatcatgtgacaacaaagtactgatcttaattcagaaaggctacttggagaaggtgtatcttaaggggtaaaaaacctgtgggttaccacatattaacagggaataatatcaacagaggcacccataagcaagcaagacacaactgagacagatgtaccaggtgaaaaaaatcttcagtatggatacacatgggtattctgaaggctacaatgaatggtttagtctttgacataaggaggatgaacatattatttatactgtgtaatctaatctggcttctatggggaaagcaacatgtacataagtgaattttctacatgaagtgggctacttctgattttaatcaaagctataaaatagattgtatatttcactagcttcttaaagtaactcttccattttcatttatctctaaaaacagttaacttcctgtgctctaggaaatgcaccaataccaaaggtcaatgtggaaatatgggcatgtttgcccctatgctgtgtggtctctagatttctatatttgctttgcttttgtctgctctagtaatctccctccttttgatctgtggcctgggaaaatgtggtttctttgtatttcaaataaaagtaaaatagttttttgagtggttcactcaagagtaaa

SEQ ID NO: 297 - DNA, 1598 bp, Homo sapiens
  source 1..1598: mol_type = unassigned DNA
agtttcccagctggagcttctgaacgcgctggactgcgagagcccagggagcgcctgaaagctgctcctcggagatacccttcgccgaagcagtaagaacttcctgcttgggtctctgcattcccttcctccgaaacttcccaggagaagggcggaagaccccaggggaaggggcgaggcgaatcttcgcgctgctttttcttccctcccccttcccgcgccgggcgcgcaggcatggatgtgctcagccctggtcagggcaacaacaccacatcaccaccggctccctttgagaccggcggcaacactactggtatctccgacgtgaccgtcagctaccaagtgatcacctctctgctgctgggcacgctcatcttctgcgcggtgctgggcaatgcgtgcgtggtggctgccatcgccttggagcgctccctgcagaacgtggccaattatcttattggctctttggcggtcaccgacctcatggtgtcggtgttggtgctgcccatggccgcgctgtatcaggtgctcaacaagtggacactgggccaggtaacctgcgacctgttcatcgccctcgacgtgctgtgctgcacctcatccatcttgcacctgtgcgccatcgcgctggacaggtactgggccatcacggaccccatcgactacgtgaacaagaggacgccccggcgcgccgctgcgctcatctcgctcacttggcttattggcttcctcatctctatcccgcccatgctgggctggcgcaccccggaagaccgctcggaccccgacgcatgcaccattagcaaggatcatggctacactatctattccacctttggagctttctacatcccgctgctgctcatgctggttctctatgggcgcatattccgagctgcgcgcttccgcatccgcaagacggtcaaaaaggtggagaagaccggagcggacacccgccatggagcatctcccgccccgcagcccaagaagagtgtgaatggagagtcggggagcaggaactggaggctgggcgtggagagcaaggctgggggtgctctgtgcgccaatggcgcggtgaggcaaggtgacgatggcgccgccctggaggtgatcgaggtgcaccgagtgggcaactccaaagagcacttgcctctgcccagcgaggctggtcctaccccttgtgcccccgcctctttcgagaggaaaaatgagcgcaacgccgaggcgaagcgcaagatggccctggcccgagagaggaagacagtgaagacgctgggcatcatcatgggcaccttcatcctctgctggctgcccttcttcatcgtggctcttgttctgcccttctgcgagagcagctgccacatgcccaccctgttgggcgccataatcaattggctgggctactccaactctctgcttaaccccgtcatttacgcatacttcaacaaggactttcaaaacgcgtttaagaagatcattaagtgtaagttctgccgccagtgatgacggaggagtagccggccagtcgaggctacaggatccgtcccattcactatgcttcccccaaccctagggaatcaacacttaagataattcgc

SEQ ID NO: 298 - DNA, 553 bp, Homo sapiens
  source 1..553: mol_type = unassigned DNA
tttgttacaaccttggtctgaccggcagggatctggtgtgtatatttctgggattggagactgtttgctagtggggagactccagctccggcagccagttcgggagcggcaaagtaaaatggacagcgacagacagacgttccagccacctctccgccgccgggagatcctggagctgctttcaggccaactccagtttcccagctggagcttctgaacgcgctggactgcgagagcccagggagcgcctgaaagctgctcctcggagatacccttcgccgaagcagtaagaacttcctgcttgggtctctgcattcccttcctccgaaacttcccaggagaagggcggaagaccccaggggaaggggcgaggcgaatcttcgcgctgctttttcttccctcccccttcccgcgccgggcgcgcaggcatggatgtgctcagccctggtcagggcaacaacaccacatcaccaccggctccctttgagaccggcggcaacactactggtatctccgacgtgaccgtcagctaccaagtgatcacctctctgct

SEQ ID NO: 299 - DNA, 1543 bp, Homo sapiens
  source 1..1543: mol_type = unassigned DNA
atttggtcaaagccttctcctcaagcagtacttcaccctcctgcactagacgcctccagggagctggagcggagcagggctcggtgggccagctcttagcaacccaggtctaagacccggtgtggagaggaacaaccacagacgcggcggcttagctaggcgctctggaagtgcaggggaggcgcccgcctgccttggctgccgcacccatgacctctagtttcagctgtgaacctgggcggaggaataattgaggaactcacggaactatcaactggggacaaacctgcgatcgccacggtccttccgccctctccttcgtccgctccatgcccaagagctgcgctccggagctggggcgaggagagccatggaggaaccgggtgctcagtgcgctccaccgccgcccgcgggctccgagacctgggttcctcaagccaacttatcctctgctccctcccaaaactgcagcgccaaggactacatttaccaggactccatctccctaccctggaaagtactgctggttatgctattggcgctcatcaccttggccaccacgctctccaatgcctttgtgattgccacagtgtaccggacccggaaactgcacaccccggctaactacctgatcgcctctctggcggtcaccgacctgcttgtgtccatcctggtgatgcccatcagcaccatgtacactgtcaccggccgctggacactgggccaggtggtctgtgacttctggctgtcgtcggacatcacttgttgcactgcctccatcctgcacctctgtgtcatcgccctggaccgctactgggccatcacggacgccgtggagtactcagctaaaaggactcccaagagggcggcggtcatgatcgcgctggtgtgggtcttctccatctctatctcgctgccgcccttcttctggcgtcaggctaaggccgaagaggaggtgtcggaatgcgtggtgaacaccgaccacatcctctacacggtctactccacggtgggtgctttctacttccccaccctgctcctcatcgccctctatggccgcatctacgtagaagcccgctcccggattttgaaacagacgcccaacaggaccggcaagcgcttgacccgagcccagctgataaccgactcccccgggtccacgtcctcggtcacctctattaactcgcgggttcccgacgtgcccagcgaatccggatctcctgtgtatgtgaaccaagtcaaagtgcgagtctccgacgccctgctggaaaagaagaaactcatggccgctagggagcgcaaagccaccaagaccctagggatcattttgggagcctttattgtgtgttggctacccttcttcatcatctccctagtgatgcctatctgcaaagatgcctgctggttccacctagccatctttgacttcttcacatggctgggctatctcaactccctcatcaaccccataatctataccatgtccaatgaggactttaaacaagcattccataaactgatacgttttaagtgcacaagttga

SEQ ID NO: 300 - DNA, 1200 bp, Homo sapiens
  source 1..1200: mol_type = unassigned DNA
agccaaatgtgtggaggtctgtgggaagagagagccacctagcatgtccccactgaaccagtcagcagaaggccttccccaggaggcctccaacagatccctgaatgccacagaaacctcagaggcttgggatcccaggaccctccaggcgctcaagatctcccttgccgtggtcctttccgtcatcacactggccacagtcctctccaatgcctttgtactcaccaccatcttactcaccaggaagctccacacccctgccaactacctgattggctccctggccaccaccgacctcttggtttccatcttggtaatgcccatcagcatcgcctataccatcacccacacctggaactttggccaaatcttgtgtgacatctggctgtcctctgacatcacgtgctgcacagcctccatcctgcatctctgtgtcattgctctggacaggtactgggcaatcacagatgccctggaatacagtaaacgcaggacggctggccacgcggccaccatgatcgccattgtctgggccatctccatctgcatctccatccccccgctcttctggcggcaggccaaggcccaggaggagatgtcggactgtctggtgaacacctctcagatctcctacaccatctactccacctgtggggccttctacattccctcggtgttgctcatcatcctatatggccggatctaccgggctgcccggaaccgcatcctgaatccaccctcactctatgggaagcgcttcaccacggcccacctcatcacaggctctgccgggtcctcgctctgctcgctcaactccagcctccatgaggggcactcgcactcggctggctcccctctctttttcaaccacgtgaaaatcaagcttgctgacagtgccctggaacgcaagaggatttctgctgctcgagaaaggaaagccactaaaatcctgggcatcattctgggggcctttatcatctgctggctgcccttcttcgtggtgtctctggtcctccccatctgccgggactcctgctggatccacccggcgctctttgacttcttcacctggctaggctatttaaactccctcatcaatccaataatctacactgtgtttaatgaagagtttcggcaagcttttcagaaaattgtccctttccggaaggcctcctagtcttattcgatgaggtaaagaaa

SEQ ID NO: 301 - DNA, 2835 bp, Homo sapiens
  source 1..2835: mol_type = unassigned DNA
ctaaatccagaatcgtttcaattactgtgaggggaattctgaagttctcattaaacacacgaatgtctcaagctttgaaaagagccagatgccaaaggcaagaatcccagggcattgcccacctgggtgtgatcccctgataattgtctaacaaattcagcatgtgtcccctgggcatgaccatctgctgggaaaagttccaggaccctgagacatcttgggattcctgtggtttaggaaagacctttaactaccagctggtagttgtctcagcattcttcaaatagtccggtcttgtttaatattattattattattgttatttaattttattttattgcaactgtacttagagaatagtctggtcttgagaccttttcactgtggtctgttctggtgtacggctcccaccagtgtgaagcagaaggatgactttgctctgttgtcaggacaaccttgaaggaaggagccaaatgtgtggaggtctgtgggaagagagagccacctagcatgtccccactgaaccagtcagcagaaggccttccccaggaggcctccaacagatccctgaatgccacagaaacctcagaggcttgggatcccaggaccctccaggcgctcaagatctcccttgccgtggtcctttccgtcatcacactggccacagtcctctccaatgcctttgtactcaccaccatcttactcaccaggaagctccacacccctgccaactacctgattggctccctggccaccaccgacctcttggtttccatcttggtaatgcccatcagcatcgcctataccatcacccacacctggaactttggccaaatcttgtgtgacatctggctgtcctctgacatcacgtgctgcacagcctccatcctgcatctctgtgtcattgctctggacaggtactgggcaatcacagatgccctggaatacagtaaacgcaggacggctggccacgcggccaccatgatcgccattgtctgggccatctccatctgcatctccatccccccgctcttctggcggcaggccaaggcccaggaggagatgtcggactgtctggtgaacacctctcagatctcctacaccatctactccacctgtggggccttctacattccctcggtgttgctcatcatcctatatggccggatctaccgggctgcccggaaccgcatcctgaatccaccctcactctatgggaagcgcttcaccacggcccacctcatcacaggctctgccgggtcctcgctctgctcgctcaactccagcctccatgaggggcactcgcactcggctggctcccctctctttttcaaccacgtgaaaatcaagcttgctgacagtgccctggaacgcaagaggatttctgctgctcgagaaaggaaagccactaaaatcctgggcatcattctgggggcctttatcatctgctggctgcccttcttcgtggtgtctctggtcctccccatctgccgggactcctgctggatccacccggcgctctttgacttcttcacctggctaggctatttaaactccctcatcaatccaataatctacactgtgtttaatgaagagtttcggcaagcttttcagaaaattgtccctttccggaaggcctcctagtcttattcggtgatgactcttgttatcttttgtgtcctgtaacctcatcgggattgtcttttttttttttaattattttctgagacttggattaattcatggtatcttgagtcttggttcaatcaacagaattgttctttttcctgttgttttcttaacttctgaaagagctgtgggtggtggggggcggggggcaggactgaagatttcactacttagcataatattttctttctttttttttttttttgagacggagtcttgccctctcgccaggctggagtgtagtggcacaatctcagctcactgcaacctccgcatcccgggttcaagagattctgcctcagcctccagagtagctgggactacaaacgtgtgtcaccaggcccagctaatttttgtatttttaataaagacggggtttcatcatgttggccagggtggtctcgatctcttgacctcgtgatccgcccgcctcagcatcccaaagtgctgggattacaggcatgagccactgtgcctggccaacataatgttttcacagttcctctttgttggaagaagtgtgtgacctacaagattcctggttgatacagttcaggtgagaaactgtttgattatagaaaagaccccagactcagagggaaggctctctggtctacctgagatctatatggagcttaaaggagggtgaataagattaatgacctgaattgaaagagaatttggagccaggatgggtctccattctgtgtggcaccttgattggaaaataatatccatgcgtttcttccactgagtctttcttagattaaatctctcccagttgtccgtgaagagaaagacagtatttgcagtgccgatgatatagagtgacttggagagagattcagaagttaggggtagcgggggtaggatggttgggaccagattgactaccctgtacccttccttcttccccaatatgcctgcgccatcttcacattctgaagttgaaacccatgatcacccctttgaggtagattgaccggctttagacgcccaccccccacccaccgcaagctttgagtgggacaccattctgaattttttttctgaatttttttttaacatctctttctcattagagatctgaaaactcattagagatgttgagtcttatcaaataaaaagcatgagacatcatggcca

SEQ ID NO: 302 - DNA, 2039 bp, Homo sapiens
  source 1..2039: mol_type = unassigned DNA
aagacctggagtacctcggagctgcgacctccagttcacaataccacctgcctcacacccgggctcatcttttcatcccacacccaccacccccctctccgttcacggtgtcccgggaggctgcgacctgcgtagatgatttagcagactgcccctgcccatgctcctgctcctgctcctcctcctcctcttccccgctctctccctctcgcctcctcttccagtccaggcgcccagactcggcgaagcgcagcgcctgccaccagcggtgcctcgggctgcccggcgcgccgcgctcccaggttctgtctcgccgcaccccggcgggcactggcgcgggcaaggacgctggcggggagaacgccctgggctcaacgtactccagaatcgaatgttgagagaagcagtgctctgatccagctcaggagaaaaaggagcgggttccgagtgagacttctggagccagctggacgtgccggtttgcccagtgcggcgcggctgcacgcaccgtccacaaggaaccttcactcagaagaaatgctgtggcccttccctttaccaacagaaaatggaacacaagagaccacatagctgaacaaattatagcctccttacaagtgagaaaccttcgaggctacatagttttcagccaaaggaaaataaccaacagcttctccacagtgtagactgaaacaagggaaacatgaacatcacaaactgtaccacagaggccagcatggctataagacccaagaccatcactgagaagatgctcatttgcatgactctggtggtcatcaccaccctcaccacgttgctgaacttggctgtgatcatggctattggcaccaccaagaagctccaccagcctgccaactacctaatctgttctctggccgtgacggacctcctggtggcagtgctcgtcatgcccctgagcatcatctacattgtcatggatcgctggaagcttgggtacttcctctgtgaggtgtggctgagtgtggacatgacctgctgcacctgctccatcctccacctctgtgtcattgccctggacaggtactgggccatcaccaatgctattgaatacgccaggaagaggacggccaagagggccgcgctgatgatccttaccgtctggaccatctccattttcatctccatgccccctctgttctggagaagccaccgccgcctaagccctccccctagtcagtgcaccatccagcacgaccatgttatctacaccatttactccacgctgggtgcgttttatatccccttgactttgatactgattctctattaccggatttaccacgcggccaagagcctttaccagaaaaggggatcaagtcggcacttaagcaacagaagcacagatagccagaattcttttgcaagttgtaaacttacacagactttctgtgtgtctgacttctccacctcagaccctaccacagagtttgaaaagttccatgcctccatcaggatcccccccttcgacaatgatctagatcacccaggagaacgtcagcagatctctagcaccagggaacggaaggcagcacgcatcctggggctgattctgggtgcattcattttatcctggctgccatttttcatcaaagagttgattgtgggtctgagcatctacaccgtgtcctcggaagtggccgactttctgacgtggctcggttatgtgaattctctgatcaaccctctgctctatacgagttttaatgaagactttaagctggcttttaaaaagctcattagatgccgagagcatacttagactgtaaaaagctaaaaggcacgactttttccagagcctcatgagtggatgggggtaaggggtgcaacttattaattcttgaacatacttggttcaggagagtttgtaagtatgtgtggtcttgtttccttgtttgtttgtttgttttgttctgttttgtttgaggattgttatttggcgtgctgttttctacctctggtcttatctgtgatacataatttcaaataaacattatcat

SEQ ID NO: 303 - DNA, 1919 bp, Homo sapiens
  source 1..1919: mol_type = unassigned DNA
atcgaatgttgagagaagcagtgctctgatccagctcaggagaaaaaggagcgggttccgagtgagacttctggagccagctggacgtgccggtttgcccagtgcggcgcggctgcacgcaccgtccacaagagagtctcagtcgcccaggctggagtgcagcagcacaatctcacctcattgcaacctccgcctcccaggttcaagcaattctcccacctcagcttcctagtagctgggattacaggcactcaccaccatgcccagctaattttttgaatttttagtagagacgggatttcaccatattggccatgctggtcttgaacccccgacctcaaatgattcgcccgcctcagcctcccaaagtgctgggattacaggcgaaccttcactcagaagaaatgctgtggcccttccctttaccaacagaaaatggaacacaagagaccacatagctgaacaaattatagcctccttacaagtgagaaaccttcgaggctacatagttttcagccaaaggaaaataaccaacagcttctccacagtgtagactgaaacaagggaaacatgaacatcacaaactgtaccacagaggccagcatggctataagacccaagaccatcactgagaagatgctcatttgcatgactctggtggtcatcaccaccctcaccacgttgctgaacttggctgtgatcatggctattggcaccaccaagaagctccaccagcctgccaactacctaatctgttctctggccgtgacggacctcctggtggcagtgctcgtcatgcccctgagcatcatctacattgtcatggatcgctggaagcttgggtacttcctctgtgaggtgtggctgagtgtggacatgacctgctgcacctgctccatcctccacctctgtgtcattgccctggacaggtactgggccatcaccaatgctattgaatacgccaggaagaggacggccaagagggccgcgctgatgatccttaccgtctggaccatctccattttcatctccatgccccctctgttctggagaagccaccgccgcctaagccctccccctagtcagtgcaccatccagcacgaccatgttatctacaccatttactccacgctgggtgcgttttatatccccttgactttgatactgattctctattaccggatttaccacgcggccaagagcctttaccagaaaaggggatcaagtcggcacttaagcaacagaagcacagatagccagaattcttttgcaagttgtaaacttacacagactttctgtgtgtctgacttctccacctcagaccctaccacagagtttgaaaagttccatgcctccatcaggatcccccccttcgacaatgatctagatcacccaggagaacgtcagcagatctctagcaccagggaacggaaggcagcacgcatcctggggctgattctgggtgcattcattttatcctggctgccatttttcatcaaagagttgattgtgggtctgagcatctacaccgtgtcctcggaagtggccgactttctgacgtggctcggttatgtgaattctctgatcaaccctctgctctatacgagttttaatgaagactttaagctggcttttaaaaagctcattagatgccgagagcatacttagactgtaaaaagctaaaaggcacgactttttccagagcctcatgagtggatgggggtaaggggtgcaacttattaattcttgaacatacttggttcaggagagtttgtaagtatgtgtggtcttgtttccttgtttgtttgtttgttttgttctgttttgtttgaggattgttatttggcgtgctgttttctacctctggtcttatctgtgatacataatttcaaataaacattatcatacaaaaacagaaa

SEQ ID NO: 304 - DNA, 3074 bp, Homo sapiens
  source 1..3074: mol_type = unassigned DNA
cccttgttacaggtatccatttttcagctatattaatcttttaaaacaaagaaaatggatttcttaaattcatctgatcaaaacttgacctcagaggaactgttaaacagaatgccatccaaaattctggtgtccctcactctgtctgggctggcactgatgacaacaactatcaactcccttgtgatcgctgcaattattgtgacccggaagctgcaccatccagccaattatttaatttgttcccttgcagtcacagattttcttgtggctgtcctggtgatgcccttcagcattgtgtatattgtgagagagagctggattatggggcaagtggtctgtgacatttggctgagtgttgacattacctgctgcacgtgctccatcttgcatctctcagctatagctttggatcggtatcgagcaatcacagatgctgttgagtatgccaggaaaaggactccaaagcatgctggcattatgattacaatagtttggattatatctgtttttatctctatgcctcctctattctggaggcaccaaggaactagcagagatgatgaatgcatcatcaagcacgaccacattgtttccaccatttactcaacatttggagctttctacatcccactggcattgattttgatcctttactacaaaatatatagagcagcaaagacattataccacaagagacaagcaagtaggattgcaaaggaggaggtgaatggccaagtccttttggagagtggtgagaaaagcactaaatcagtttccacatcctatgtactagaaaagtctttatctgacccatcaacagactttgataaaattcatagcacagtgagaagtctcaggtctgaattcaagcatgagaaatcttggagaaggcaaaagatctcaggtacaagagaacggaaagcagccactaccctgggattaatcttgggtgcatttgtaatatgttggcttcctttttttgtaaaagaattagttgttaatgtctgtgacaaatgtaaaatttctgaagaaatgtccaattttttggcatggcttgggtatctcaattcccttataaatccactgatttacacaatctttaatgaagacttcaagaaagcattccaaaagcttgtgcgatgtcgatgttagttttaaaaatgtttattattgaaggatgggggtttttgaggggaggaataactagatgaatgccaaataataaaacacttaagcttttagagggaaatacatgaaaactgctaaattgataaggctataatttatattttaatagcaatgtgaatataaaagttattgatcaccactattctagggtattcaaaattagaaaataatttatgtaggttataaacaatattttgcctatgcaatgttcctaaaaagctaactggaaaaaatatatatatatacaatagtaatgacagtgattttccatgtttacatcttacaataattatagaggagttttcaattaacaacatacctccctccataatttctatctagtcctactgttttataatataattctattattttgtataagaaaatataattcaccacaaagtacacatttctcctgtctccattcttgtcccttctccatcttaccctgagcaaaagggagggggaaggagcaactcttacttagtgtgactgcagaaaatgtaaaaaagtcagagcttgaaattgtccttgtgtttaggtagcaaagagtaatcataaagtgggttaggtacagcaaaataattcaatactgaacttgtgcatatttaatgtattatgtttgatataaacttctagaataatattatcttatccttatattatcagcatttgaaatcaaagccttaccttagtaacaataactcaacaaaggggcatgggtgacgttgttataattgctctctgtttacttaggaatcaaatttaaagcactaaatatcatagattactcaccacagttatactcttaacatctttttaaaagtataaaatgtatttcatttctgttaataagctcagttattaactaaattgtctgtggtattttgcacttcagtattttccatacctttgatttcaacattatttcccgtttactagacagaatataatggaaatttttagaactttccctttactttaaaatatttctacttttccaattggtagaaatgaacaggaaaaaagactcatattacactaattaataaatgtacacacatatatatttttgtaattagtcactctactagttcagtgagccaaagcaattccataagtttttcttccatatttataaaaggatttgaaaacaatagaaccatgagtttgagaggattttattttatttgaaccagcaaggtcatagactacctttgggaagacctatcatcaaccaagatcgtttgaaaaacaatatatacctttttttaagttgtacatttatgtgcattgtaaatattccttcctgatggtgtggttaagagtacattacatcaattttatgtatatatagatctgtgacaaattactctcaatctaacaaacatttacagagttcccattttatacaaggcattgagacatatactagatagaagatatacgaaataataaaatacagttttttttcctgaatatgtttacagtctaaaaggagaaacaagaaaaaataaaactataatagaaaagagcaaactaaaatctggcatggaagttgtttacacagttatgatggtgcagaggaaaaactgatcgcatcttgtttagaaaaatcagaaatatttcacaaagaatgtatctagaacacatgtcaaatacacagcactggggcaagaaaaatggaagagcacactccaggttgtgacaacatcaggatacaaactgcaccatgcaagtatttggtggggcatgttcataaatagcaatgagtttggcaactatttagagcaatagaggaaaaggatattaaaagaaaaattgggcatttttgtggctgactttgaacgtcagaaaaaagtctacagtcaattttattgctg

SEQ ID NO: 305 - DNA, 3007 bp, Homo sapiens
  source 1..3007: mol_type = unassigned DNA
ccagccccgggagaacagcatgtacaccagcctcagtgttacagagtgtgggtacatcaaggtgaatggtgagcagaaactataacctgttagtccttctacacctcatctgctacaagttctggcttagacatggatattctttgtgaagaaaatacttctttgagctcaactacgaactccctaatgcaattaaatgatgacaccaggctctacagtaatgactttaactccggagaagctaacacttctgatgcatttaactggacagtcgactctgaaaatcgaaccaacctttcctgtgaagggtgcctctcaccgtcgtgtctctccttacttcatctccaggaaaaaaactggtctgctttactgacagccgtagtgattattctaactattgctggaaacatactcgtcatcatggcagtgtccctagagaaaaagctgcagaatgccaccaactatttcctgatgtcacttgccatagctgatatgctgctgggtttccttgtcatgcccgtgtccatgttaaccatcctgtatgggtaccggtggcctctgccgagcaagctttgtgcagtctggatttacctggacgtgctcttctccacggcctccatcatgcacctctgcgccatctcgctggaccgctacgtcgccatccagaatcccatccaccacagccgcttcaactccagaactaaggcatttctgaaaatcattgctgtttggaccatatcagtaggtatatccatgccaataccagtctttgggctacaggacgattcgaaggtctttaaggaggggagttgcttactcgccgatgataactttgtcctgatcggctcttttgtgtcatttttcattcccttaaccatcatggtgatcacctactttctaactatcaagtcactccagaaagaagctactttgtgtgtaagtgatcttggcacacgggccaaattagcttctttcagcttcctccctcagagttctttgtcttcagaaaagctcttccagcggtcgatccatagggagccagggtcctacacaggcaggaggactatgcagtccatcagcaatgagcaaaaggcatgcaaggtgctgggcatcgtcttcttcctgtttgtggtgatgtggtgccctttcttcatcacaaacatcatggccgtcatctgcaaagagtcctgcaatgaggatgtcattggggccctgctcaatgtgtttgtttggatcggttatctctcttcagcagtcaacccactagtctacacactgttcaacaagacctataggtcagccttttcacggtatattcagtgtcagtacaaggaaaacaaaaaaccattgcagttaattttagtgaacacaataccggctttggcctacaagtctagccaacttcaaatgggacaaaaaaagaattcaaagcaagatgccaagacaacagataatgactgctcaatggttgctctaggaaagcagcattctgaagaggcttctaaagacaatagcgacggagtgaatgaaaaggtgagctgtgtgtgataggctagttgccgtggcaactgtggaaggcacactgagcaagttttcacctatctggaaaaaaaaaaatatgagattggaaaaaattagacaagtctagtggaaccaacgatcatatctgtatgcctcattttattctgtcaatgaaaagcggggttcaatgctacaaaatgtgtgcttggaaaatgttctgacagcatttcagctgtgagctttctgatacttatttataacattgtaaatgatatgtctttaaaatgattcacttttattgtataattatgaagccctaagtaaatctaaattaacttctattttcaagtggaaaccttgctgctatgctgttcattgatgacatgggattgagttggttacctattgctgtaaataaaaatagctataaatagtgaaaattttattgaatataatggcctcttaaaaattatctttaaaacttactatggtatatattttgaaaggagaaaaaaaaagccactaaggtcagtgttataaaatctgtattgctaagataattaaatgaaatacttgacaacatttttcattcctgctttttcatagataccattttgaaatattcacaaggttgctggcatttgctgcatttcaagttaattctcagaagtgaaaaagacttcaaatgttattcaataactattgctgctttctcttctacttcttgtgctttactctgaatttccagtgtggtcttgtttaatatttgttcctctaggtaaactagcaaaaggatgatttaacattaccaaatgcctttctagcaattgcttctctaaaacagcactatcgaggtatttggtaacttgctgtgaaatgactgcatcatgcatgcactcttttgagcagtaaatgtatattgatgtaactgtgtcaggattgaggatgaactcaggtttccggctactgacagtggtagagtcctaggacatctctgtaaaaagcaggtgactttcctatgacactcatcaggtaaactgatgctttcagatccatcggtttatactatttattaaaaccattctgcttggttccacaatcatctattgagtgtacatttatgtgtgaagcaaatttctagatatgagaaatataaaaataattaaaacaaaatccttgccttcaaacgaaatggctcggccaggcacggaggctcgtgcatgtaatcctagcactttgggaggctgagatgggaggatcacttgaggccaagagtttgagaccaacctgggtaacaaagtgagacctccctgtctctacaaaaaaaatcaaaaaattatctgatccttgtggcacacaactgtggtcccagctacaggggaggctgagacgcaaggatcacttgagcccagaagctcaaggctgcagtgagccaagttcacaccactgccatttcctcctgggcaacagagtgagaccctatcac

SEQ ID NO: 306 - DNA, 3564 bp, Homo sapiens
  source 1..3564: mol_type = unassigned DNA
gtggaaaccaggagtcccttggtgcagacagctcttcctactttcccatgcagttcttttgtgcgactttgaggggctcgtgaatgatttctaaatgtgtgcctgctgaggcgagccgcacagggagggaggaacccagccgagccgtgccagaggaagccaacaggatcctagcagtgcgggagctggctcagctcttgcatgcagtttttgaagtcagcaaaacagaaaccaaattactatcatattatgctggtggaagatcaagaagaggggactctacaccagtttaattactgtgagagatgcagcgagtcacagaataacaaatgtatctcatgtgtggaccctgaagacaaatgacatttatcttcccgagcgctcaaaaaaaaccctgcaacctctatgctaaaagttcattctgcttttttgtcctcggtttggtgagaaaataataaaaccaaacagtggactctcctaaaattgtgaatgaagaaaacttacagccaccacagttcagttctttaactatcattgtaataatggaagacaaaaatccagccccgggagaacagcatgtacaccagcctcagtgttacagagtgtgggtacatcaaggtgaatggtgagcagaaactataacctgttagtccttctacacctcatctgctacaagttctggcttagacatggatattctttgtgaagaaaatacttctttgagctcaactacgaactccctaatgcaattaaatgatgacaccaggctctacagtaatgactttaactccggagaagctaacacttctgatgcatttaactggacagtcgactctgaaaatcgaaccaacctttcctgtgaagggtgcctctcaccgtcgtgtctctccttacttcatctccaggaaaaaaactggtctgctttactgacagccgtagtgattattctaactattgctggaaacatactcgtcatcatggcagtgtccctagagaaaaagctgcagaatgccaccaactatttcctgatgtcacttgccatagctgatatgctgctgggtttccttgtcatgcccgtgtccatgttaaccatcctgtatgggtaccggtggcctctgccgagcaagctttgtgcagtctggatttacctggacgtgctcttctccacggcctccatcatgcacctctgcgccatctcgctggaccgctacgtcgccatccagaatcccatccaccacagccgcttcaactccagaactaaggcatttctgaaaatcattgctgtttggaccatatcagtaggtatatccatgccaataccagtctttgggctacaggacgattcgaaggtctttaaggaggggagttgcttactcgccgatgataactttgtcctgatcggctcttttgtgtcatttttcattcccttaaccatcatggtgatcacctactttctaactatcaagtcactccagaaagaagctactttgtgtgtaagtgatcttggcacacgggccaaattagcttctttcagcttcctccctcagagttctttgtcttcagaaaagctcttccagcggtcgatccatagggagccagggtcctacacaggcaggaggactatgcagtccatcagcaatgagcaaaaggcatgcaaggtgctgggcatcgtcttcttcctgtttgtggtgatgtggtgccctttcttcatcacaaacatcatggccgtcatctgcaaagagtcctgcaatgaggatgtcattggggccctgctcaatgtgtttgtttggatcggttatctctcttcagcagtcaacccactagtctacacactgttcaacaagacctataggtcagccttttcacggtatattcagtgtcagtacaaggaaaacaaaaaaccattgcagttaattttagtgaacacaataccggctttggcctacaagtctagccaacttcaaatgggacaaaaaaagaattcaaagcaagatgccaagacaacagataatgactgctcaatggttgctctaggaaagcagcattctgaagaggcttctaaagacaatagcgacggagtgaatgaaaaggtgagctgtgtgtgataggctagttgccgtggcaactgtggaaggcacactgagcaagttttcacctatctggaaaaaaaaaaatatgagattggaaaaaattagacaagtctagtggaaccaacgatcatatctgtatgcctcattttattctgtcaatgaaaagcggggttcaatgctacaaaatgtgtgcttggaaaatgttctgacagcatttcagctgtgagctttctgatacttatttataacattgtaaatgatatgtctttaaaatgattcacttttattgtataattatgaagccctaagtaaatctaaattaacttctattttcaagtggaaaccttgctgctatgctgttcattgatgacatgggattgagttggttacctattgctgtaaataaaaatagctataaatagtgaaaattttattgaatataatggcctcttaaaaattatctttaaaacttactatggtatatattttgaaaggagaaaaaaaaagccactaaggtcagtgttataaaatctgtattgctaagataattaaatgaaatacttgacaacatttttcattcctgctttttcatagataccattttgaaatattcacaaggttgctggcatttgctgcatttcaagttaattctcagaagtgaaaaagacttcaaatgttattcaataactattgctgctttctcttctacttcttgtgctttactctgaatttccagtgtggtcttgtttaatatttgttcctctaggtaaactagcaaaaggatgatttaacattaccaaatgcctttctagcaattgcttctctaaaacagcactatcgaggtatttggtaacttgctgtgaaatgactgcatcatgcatgcactcttttgagcagtaaatgtatattgatgtaactgtgtcaggattgaggatgaactcaggtttccggctactgacagtggtagagtcctaggacatctctgtaaaaagcaggtgactttcctatgacactcatcaggtaaactgatgctttcagatccatcggtttatactatttattaaaaccattctgcttggttccacaatcatctattgagtgtacatttatgtgtgaagcaaatttctagatatgagaaatataaaaataattaaaacaaaatccttgccttcaaacgaaatggctcggccaggcacggaggctcgtgcatgtaatcctagcactttgggaggctgagatgggaggatcacttgaggccaagagtttgagaccaacctgggtaacaaagtgagacctccctgtctctacaaaaaaaatcaaaaaattatctgatccttgtggcacacaactgtggtcccagctacaggggaggctgagacgcaaggatcacttgagcccagaagctcaaggctgcagtgagccaagttcacaccactgccatttcctcctgggcaacagagtgagaccctatcac

SEQ ID NO: 307 - DNA, 2824 bp, Homo sapiens
  source 1..2824: mol_type = unassigned DNA
gtggaaaccaggagtcccttggtgcagacagctcttcctactttcccatgcagttcttttgtgcgactttgaggggctcgtgaatgatttctaaatgtgtgcctgctgaggcgagccgcacagggagggaggaacccagccgagccgtgccagaggaagccaacaggatcctagcagtgcgggagctggctcagctcttgcatgcagtttttgaagtcagcaaaacagaaaccaaattactatcatattatgctggtggaagatcaagaagaggggactctacaccagtttaattactgtgagagatgcagcgagtcacagaataacaaatgtatctcatgtgtggaccctgaagacaaatggtaccggtggcctctgccgagcaagctttgtgcagtctggatttacctggacgtgctcttctccacggcctccatcatgcacctctgcgccatctcgctggaccgctacgtcgccatccagaatcccatccaccacagccgcttcaactccagaactaaggcatttctgaaaatcattgctgtttggaccatatcagtaggtatatccatgccaataccagtctttgggctacaggacgattcgaaggtctttaaggaggggagttgcttactcgccgatgataactttgtcctgatcggctcttttgtgtcatttttcattcccttaaccatcatggtgatcacctactttctaactatcaagtcactccagaaagaagctactttgtgtgtaagtgatcttggcacacgggccaaattagcttctttcagcttcctccctcagagttctttgtcttcagaaaagctcttccagcggtcgatccatagggagccagggtcctacacaggcaggaggactatgcagtccatcagcaatgagcaaaaggcatgcaaggtgctgggcatcgtcttcttcctgtttgtggtgatgtggtgccctttcttcatcacaaacatcatggccgtcatctgcaaagagtcctgcaatgaggatgtcattggggccctgctcaatgtgtttgtttggatcggttatctctcttcagcagtcaacccactagtctacacactgttcaacaagacctataggtcagccttttcacggtatattcagtgtcagtacaaggaaaacaaaaaaccattgcagttaattttagtgaacacaataccggctttggcctacaagtctagccaacttcaaatgggacaaaaaaagaattcaaagcaagatgccaagacaacagataatgactgctcaatggttgctctaggaaagcagcattctgaagaggcttctaaagacaatagcgacggagtgaatgaaaaggtgagctgtgtgtgataggctagttgccgtggcaactgtggaaggcacactgagcaagttttcacctatctggaaaaaaaaaaatatgagattggaaaaaattagacaagtctagtggaaccaacgatcatatctgtatgcctcattttattctgtcaatgaaaagcggggttcaatgctacaaaatgtgtgcttggaaaatgttctgacagcatttcagctgtgagctttctgatacttatttataacattgtaaatgatatgtctttaaaatgattcacttttattgtataattatgaagccctaagtaaatctaaattaacttctattttcaagtggaaaccttgctgctatgctgttcattgatgacatgggattgagttggttacctattgctgtaaataaaaatagctataaatagtgaaaattttattgaatataatggcctcttaaaaattatctttaaaacttactatggtatatattttgaaaggagaaaaaaaaagccactaaggtcagtgttataaaatctgtattgctaagataattaaatgaaatacttgacaacatttttcattcctgctttttcatagataccattttgaaatattcacaaggttgctggcatttgctgcatttcaagttaattctcagaagtgaaaaagacttcaaatgttattcaataactattgctgctttctcttctacttcttgtgctttactctgaatttccagtgtggtcttgtttaatatttgttcctctaggtaaactagcaaaaggatgatttaacattaccaaatgcctttctagcaattgcttctctaaaacagcactatcgaggtatttggtaacttgctgtgaaatgactgcatcatgcatgcactcttttgagcagtaaatgtatattgatgtaactgtgtcaggattgaggatgaactcaggtttccggctactgacagtggtagagtcctaggacatctctgtaaaaagcaggtgactttcctatgacactcatcaggtaaactgatgctttcagatccatcggtttatactatttattaaaaccattctgcttggttccacaatcatctattgagtgtacatttatgtgtgaagcaaatttctagatatgagaaatataaaaataattaaaacaaaatccttgccttcaaacgaaatggctcggccaggcacggaggctcgtgcatgtaatcctagcactttgggaggctgagatgggaggatcacttgaggccaagagtttgagaccaacctgggtaacaaagtgagacctccctgtctctacaaaaaaaatcaaaaaattatctgatccttgtggcacacaactgtggtcccagctacaggggaggctgagacgcaaggatcacttgagcccagaagctcaaggctgcagtgagccaagttcacaccactgccatttcctcctgggcaacagagtgagaccctatcac

SEQ ID NO: 308 - DNA, 2246 bp, Homo sapiens
  source 1..2246: mol_type = unassigned DNA
tatacaacgtatttgtttcactgctttcaaccgcctgtgctggaggctcagaataagtcaatgggaggaggatttcagtcacagcagcaagcaagtctagtgaacagataagatgacatgctcagcaaaataacaacgaaaccagagggggaactctctggcatgcaagttcaaacacgactctacaactacggcagaaaaagagagagagagaaactaaaaatatatatatatcctatttttttcacagctatcagtttctttcactgagctttcctaaatttaagcctctagaaaataataaatacttggatatcttacctacaaacatggacagatgtgtgtatgcgctcattttagagaacttgaatttttttttttaaaggaaggtgtcaactttggcttttgagtgtttggcatggttacaatgccttaaaaaaacagatgagcagcttagctactaaccatgctgaccactgttcggaacgggattgaatcacagaaaaacagcaaatggctctctcttacagagtgtctgaacttcaaagcacaattcctgagcacattttgcagagcacctttgttcacgttatctcttctaactggtctggattacagacagaatcaataccagaggaaatgaaacagattgttgaggaacagggaaataaactgcactgggcagctcttctgatactcatggtgataatacccacaattggtggaaatacccttgttattctggctgtttcactggagaagaagctgcagtatgctactaattactttctaatgtccttggcggtggctgatttgctggttggattgtttgtgatgccaattgccctcttgacaataatgtttgaggctatgtggcccctcccacttgttctatgtcctgcctggttatttcttgacgttctcttttcaaccgcatccatcatgcatctctgtgccatttcagtggatcgttacatagccatcaaaaagccaatccaggccaatcaatataactcacgggctacagcattcatcaagattacagtggtgtggttaatttcaataggcattgccattccagtccctattaaagggatagagactgatgtggacaacccaaacaatatcacttgtgtgctgacaaaggaacgttttggcgatttcatgctctttggctcactggctgccttcttcacacctcttgcaattatgattgtcacctactttctcactatccatgctttacagaagaaggcttacttagtcaaaaacaagccacctcaacgcctaacatggttgactgtgtctacagttttccaaagggatgaaacaccttgctcgtcaccggaaaaggtggcaatgctggatggttctcgaaaggacaaggctctgcccaactcaggtgatgaaacacttatgcgaagaacatccacaattgggaaaaagtcagtgcagaccatttccaacgaacagagagcctcaaaggtcctagggattgtgtttttcctctttttgcttatgtggtgtcccttctttattacaaatataactttagttttatgtgattcctgtaaccaaactactctccaaatgctcctggagatatttgtgtggataggctatgtttcctcaggagtgaatcctttggtctacaccctcttcaataagacatttcgggatgcatttggccgatatatcacctgcaattaccgggccacaaagtcagtaaaaactctcagaaaacgctccagtaagatctacttccggaatccaatggcagagaactctaagtttttcaagaaacatggaattcgaaatgggattaaccctgccatgtaccagagtccaatgaggctccgaagttcaaccattcagtcttcatcaatcattctactagatacgcttctcctcactgaaaatgaaggtgacaaaactgaagagcaagttagttatgtatagcagaactggcagttgtcatcaaacataatgatgagtaagatgatgaatgagatgtaaatgtgccaagaatatattatataaagaattttatgtcatatatcaaatcatctctttaacctaagatgtaagtattaagaatatctaattttcctaatttggacaagattattccatgaggaaaataattttatatagctacaaatgaaaacaatccagcactctggttaaattttaaggtattcgaatgaaataaagtcaaatcaataaatttcaggctttaaaaagaa

SEQ ID NO: 309 - DNA, 1245 bp, Homo sapiens
  source 1..1245: mol_type = unassigned DNA
atggctctctcttacagagtgtctgaacttcaaagcacaattcctgagcacattttgcagagcacctttgttcacgttatctcttctaactggtctggattacagacagaatcaataccagaggaaatgaaacagattgttgaggaacagggaaataaactgcactgggcagctcttctgatactcatggtgataatacccacaattggtggaaatacccttgttattctggctgtttcactggagaagaagctgcagtatgctactaattactttctaatgtccttggcggtggctgatttgctggttggattgtttgtgatgccaattgccctcttgacaataatgtttggcattgccattccagtccctattaaagggatagagactgatgtggacaacccaaacaatatcacttgtgtgctgacaaaggaacgttttggcgatttcatgctctttggctcactggctgccttcttcacacctcttgcaattatgattgtcacctactttctcactatccatgctttacagaagaaggcttacttagtcaaaaacaagccacctcaacgcctaacatggttgactgtgtctacagttttccaaagggatgaaacaccttgctcgtcaccggaaaaggtggcaatgctggatggttctcgaaaggacaaggctctgcccaactcaggtgatgaaacacttatgcgaagaacatccacaattgggaaaaagtcagtgcagaccatttccaacgaacagagagcctcaaaggtcctagggattgtgtttttcctctttttgcttatgtggtgtcccttctttattacaaatataactttagttttatgtgattcctgtaaccaaactactctccaaatgctcctggagatatttgtgtggataggctatgtttcctcaggagtgaatcctttggtctacaccctcttcaataagacatttcgggatgcatttggccgatatatcacctgcaattaccgggccacaaagtcagtaaaaactctcagaaaacgctccagtaagatctacttccggaatccaatggcagagaactctaagtttttcaagaaacatggaattcgaaatgggattaaccctgccatgtaccagagtccaatgaggctccgaagttcaaccattcagtcttcatcaatcattctactagatacgcttctcctcactgaaaatgaaggtgacaaaactgaagagcaagttagttatgtatag

SEQ ID NO: 310 - DNA, 4751 bp, Homo sapiens
  source 1..4751: mol_type = unassigned DNA
acccgcgcgaggtaggcgctctggtgcttgcggaggacgcttccttcctcagatgcaccgatcttcccgatactgcctttggagcggctagattgctagccttggctgctccattggcctgccttgccccttacctgccgattgcatatgaactcttcttctgtctgtacatcgttgtcgtcggagtcgtcgcgatcgtcgtggcgctcgtgtgatggccttcgtccgtttagagtagtgtagttagttaggggccaacgaagaagaaagaagacgcgattagtgcagagatgctggaggtggtcagttactaagctagagtaagatagcggagcgaaaagagccaaacctagccggggggcgcacggtcacccaaaggaggtcgactcgccggcgcttcctatcgcgccgagctccctccattcctctccctccgccgaggcgcgaggttgcggcgcgcagcgcagcgcagctcagcgcaccgactgccgcgggctccgctgggcgattgcagccgagtccgtttctcgtctagctgccgccgcggcgaccgctgcctggtcttcctcccggacgctagtgggttatcagctaacacccgcgagcatctataacataggccaactgacgccatccttcaaaaacaactaaaggatgatatgatgaacctagcctgttaatttcgtcttctcaattttaaactttggttgcttaagactgaagcaatcatggtgaacctgaggaatgcggtgcattcattccttgtgcacctaattggcctattggtttggcaatgtgatatttctgtgagcccagtagcagctatagtaactgacattttcaatacctccgatggtggacgcttcaaattcccagacggggtacaaaactggccagcactttcaatcgtcatcataataatcatgacaataggtggcaacatccttgtgatcatggcagtaagcatggaaaagaaactgcacaatgccaccaattacttcttaatgtccctagccattgctgatatgctagtgggactacttgtcatgcccctgtctctcctggcaatcctttatgattatgtctggccactacctagatatttgtgccccgtctggatttctttagatgttttattttcaacagcgtccatcatgcacctctgcgctatatcgctggatcggtatgtagcaatacgtaatcctattgagcatagccgtttcaattcgcggactaaggccatcatgaagattgctattgtttgggcaatttctataggtgtatcagttcctatccctgtgattggactgagggacgaagaaaaggtgttcgtgaacaacacgacgtgcgtgctcaacgacccaaatttcgttcttattgggtccttcgtagctttcttcataccgctgacgattatggtgattacgtattgcctgaccatctacgttctgcgccgacaagctttgatgttactgcacggccacaccgaggaaccgcctggactaagtctggatttcctgaagtgctgcaagaggaatacggccgaggaagagaactctgcaaaccctaaccaagaccagaacgcacgccgaagaaagaagaaggagagacgtcctaggggcaccatgcaggctatcaacaatgaaagaaaagcttcgaaagtccttgggattgttttctttgtgtttctgatcatgtggtgcccatttttcattaccaatattctgtctgttctttgtgagaagtcctgtaaccaaaagctcatggaaaagcttctgaatgtgtttgtttggattggctatgtttgttcaggaatcaatcctctggtgtatactctgttcaacaaaatttaccgaagggcattctccaactatttgcgttgcaattataaggtagagaaaaagcctcctgtcaggcagattccaagagttgccgccactgctttgtctgggagggagcttaatgttaacatttatcggcataccaatgaaccggtgatcgagaaagccagtgacaatgagcccggtatagagatgcaagttgagaatttagagttaccagtaaatccctccagtgtggttagcgaaaggattagcagtgtgtgagaaagaacagcacagtcttttcctacggtacaagctacatatgtaggaaaattttcttctttaatttttctgttggtcttaactaatgtaaatattgctgtctgaaaaagtgtttttacatatagctttgcaaccttgtactttacaatcatgcctacattagtgagatttagggttctatatttactgtttataataggtggagactaacttattttgattgtttgatgaataaaatgtttatttttgctctccctcccttctttccttccttttttcctttcttccttcctttctctctttcttttgtgcatatggcaacgttcatgttcatctcaggtggcatttgcaggtgaccagaatgaggcacatgacagtggttatatttcaaccacacctaaattaacaaattcagtggacatttgttctgggttaacagtaaatatacactttacattcttgctctgctcatctacacatataaacacagtaagataggttctgctttctgatacatctgtcagtgagtcagaggcagaacctagtcttgttgttcatataggggcaaaaatttgacattgtcagaatgttgtgttggtatttactgcaatgtctgtccctaaacatagtggtattttaacatagcagctggttaaccgggactacagaagtggaaggataatgagatgtaatacaccaaatagcttttcacttcttaaggacagtgttcaaattctgattattacaacaagcaaactgaaattagtgttttcattctggtccttagtaaattcctaattctatgattaaactgggaaatgagatcccagagttatttcccaacccaggattcaacatcaattgggttttgatctcagcatcctggaaatttgtgtgcttcacacaaagtgaaattagtattttgagccttattaaaatattttcttaattatggtacctctgtctataggacttaatttagcagtccatttttgagtaaaacttgtattggaagtatagatggtagaaactttggaagttttacttgattaaggactacagaattgggcccttagaatgtgaaaaaaaaaagtaattaaaaagacacttttaccgaactcgggattacagaaacacggagtttccatttggattttaaacaaaatttatgtcattttcagatccttccaaactctctagtgcaggaaaaggctgcagctaatttgtgaaagtggcaagctcttcattgcactgcagttatttaccagaagtttaaatctttgttaaaatatagtgttgtgttacaataagtgttggccatcatttcattcgtgggcctgctgctctctaagaattcagtagcattttaatagtttctaaaccatgaaaagttttcaagcattgctaaagtcaggccattcagtctatgctgtgtgcagagtatacaagtgtttctagtaacagtatttccatacgtgcccatttcacacaactgtggataaattttggaagaattcatgatgctagttcttacgcttgacagttacttacacacctgagaatgtgcctctcagtatcttaaaattggttaatgaaaaatctgaatttctaaaacccttggtctgtgttctcaacacacagtatagataaatccaatagtctgccacaagggcagtggaagagctgctgtatttgaggaaactcatacagtctctatttgatttgcaacactgccaaacatcagtcaattgcttgagcatgcccaaatataacatgaaagtcaagtctacctgccttgcctgttaggtctgttgaagtgcatgttaaaataattatatgaagcagaatgagatgatttaattcttaccgaaatgaaaatggctgaagaaacacagcatgcatttagcatgagttctgcacatacagatggtgtcctgcatgtatgccatgtatgttgcatgaatccatcgatttgtattaatgtagggcagaatagctgatagaagaaggactgaagaaaatccttcagcaatccttaaaaagaccatgcattcagatctgaagtagtgtgagtgttagaaaaaactggaaacatctgatttctgaactatcagggcaagctcatagcacatgttttacaaagaaacaaaatataaatcacagatttccaaaagtactagcaataagttgaatgataatagctcacagcacatttgttaatgattcttgtgtcatcaagtagtagtacttaatagtacccaacctggtaattatcctcaagttgtgtgctattcgtaagttctgtgcagtttggtatgaaacaaatatactcatttggatataaatcttacccttcaatgttaaatctacaaacttttataaatgttttaaagaagtccatgtgataattgtaaaggtgatgaatttaccatcaaacaaatcattttgatgtattattatatatgtatatctgtgtaagacacgtgcaacagactgccttatattattttctgtaattcttctcctttgtcaaatggtattttttgtgaatggttgcaaagtgttgtcttattcctaattcctgtatgttatccactacaggttttatgagacttcctattaatttattaaatttattaaatgttg

SEQ ID NO: 311 - DNA, 4652 bp, Homo sapiens
  source 1..4652: mol_type = unassigned DNA
gcgcgaggtaggcgctctggtgcttgcggaggacgcttccttcctcagatgcaccgatcttcccgatactgcctttggagcggctagattgctagccttggctgctccattggcctgccttgccccttacctgccgattgcatatgaactcttcttctgtctgtacatcgttgtcgtcggagtcgtcgcgatcgtcgtggcgctcgtgtgatggccttcgtccgtttagagtagtgtagttagttaggggccaacgaagaagaaagaagacgcgattagtgcagagatgctggaggtggtcagttactaagctagagtaagatagcggagcgaaaagagccaaacctagccggggggcgcacggtcacccaaaggaggtcgactcgccggcgcttcctatcgcgccgagctccctccattcctctccctccgccgaggcgcgaggttgcggcgcgcagcgcagcgcagctcagcgcaccgactgccgcgggctccgctgggcgattgcagccgagtccgtttctcgtctagctgccgccgcggcgaccgctgcctggtcttcctcccggacgctagtgggttatcagctaacacccgcgagcatctataacataggccaactgacgccatccttcaaaaacaactaaaggatgatatgatgaacctagcctgttaatttcgtcttctcaattttaaactttggttgcttaagactgaagcaatcatggtgaacctgaggaatgcggtgcattcattccttgtgcacctaattggcctattggtttggcaatgtgatatttctgtgagcccagtagcagctatagtaactgacattttcaatacctccgatggtggacgcttcaaattcccagacggggtacaaaactggccagcactttcaatcgtcatcataataatcatgacaataggtggcaacatccttgtgatcatggcagtaagcatggaaaagaaactgcacaatgccaccaattacttcttaatgtccctagccattgctgatatgctagtgggactacttgtcatgcccctgtctctcctggcaatcctttatgattatgtctggccactacctagatatttgtgccccgtctggatttctttagatgttttattttcaacagcgtccatcatgcacctctgcgctatatcgctggatcggtgtatcagttcctatccctgtgattggactgagggacgaagaaaaggtgttcgtgaacaacacgacgtgcgtgctcaacgacccaaatttcgttcttattgggtccttcgtagctttcttcataccgctgacgattatggtgattacgtattgcctgaccatctacgttctgcgccgacaagctttgatgttactgcacggccacaccgaggaaccgcctggactaagtctggatttcctgaagtgctgcaagaggaatacggccgaggaagagaactctgcaaaccctaaccaagaccagaacgcacgccgaagaaagaagaaggagagacgtcctaggggcaccatgcaggctatcaacaatgaaagaaaagcttcgaaagtccttgggattgttttctttgtgtttctgatcatgtggtgcccatttttcattaccaatattctgtctgttctttgtgagaagtcctgtaaccaaaagctcatggaaaagcttctgaatgtgtttgtttggattggctatgtttgttcaggaatcaatcctctggtgtatactctgttcaacaaaatttaccgaagggcattctccaactatttgcgttgcaattataaggtagagaaaaagcctcctgtcaggcagattccaagagttgccgccactgctttgtctgggagggagcttaatgttaacatttatcggcataccaatgaaccggtgatcgagaaagccagtgacaatgagcccggtatagagatgcaagttgagaatttagagttaccagtaaatccctccagtgtggttagcgaaaggattagcagtgtgtgagaaagaacagcacagtcttttcctacggtacaagctacatatgtaggaaaattttcttctttaatttttctgttggtcttaactaatgtaaatattgctgtctgaaaaagtgtttttacatatagctttgcaaccttgtactttacaatcatgcctacattagtgagatttagggttctatatttactgtttataataggtggagactaacttattttgattgtttgatgaataaaatgtttatttttgctctccctcccttctttccttccttttttcctttcttccttcctttctctctttcttttgtgcatatggcaacgttcatgttcatctcaggtggcatttgcaggtgaccagaatgaggcacatgacagtggttatatttcaaccacacctaaattaacaaattcagtggacatttgttctgggttaacagtaaatatacactttacattcttgctctgctcatctacacatataaacacagtaagataggttctgctttctgatacatctgtcagtgagtcagaggcagaacctagtcttgttgttcatataggggcaaaaatttgacattgtcagaatgttgtgttggtatttactgcaatgtctgtccctaaacatagtggtattttaacatagcagctggttaaccgggactacagaagtggaaggataatgagatgtaatacaccaaatagcttttcacttcttaaggacagtgttcaaattctgattattacaacaagcaaactgaaattagtgttttcattctggtccttagtaaattcctaattctatgattaaactgggaaatgagatcccagagttatttcccaacccaggattcaacatcaattgggttttgatctcagcatcctggaaatttgtgtgcttcacacaaagtgaaattagtattttgagccttattaaaatattttcttaattatggtacctctgtctataggacttaatttagcagtccatttttgagtaaaacttgtattggaagtatagatggtagaaactttggaagttttacttgattaaggactacagaattgggcccttagaatgtgaaaaaaaaaagtaattaaaaagacacttttaccgaactcgggattacagaaacacggagtttccatttggattttaaacaaaatttatgtcattttcagatccttccaaactctctagtgcaggaaaaggctgcagctaatttgtgaaagtggcaagctcttcattgcactgcagttatttaccagaagtttaaatctttgttaaaatatagtgttgtgttacaataagtgttggccatcatttcattcgtgggcctgctgctctctaagaattcagtagcattttaatagtttctaaaccatgaaaagttttcaagcattgctaaagtcaggccattcagtctatgctgtgtgcagagtatacaagtgtttctagtaacagtatttccatacgtgcccatttcacacaactgtggataaattttggaagaattcatgatgctagttcttacgcttgacagttacttacacacctgagaatgtgcctctcagtatcttaaaattggttaatgaaaaatctgaatttctaaaacccttggtctgtgttctcaacacacagtatagataaatccaatagtctgccacaagggcagtggaagagctgctgtatttgaggaaactcatacagtctctatttgatttgcaacactgccaaacatcagtcaattgcttgagcatgcccaaatataacatgaaagtcaagtctacctgccttgcctgttaggtctgttgaagtgcatgttaaaataattatatgaagcagaatgagatgatttaattcttaccgaaatgaaaatggctgaagaaacacagcatgcatttagcatgagttctgcacatacagatggtgtcctgcatgtatgccatgtatgttgcatgaatccatcgatttgtattaatgtagggcagaatagctgatagaagaaggactgaagaaaatccttcagcaatccttaaaaagaccatgcattcagatctgaagtagtgtgagtgttagaaaaaactggaaacatctgatttctgaactatcagggcaagctcatagcacatgttttacaaagaaacaaaatataaatcacagatttccaaaagtactagcaataagttgaatgataatagctcacagcacatttgttaatgattcttgtgtcatcaagtagtagtacttaatagtacccaacctggtaattatcctcaagttgtgtgctattcgtaagttctgtgcagtttggtatgaaacaaatatactcatttggatataaatcttacccttcaatgttaaatctacaaacttttataaatgttttaaagaagtccatgtgataattgtaaaggtgatgaatttaccatcaaacaaatcattttgatgtattattatatatgtatatctgtgtaagacacgtgcaacagactgccttatattattttctgtaattcttctcctttgtcaaatggtattttttgtgaatggttgcaaagtgttgtcttattcctaattcctgtatgttatccactacaggttttatgagacttcctattaatttattaaatttattaaatgttg

SEQ ID NO: 312 - DNA, 3288 bp, Homo sapiens
  source 1..3288: mol_type = unassigned DNA
acccgcgcgaggtaggcgctctggtgcttgcggaggacgcttccttcctcagatgcaccgatcttcccgatactgcctttggagcggctagattgctagccttggctgctccattggcctgccttgccccttacctgccgattgcatatgaactcttcttctgtctgtacatcgttgtcgtcggagtcgtcgcgatcgtcgtggcgctcgtgtgatggccttcgtccgtttagagtagtgtagttagttaggggccaacgaagaagaaagaagacgcgattagtgcagagatgctggaggtggtcagttactaagctagagtaagatagcggagcgaaaagagccaaacctagccggggggcgcacggtcacccaaaggaggtcgactcgccggcgcttcctatcgcgccgagctccctccattcctctccctccgccgaggcgcgaggttgcggcgcgcagcgcagcgcagctcagcgcaccgactgccgcgggctccgctgggcgattgcagccgagtccgtttctcgtctagctgccgccgcggcgaccgctgcctggtcttcctcccggacgctagtgggttatcagctaacacccgcgagcatctataacataggccaactgacgccatccttcaaaaacaactgtctgggaaaaaaagaataaaaagtagtgtgagagcagaaaacgtgattgaaacacgaccaatctttcttcagtgccaaagggtggaaaagaaaggatgatatgatgaacctagcctgttaatttcgtcttctcaattttaaactttggttgcttaagactgaagcaatcatggtgaacctgaggaatgcggtgcattcattccttgtgcacctaattggcctattggtttggcaatgtgatatttctgtgagcccagtagcagctatagtaactgacattttcaatacctccgatggtggacgcttcaaattcccagacggggtacaaaactggccagcactttcaatcgtcatcataataatcatgacaataggtggcaacatccttgtgatcatggcagtaagcatggaaaagaaactgcacaatgccaccaattacttcttaatgtccctagccattgctgatatgctagtgggactacttgtcatgcccctgtctctcctggcaatcctttatgattatgtctggccactacctagatatttgtgccccgtctggatttctttagatgttttattttcaacagcgtccatcatgcacctctgcgctatatcgctggatcggtatgtagcaatacgtaatcctattgagcatagccgtttcaattcgcggactaaggccatcatgaagattgctattgtttgggcaatttctataggtgtatcagttcctatccctgtgattggactgagggacgaagaaaaggtgttcgtgaacaacacgacgtgcgtgctcaacgacccaaatttcgttcttattgggtccttcgtagctttcttcataccgctgacgattatggtgattacgtattgcctgaccatctacgttctgcgccgacaagctttgatgttactgcacggccacaccgaggaaccgcctggactaagtctggatttcctgaagtgctgcaagaggaatacggccgaggaagagaactctgcaaaccctaaccaagaccagaacgcacgccgaagaaagaagaaggagagacgtcctaggggcaccatgcaggctatcaacaatgaaagaaaagcttcgaaagtccttgggattgttttctttgtgtttctgatcatgtggtgcccatttttcattaccaatattctgtctgttctttgtgagaagtcctgtaaccaaaagctcatggaaaagcttctgaatgtgtttgtttggattggctatgtttgttcaggaatcaatcctctggtgtatactctgttcaacaaaatttaccgaagggcattctccaactatttgcgttgcaattataaggtagagaaaaagcctcctgtcaggcagattccaagagttgccgccactgctttgtctgggagggagcttaatgttaacatttatcggcataccaatgaaccggtgatcgagaaagccagtgacaatgagcccggtatagagatgcaagttgagaatttagagttaccagtaaatccctccagtgtggttagcgaaaggattagcagtgtgtgagaaagaacagcacagtcttttcctacggtacaagctacatatgtaggaaaattttcttctttaatttttctgttggtcttaactaatgtaaatattgctgtctgaaaaagtgtttttacatatagctttgcaaccttgtactttacaatcatgcctacattagtgagatttagggttctatatttactgtttataataggtggagactaacttattttgattgtttgatgaataaaatgtttatttttgctctccctcccttctttccttccttttttcctttcttccttcctttctctctttcttttgtgcatatggcaacgttcatgttcatctcaggtggcatttgcaggtgaccagaatgaggcacatgacagtggttatatttcaaccacacctaaattaacaaattcagtggacatttgttctgggttaacagtaaatatacactttacattcttgctctgctcatctacacatataaacacagtaagataggttctgctttctgatacatctgtcagtgagtcagaggcagaacctagtcttgttgttcatataggggcaaaaatttgacattgtcagaatgttgtgttggtatttactgcaatgtctgtccctaaacatagtggtattttaacatagcagctggttaaccgggactacagaagtggaaggataatgagatgtaatacaccaaatagcttttcacttcttaaggacagtgttcaaattctgattattacaacaagcaaactgaaattagtgttttcattctggtccttagtaaattcctaattctatgattaaactgggaaatgagatcccagagttatttcccaacccaggattcaacatcaattgggttttgatctcagcatcctggaaatttgtgtgcttcacacaaagtgaaattagtattttgagccttattaaaatattttcttaattatggtacctctgtctataggacttaatttagcagtccatttttgagtaaaacttgtattggaagtatagatggtagaaactttggaagttttacttgattaaggactacagaattgggcccttagaatgtgaaaaaaaaaa

SEQ ID NO: 313 - DNA, 1459 bp, Homo sapiens
  source 1..1459: mol_type = unassigned DNA
ctagattcaggcccagttaaagcacaggtggcttagatcaaaaatcattattgccacatggaccagccttggaagtgaacaaggagagggtggtggcatgggacctgccttcctggagttaatcatctagatgaaagctgctattccaggattcacaccttcaactggtgacatcgttcctgtggctaaatatgcatcagtgtggatcagacacctgcaggtctcatggctagtatgtcaatagtgaaggccacatcaaacacaataagccaatgtgggtggtcagcatctgcaaactggacaccttctatttccccttccatggacagaggtgaacgctctccttcagccctttcacctacacaggtggccatcaggcgcaggtgcaggcccagcccctacgtggtaaactttctggtgcccagtggcattctgattgccatcgatgccctcagtttctacctgccactggaaagtgggaattgtgccccattcaagatgactgttctgctgggctacagcgtcttcctgctcatgatgaatgacttgctcccagccactagcacttcatcacatgcttcactagtacgtcctcatccatcaagagaccaaaagcgaggtgtctacttcgccctgtgcctgtccctgatggtgggcagcctgctggagaccatcttcatcacccacctgctgcacgtggccaccacccagcccctacctctgcctcggtggctccactccctgctgctgcactgcaccggccaagggagatgctgtcccactgcgccccagaagggaaataagggcccgggtctcacccccacccacctgcccggtgtgaaggagccagaggtatcagcagggcagatgccaggccctggggaggcagagctgacagggggctcagaatggacaagggcccagcgggaacacgaggcccagaagcagcactcggtggagctgtgggtgcagttcagccacgcgatggacgccctgctcttccgcctctacctgctcttcatggcctcctccatcatcaccgtcatatgcctctggaacacctaggcaggtgctcacctgcaaacttcagtctggacttctttttgccagagaactccagaaaccagtcaggctctcagtcagccttgtggccctgtcaaccgcctcatttttaacccagtcctctgtgtagtttcagaccagacctgaatagtctcctatgccctccaaaagtcgggtccttgctcctgcatgccatcagccccactcagccctcccatacctccctggctcctcaggattcaggttcctagggtacgtccttgattaaatcaccccaatatgcccctttgcagaaagtattggcttttccctgaattctgttatggtaaaaaaaatcttgggattgagagtcttcttgcagaaacttctcagccaaagtaaaaaggattttctctta

SEQ ID NO: 314 - DNA, 1674 bp, Homo sapiens
  source 1..1674: mol_type = unassigned DNA
atgcagaaacactctccaggccccccagccctggccctcctctctcagtctctgctcactacaggaaatggcgacactttgattatcaattgcccaggctttggccagcacagggtggaccctgcagcctttcaagcagtgtttgacagaaaggctattggtccagtcaccaactacagtgtcgccactcatgtcaacatctccttcaccttgtctgccatctggaactgctattccaggattcacaccttcaactgccaccatgcccggccttggcacaatcaatttgtgcagtggaacccagatgaatgcggaggcatcaagaagtccggcatggcaactgagaacctatggctttcagatgtcttcatcgaggagtctgtggatcagacacctgcaggtctcatggctagtatgtcaatagtgaaggccacatcaaacacaataagccaatgtgggtggtcagcatctgcaaactggacaccttctatttccccttccatggacagagcccgggcatggagaaggatgtccaggagctttcaaatacatcacagaacctcattcagaacaaggagggagtgggtactgctgggtatccaaaaaagaacaataaaggtgaccgtggccactaaccagtatgaacaagccatcttccatgtggccatcaggcgcaggtgcaggcccagcccctacgtggtaaactttctggtgcccagtggcattctgattgccatcgatgccctcagtttctacctgccactggaaagtgggaattgtgccccattcaagatgactgttctgctgggctacagcgtcttcctgctcatgatgaatgacttgctcccagccactagcacttcatcacatgcttcactagtggcgcctctggccctcatgcagacccccttgcctgcaggtgtctacttcgccctgtgcctgtccctgatggtgggcagcctgctggagaccatcttcatcacccacctgctgcacgtggccaccacccagcccctacctctgcctcggtggctccactccctgctgctgcactgcaccggccaagggagatgctgtcccactgcgccccagaagggaaataagggcccgggtctcacccccacccacctgcccggtgtgaaggagccagaggtatcagcagggcagatgccaggccctggggaggcagagctgacagggggctcagaatggacaagggcccagcgggaacacgaggcccagaagcagcactcggtggagctgtgggtgcagttcagccacgcgatggacgccctgctcttccgcctctacctgctcttcatggcctcctccatcatcaccgtcatatgcctctggaacacctaggcaggtgctcacctgcaaacttcagtctggacttctttttgccagagaactccagaaaccagtcaggctctcagtcagccttgtggccctgtcaaccgcctcatttttaacccagtcctctgtgtagtttcagaccagacctgaatagtctcctatgccctccaaaagtcgggtccttgctcctgcatgccatcagccccactcagccctcccatacctccctggctcctcaggattcaggttcctagggtacgtccttgattaaatcaccccaatatgcccctttgcagaaagtattggcttttccct

SEQ ID NO: 315 - DNA, 1215 bp, Homo sapiens
  source 1..1215: mol_type = unassigned DNA
atggaaagaggctggttccatgggaaaggattcctccttggcttcatcctccacctgctgctgcaagattcacaccttcaactggtgacatcgttcctgtggctaaatatgtggaacccagatgaatgcggaggcatcaagaagtccggcatggcaactgagaacctatggctttcagatgtcttcatcgaggagtctgtggatcagacacctgcaggtctcatggctagtatgtcaatagtgaaggccacatcaaacacaataagccaatgtgggtggtcagcatctgcaaactggacaccttctatttccccttccatggacagaggtgaacgctctccttcagccctttcacctacacaggtaacccgggcatggagaaggatgtccaggagctttcaaatacatcacagaacctcattcagaacaaggagggagtgggtactgctgggtatccaaaaaagaacaataaaggtgaccgtggccactaaccagtatgaacaagccatcttccatgtggccatcaggcgcaggtgcaggcccagcccctacgtggtaaactttctggtgcccagtggcattctgattgccatcgatgccctcagtttctacctgccactggaaagtgggaattgtgccccattcaagatgactgttctgctgggctacagcgtcttcctgctcatgatgaatgacttgctcccagccactagcacttcatcacatgcttcactagtacgtcctcatccatcaagagaccaaaagcgaggtgtctacttcgccctgtgcctgtccctgatggtgggcagcctgctggagaccatcttcatcacccacctgctgcacgtggccaccacccagcccctacctctgcctcggtggctccactccctgctgctgcactgcaccggccaagggagatgctgtcccactgcgccccagaagggaaataagggcccgggtctcacccccacccacctgcccggtgtgaaggagccagaggtatcagcagggcagatgccaggccctggggaggcagagctgacagggggctcagaatggacaagggcccagcgggaacacgaggcccagaagcagcactcggtggagctgtgggtgcagttcagccacgcgatggacgccctgctcttccgcctctacctgctcttcatggcctcctccatcatcaccgtcatatgcctctggaacacctag

SEQ ID NO: 316 - DNA, 1043 bp, Homo sapiens
  source 1..1043: mol_type = unassigned DNA
tgaacaaggagagggtggtggcatgggacctgccttcctggagttaatcatctagatgaaagctgctattccaggattcacaccttcaactggtgacatcgttcctgtggctaaatatggtggccatcaggcgcaggtgcaggcccagcccctacgtggtaaactttctggtgcccagtggcattctgattgccatcgatgccctcagtttctacctgccactggaaagtgggaattgtgccccattcaagatgactgttctgctgggctacagcgtcttcctgctcatgatgaatgacttgctcccagccactagcacttcatcacatgcttcactagtacgtcctcatccatcaagagaccaaaagcgaggtgtctacttcgccctgtgcctgtccctgatggtgggcagcctgctggagaccatcttcatcacccacctgctgcacgtggccaccacccagcccctacctctgcctcggtggctccactccctgctgctgcactgcaccggccaagggagatgctgtcccactgcgccccagaagggaaataagggcccgggtctcacccccacccacctgcccggtgtgaaggagccagaggtatcagcagggcagatgccaggccctggggaggcagagctgacagggggctcagaatggacaagggcccagcgggaacacgaggcccagaagcagcactcggtggagctgtgggtgcagttcagccacgcgatggacgccctgctcttccgcctctacctgctcttcatggcctcctccatcatcaccgtcatatgcctctggaacacctaggcaggtgctcacctgcaaacttcagtctggacttctttttgccagagaactccagaaaccagtcaggctctcagtcagccttgtggccctgtcaaccgcctcatttttaacccagtcctctgtgtagtttcagaccagacctgaatagtctcctatgccctccaaaagtcgggtccttgctcctgcatgccatcagccccactcagccctcccatacctccctgg

SEQ ID NO: 317 - DNA, 1697 bp, Homo sapiens
  source 1..1697: mol_type = unassigned DNA
tggtgaatccccagagaagagtccagaaagaagaatggaaggagggtggcctgcaaggcagagtgccctcctctgcctcactgtcagtcttctgcttcaaggaagaggcgacgcttttaccatcaattgctcaggctttgaccagcatggggttgaccctgctgtcttccaagcagtgtttgacagaaaggccttccgtccattcaccaactacagcatccctacccgtgtcaacatctccttcaccctgtctgccatcctgggagtggatgcacagctccagctgctgacatcattcctgtggatggatttggtatgggacaatcctttcattaattggaacccaaaagagtgtgttggcatcaataaactcacagtattagctgaaaacctgtggctcccagacatcttcatcgtggaatccatggatgtggatcagacgccttccggtctcactgcctatatcagcagtgaaggtcgaattaagtatgataagccaatgagggtgaccagcatctgtaacctggacatcttctacttcccttttgaccaacagaactgtaccttcaccttcagttctttcctctacacagtggacagcatgctgctgggcatggacaaggaggtgtgggagatcacagacacgtctcgcaaagtcatccaaacccagggggagtgggagctcttgggcatcaacaaggccaccccaaagatgtccatgggcaacaacctatatgaccagatcatgttttatgtggccatcaggcgcaggccaagcctctacatcataaacctgctggtgcccagtagctttctggttgccattgatgccctcagcttctacctgccagcagagagcgagaatcgtgccccattcaagataacacttctgctgggctacaacgtcttcctgctcatgatgaatgacttgctccctgccagtggcacccccctcatcagtgtctacttcgccctgtgcctgtccctgatggtggtcagcctgctggagaccgtcttcattacctacctgctgcacgtggccaccacccagcccccacccatgcctaggtggcttcactccctgctgctccactgcaccagcccagggagatgctgtcccactgcgccccagaagggaaataagggcctgggtctcaccctcacccacctgcctggcccaaaggagccgggggagttagcagggaagaagctgggacccagagagaccgagccagatgggggctcaggatggacaaagacccagctaatggagctgtgggtgcagttcagccacgcgatggacaccctgctcttccgcctctacctgctcttcatggcctcctccatccttactgtcattgtcctctggaacacctaggcagacatcccccctctctggcaaacaacagcttggagtttctgctggtcttgggccagccggactcattttcctaatcttagccacttatccccagtgactaccatgtccccttctaaattccaaagactccaacgcagcactagcaagcaggttcgggacagccctggacgatttcccgaccgctgctcaggctgctcattcctgctcaccctcagtctccctgagctaccacctaactcctcactccctgatcaatggaagtccaggtcagtggagtctctccttgattgatcaccccaataaacaactttccagg

SEQ ID NO: 318 - DNA, 1912 bp, Homo sapiens
  source 1..1912: mol_type = unassigned DNA
gaacaagtccggcttctgccttttattggctgtctgactgtaggaagttacttcctcttattgcaccttagttagctcgtttattacatgagggtaaagcagtatctacctgataggggattgggaggattaaatgaggtaatccatttttaaagggcttagaatatacctgacacacagccagtgctcaacaaatgttagctttcattttatcacgggcgaccccacgccctgccttggggcccctctcatatagggagcacagggttgctctccttcatctcacacattcgatgtccactacaggaaggggcgttactttcaccatcaattgctcagggtttggccagcacggggcggatcccactgctctgaattcagtgtttaatagaaagcccttccgtccggtcaccaacatcagcgtccccacccaagtcaacatctccttcgcgatgtctgccatcctagatgtgaatgaacagctgcacctcttgtcatcattcctgtggctggaaatggtttgggataacccatttatcagctggaacccagaggaatgtgagggcatcacgaagatgagtatggcagccaagaacctgtggctcccagacattttcatcattgaactcatggatgtggataagaccccaaaaggcctcacagcatatgtaagtaatgaaggtcgcatcaggtataagaaacccatgaaggtggacagtatctgtaacctggacatcttctacttccccttcgaccagcagaactgcacactcaccttcagctcattcctctacacagtggacagcatgttgctggacatggagaaagaagtgtgggaaataacagacgcatcccggaacatccttcagacccatggagaatgggagctcctgggcctcagcaaggccaccgcaaagttgtccaggggaggcaacctgtatgatcagatcgtgttctatgtggccatcaggcgcaggcccagtctctatgtcataaaccttctcgtgcccagtggctttctggttgccatcgatgccctcagcttctacctgccagtgaaaagtgggaatcgtgtcccattcaagataacgctcctgctgggctacaacgtcttcctgctcatgatgagtgacttgctccccaccagtggcacccccctcatcggtgtctacttcgccctgtgcctgtccctgatggtgggcagcctgctggagaccatcttcatcacccacctgctgcacgtggccaccacccagcccccacccctgcctcggtggctccactccctgctgctccactgcaacagcccggggagatgctgtcccactgcgccccagaaggaaaataagggcccgggtctcacccccacccacctgcccggtgtgaaggagccagaggtatcagcagggcagatgccgggccctgcggaggcagagctgacagggggctcagaatggacaagggcccagcgggaacacgaggcccagaagcagcactcagtggagctgtggttgcagttcagccacgcgatggacgccatgctcttccgcctctacctgctcttcatggcctcctctatcatcaccgtcatatgcctctggaacacctaggcaggtgctcacctgccaacttcagtctggagcttctcttgcctccagggactggccaggtctcccccctttcctgagtaccaactatcatatccccaaagatgactgagtctctgctgtattccatgtatcccaatccggtcctgctgatcaattccaatcccagacatttctccctgttcctgcattttgttggcttccttcagtcctaccatatggttctaggtccctcttacgtcatctgcatagcagactatacctcttctgtccgctgacttgcccaataaataattctgcagaga

SEQ ID NO: 319 - DNA, 2139 bp, Homo sapiens
  source 1..2139: mol_type = unassigned DNA
gtaaaataacaaattgtgtttatttaagccactgggtttgtgatttgttacaacagcaataaaaggcatgtaagatagaaggaaaccattcaacacatgtctaataagaaaaatagaggaagtgaaacatttataaatgtctgagaattttccaaaattgaagagatgagtcttcagaccaagggatctcaccaagatctgcaagttgatcacgtatgaactatctataaccatttacgttgcagtgaaatacctaagactaagataaagtcttaaaagcagactgaaccttaagcataggcaagaacaagacaaccagaacactctttgaaggaaggttacaaatgtcagtggtcaaccaatgctattagtattcaaagtcagactctaggtgtggcctgtgctgctttaatctgggcattcctgggtcccagtacatgttcagagaagaacttagacaaagaagatggaaggaagctggttccacaggaaaagattttccttctacctccttctcggttttctgcttcaaggaaggggcgttactttcaccatcaattgctcagggtttggccagcacggggcggatcccactgctctgaattcagtgtttaatagaaagcccttccgtccggtcaccaacatcagcgtccccacccaagtcaacatctccttcgcgatgtctgccatcctagatgtgaatgaacagctgcacctcttgtcatcattcctgtggctggaaatggtttgggataacccatttatcagctggaacccagaggaatgtgagggcatcacgaagatgagtatggcagccaagaacctgtggctcccagacattttcatcattgaactcatggatgtggataagaccccaaaaggcctcacagcatatgtaagtaatgaaggtcgcatcaggtataagaaacccatgaaggtggacagtatctgtaacctggacatcttctacttccccttcgaccagcagaactgcacactcaccttcagctcattcctctacacagtggacagcatgttgctggacatggagaaagaagtgtgggaaataacagacgcatcccggaacatccttcagacccatggagaatgggagctcctgggcctcagcaaggccaccgcaaagttgtccaggggaggcaacctgtatgatcagatcgtgttctatgtggccatcaggcgcaggcccagtctctatgtcataaaccttctcgtgcccagtggctttctggttgccatcgatgccctcagcttctacctgccagtgaaaagtgggaatcgtgtcccattcaagataacgctcctgctgggctacaacgtcttcctgctcatgatgagtgacttgctccccaccagtggcacccccctcatcggtgtctacttcgccctgtgcctgtccctgatggtgggcagcctgctggagaccatcttcatcacccacctgctgcacgtggccaccacccagcccccacccctgcctcggtggctccactccctgctgctccactgcaacagcccggggagatgctgtcccactgcgccccagaaggaaaataagggcccgggtctcacccccacccacctgcccggtgtgaaggagccagaggtatcagcagggcagatgccgggccctgcggaggcagagctgacagggggctcagaatggacaagggcccagcgggaacacgaggcccagaagcagcactcagtggagctgtggttgcagttcagccacgcgatggacgccatgctcttccgcctctacctgctcttcatggcctcctctatcatcaccgtcatatgcctctggaacacctaggcaggtgctcacctgccaacttcagtctggagcttctcttgcctccagggactggccaggtctcccccctttcctgagtaccaactatcatatccccaaagatgactgagtctctgctgtattccatgtatcccaatccggtcctgctgatcaattccaatcccagacatttctccctgttcctgcattttgttggcttccttcagtcctaccatatggttctaggtccctcttacgtcatctgcatagcagactatacctcttctgtccgctgacttgcccaataaataattctgcagaga

SEQ ID NO: 320 - DNA, 1326 bp, Homo sapiens
  source 1..1326: mol_type = unassigned DNA
atggaaggaagctggttccacaggaaaagattttccttctacctccttctcggttttctgcttcaaggaaggggcgttactttcaccatcaattgctcagggtttggccagcacggggcggatcccactgctctgaattcagtgtttaatagaaagcccttccgtccggtcaccaacatcagcgtccccacccaagtcaacatctccttcgcgatgtctgccatcctagatgtggtttgggataacccatttatcagctggaacccagaggaatgtgagggcatcacgaagatgagtatggcagccaagaacctgtggctcccagacattttcatcattgaactcatggatgtggataagaccccaaaaggcctcacagcatatgtaagtaatgaaggtcgcatcaggtataagaaacccatgaaggtggacagtatctgtaacctggacatcttctacttccccttcgaccagcagaactgcacactcaccttcagctcattcctctacacagtggacagcatgttgctggacatggagaaagaagtgtgggaaataacagacgcatcccggaacatccttcagacccatggagaatgggagctcctgggcctcagcaaggccaccgcaaagttgtccaggggaggcaacctgtatgatcagatcgtgttctatgtggccatcaggcgcaggcccagtctctatgtcataaaccttctcgtgcccagtggctttctggttgccatcgatgccctcagcttctacctgccagtgaaaagtgggaatcgtgtcccattcaagataacgctcctgctgggctacaacgtcttcctgctcatgatgagtgacttgctccccaccagtggcacccccctcatcggtgtctacttcgccctgtgcctgtccctgatggtgggcagcctgctggagaccatcttcatcacccacctgctgcacgtggccaccacccagcccccacccctgcctcggtggctccactccctgctgctccactgcaacagcccggggagatgctgtcccactgcgccccagaaggaaaataagggcccgggtctcacccccacccacctgcccggtgtgaaggagccagaggtatcagcagggcagatgccgggccctgcggaggcagagctgacagggggctcagaatggacaagggcccagcgggaacacgaggcccagaagcagcactcagtggagctgtggttgcagttcagccacgcgatggacgccatgctcttccgcctctacctgctcttcatggcctcctctatcatcaccgtcatatgcctctggaacacctag

SEQ ID NO: 321 - DNA, 1371 bp, Homo sapiens
  source 1..1371: mol_type = unassigned DNA
atgttagctttcattttatcacgggcgaccccacgccctgccttggggcccctctcatatagggagcacagggttgctctccttcatctcacacattcgatgtccactacaggaaggggcgttactttcaccatcaattgctcagggtttggccagcacggggcggatcccactgctctgaattcagtgtttaatagaaagcccttccgtccggtcaccaacatcagcgtccccacccaagtcaacatctccttcgcgatgtctgccatcctagatgtggtttgggataacccatttatcagctggaacccagaggaatgtgagggcatcacgaagatgagtatggcagccaagaacctgtggctcccagacattttcatcattgaactcatggatgtggataagaccccaaaaggcctcacagcatatgtaagtaatgaaggtcgcatcaggtataagaaacccatgaaggtggacagtatctgtaacctggacatcttctacttccccttcgaccagcagaactgcacactcaccttcagctcattcctctacacagtggacagcatgttgctggacatggagaaagaagtgtgggaaataacagacgcatcccggaacatccttcagacccatggagaatgggagctcctgggcctcagcaaggccaccgcaaagttgtccaggggaggcaacctgtatgatcagatcgtgttctatgtggccatcaggcgcaggcccagtctctatgtcataaaccttctcgtgcccagtggctttctggttgccatcgatgccctcagcttctacctgccagtgaaaagtgggaatcgtgtcccattcaagataacgctcctgctgggctacaacgtcttcctgctcatgatgagtgacttgctccccaccagtggcacccccctcatcggtgtctacttcgccctgtgcctgtccctgatggtgggcagcctgctggagaccatcttcatcacccacctgctgcacgtggccaccacccagcccccacccctgcctcggtggctccactccctgctgctccactgcaacagcccggggagatgctgtcccactgcgccccagaaggaaaataagggcccgggtctcacccccacccacctgcccggtgtgaaggagccagaggtatcagcagggcagatgccgggccctgcggaggcagagctgacagggggctcagaatggacaagggcccagcgggaacacgaggcccagaagcagcactcagtggagctgtggttgcagttcagccacgcgatggacgccatgctcttccgcctctacctgctcttcatggcctcctctatcatcaccgtcatatgcctctggaacacctag

SEQ ID NO: 322 - DNA, 2011 bp, Homo sapiens
  source 1..2011: mol_type = unassigned DNA
acggtctgatcttggggcagaaccaaagggagaagttaagggatttcatgacggcatcaattccaaaacatttgcatggtgctggtattgcctttggtcccactgagtgtttacaaaatagcaccagtaaggatagcatcaactggcaaacggagaaggaggagaacagagtggagaggaaccctgttaggagaaattgagcggcattccatctggtaggcaagtttgcatttctcctttttgggatctgcccaggaatgttgtcaagtgtaatggctcccctgtgggcctgcatcctggtggctgcaggaattctagccacagatacacatcatccccaggattctgctctgtatcatctcagcaagcagctattacagaaatatcataaagaagtgagacctgtttacaactggaccaaggccaccacagtctacctggacctgttcgtccatgctatattggatgtggatgcagagaatcaaatattaaagacaagtgtatggtaccaagaggtctggaatgatgaatttttatcctggaactccagcatgtttgatgagattagagagatctccctacctctaagtgccatctgggcccccgatatcatcatcaatgagtttgtggacattgaaagataccctgaccttccctatgtttatgtgaactcatctgggaccattgagaactataagcccatccaggtggtctctgcgtgcagtttagagacatatgcttttccatttgatgtccagaattgcagcctgaccttcaagagcattctgcatacagtggaagacgtagacctggcctttctgaggagcccagaagacattcagcatgacaaaaaggcgtttttgaatgacagtgagtgggaacttctatctgtgtcctccacatacagcatcctgcagagcagcgctggaggatttgcacagattcagtttaatgtggtgatgcgcaggcaccccctggtctatgtcgtgagtctgctgattcctagcatctttctcatgctggtggacctggggagcttctacctgccacccaactgccgagccaggattgtgttcaagaccagtgtgctggtgggctacaccgtcttcagggtcaacatgtccaaccaggtgccacggagtgtagggagcacccctctgattgggcacttcttcaccatctgcatggccttcttggttctcagcttagctaagtccatcgtgttggtcaaattcctccatgatgagcagcgtggtggacaggagcagcccttcttgtgccttcgaggggacaccgatgctgacaggcctagagtggaacccagggcccaacgtgctgtggtaacagagtcctcgctgtatggagagcacctggcccagccaggaaccctgaaggaagtctggtcgcagcttcaatctatcagcaactacctccaaactcaggaccagacagaccaacaggaggcagagtggctggtcctcctgtcccgctttgaccgactgctcttccaaagctaccttttcatgctggggatctacaccatcactctgtgctccctctgggcactgtggggcggcgtgtgaagactgaagtgttcttcagtaattgtgctggcacttaggagagagaggagggggaataatagtgggttaaaaagctttctgggtcgggtgtggtggttcttgcctatagtcccagtgctttgggaggccatagcaggaggattgcttgagcccaggagttcgagaccagccagagcaacatagtgagaccacatctctaccagtaaataaataaataaataaataaataaataaataaataaatagctgggcatagtggctcatgcctgtactctcagctacttgggaggttgaggtgggaggattgcttgagcccaggatttcaaggctgcagtgagccatgattgcaccactgcaccccagcctgggtgacagagcaagaccctgtctcaaaaaaaataaaataaaaggctttctgccttcattgc

SEQ ID NO: 323 - DNA, 1692 bp, Homo sapiens
  source 1..1692: mol_type = unassigned DNA
aattattctgtctccaaaatgcaagattgttgtaaaatggaattgtaggtacagttttccaaccttggagatggcgttgatttacttgtttttacaatgaggtttctccattgggcacttaggccatcagcttactttaagcatttgccaaaggccccaccagctggctgtgaattgatgcagattttggtgagctgaaagctatattctagtaaaagccaccgagtcctgaacagtctgaaacctcctaaagaaaccaagctcctcttacttttatcttcacaatgatagtttattttccaggaattctagccacagatacacatcatccccaggattctgctctgtatcatctcagcaagcagctattacagaaatatcataaagaagtgagacctgtttacaactggaccaaggccaccacagtctacctggacctgttcgtccatgctatattggatgtggatgcagagaatcaaatattaaagacaagtgtatggtaccaagaggtctggaatgatgaatttttatcctggaactccagcatgtttgatgagattagagagatctccctacctctaagtgccatctgggcccccgatatcatcatcaatgagtttgtggacattgaaagataccctgaccttccctatgtttatgtgaactcatctgggaccattgagaactataagcccatccaggtggtctctgcgtgcagtttagagacatatgcttttccatttgatgtccagaattgcagcctgaccttcaagagcattctgcatacagtggaagacgtagacctggcctttctgaggagcccagaagacattcagcatgacaaaaaggcgtttttgaatgacagtgagtgggaacttctatctgtgtcctccacatacagcatcctgcagagcagcgctggaggatttgcacagattcagtttaatgtggtgatgcgcaggcaccccctggtctatgtcgtgagtctgctgattcctagcatctttctcatgctggtggacctggggagcttctacctgccacccaactgccgagccaggattgtgttcaagaccagtgtgctggtgggctacaccgtcttcagggtcaacatgtccaaccaggtgccacggagtgtagggagcacccctctgattgggcacttcttcaccatctgcatggccttcttggttctcagcttagctaagtccatcgtgttggtcaaattcctccatgatgagcagcgtggtggacaggagcagcccttcttgtgccttcgaggggacaccgatgctgacaggcctagagtggaacccagggcccaacgtgctgtggtaacagagtcctcgctgtatggagagcacctggcccagccaggaaccctgaaggaagtctggtcgcagcttcaatctatcagcaactacctccaaactcaggaccagacagaccaacaggaggcagagtggctggtcctcctgtcccgctttgaccgactgctcttccaaagctaccttttcatgctggggatctacaccatcactctgtgctccctctgggcactgtggggcggcgtgtgaagactgaagtgttcttcagtaattgtgctggcacttaggagagagaggagggggaataatagtgggttaaaaagctttctgggtcgggtgtggtggttcttgcctatagtcccag

SEQ ID NO: 324 - DNA, 612 bp, Homo sapiens
  source 1..612: mol_type = unassigned DNA
atgcagagaatcaaatattaaagacaagtgtatggtaccaagaggtctggaatgatgaatttttatcctggaactccagcatgtttgatgagattagagagatctccctacctctaagtgccatctgggcccccgatatcatcatcaatgagtttgtggacattgaaagataccctgaccttccctatgtttatgtgaactcatctgggaccattgagaactataagcccatccaggtggtctctgcgtgcagtttagagacatatgcttttccatttgatgtccagaattgcagcctgaccttcaagagcattctgcatacagtggaagacgtagacctggcctttctgaggagcccagaagacattcagcatgacaaaaaggcgtttttgaatgacagtgagtgggaacttctatctgtgtcctccacatacagcatcctgcagagcagcgctggaggatttgcacagattcagtttaatggcacttcttcaccatctgcatggccttcttggttctcagcttagctaagtccatcgtgttggtcaaattcctccatgatgagcagcgtggtggacaggagcagcccttcttgtgccttcgaggggacac

SEQ ID NO: 325 - DNA, 1449 bp, Homo sapiens
  source 1..1449: mol_type = unassigned DNA
atgttagctttcattttatcacgggcgaccccacgccctgccttggggcccctctcatatagggagcacagggttgctctccttcatctcacacattcgatgtccactacaggaaggggcgttactttcaccatcaattgctcagggtttggccagcacggggcggatcccactgctctgaattcagtgtttaatagaaagcccttccgtccggtcaccaacatcagcgtccccacccaagtcaacatctccttcgcgatgtctgccatcctagatgtggtttgggataacccatttatcagctggaacccagaggaatgtgagggcatcacgaagatgagtatggcagccaagaacctgtggctcccagacattttcatcattgaactgtgcgtatcaagggctggtcagagggaagtcccatctcctggtagccacagagatcacagtttaccattggggccactcatggatgtggataagaccccaaaaggcctcacagcatatgtaagtaatgaaggtcgcatcaggtataagaaacccatgaaggtggacagtatctgtaacctggacatcttctacttccccttcgaccagcagaactgcacactcaccttcagctcattcctctacacagtggacagcatgttgctggacatggagaaagaagtgtgggaaataacagacgcatcccggaacatccttcagacccatggagaatgggagctcctgggcctcagcaaggccaccgcaaagttgtccaggggaggcaacctgtatgatcagatcgtgttctatgtggccatcaggcgcaggcccagtctctatgtcataaaccttctcgtgcccagtggctttctggttgccatcgatgccctcagcttctacctgccagtgaaaagtgggaatcgtgtcccattcaagataacgctcctgctgggctacaacgtcttcctgctcatgatgagtgacttgctccccaccagtggcacccccctcatcggtgtctacttcgccctgtgcctgtccctgatggtgggcagcctgctggagaccatcttcatcacccacctgctgcacgtggccaccacccagcccccacccctgcctcggtggctccactccctgctgctccactgcaacagcccggggagatgctgtcccactgcgccccagaaggaaaataagggcccgggtctcacccccacccacctgcccggtgtgaaggagccagaggtatcagcagggcagatgccgggccctgcggaggcagagctgacagggggctcagaatggacaagggcccagcgggaacacgaggcccagaagcagcactcagtggagctgtggttgcagttcagccacgcgatggacgccatgctcttccgcctctacctgctcttcatggcctcctctatcatcaccgtcatatgcctctggaacacctag

SEQ ID NO: 326 - DNA, 1557 bp, Homo sapiens
  source 1..1557: mol_type = unassigned DNA
ggcgcaggcagcggctgggagcgcagcggcagcggcggcagcagaagctcggctcagcggctgggggtggccgctcgaatctgccagggcacctcgctccctcgcctctggcagcgggaccctgtgggcattgaaatccaactcactcatgcttatttcctgtaatggacaaacttgatgctaatgtgagttctgaggagggtttcgggtcagtggagaaggtggtgctgctcacgtttctctcgacggttatcctgatggccatcttggggaacctgctggtgatggtggctgtgtgctgggacaggcagctcaggaaaataaaaacaaattatttcattgtatctcttgcttttgcggatctgctggtttcggtgctggtgatgccctttggtgccattgagctggttcaagacatctggatttatggggaggtgttttgtcttgttcggacatctctggacgtcctgctcacaacggcatcgatttttcacctgtgctgcatttctctggataggtattacgccatctgctgccagcctttggtctataggaacaagatgacccctctgcgcatcgcattaatgctgggaggctgctgggtcatccccacgtttatttcttttctccctataatgcaaggctggaataacattggcataattgatttgatagaaaagaggaagttcaaccagaactctaactctacgtactgtgtcttcatggtcaacaagccctacgccatcacctgctctgtggtggccttctacatcccatttctcctcatggtgctggcctattaccgcatctatgtcacagctaaggagcatgcccatcagatccagatgttacaacgggcaggagcctcctccgagagcaggcctcagtcggcagaccagcatagcactcatcgcatgaggacagagaccaaagcagccaagaccctgtgcatcatcatgggttgcttctgcctctgctgggcaccattctttgtcaccaatattgtggatcctttcatagactacactgtccctgggcaggtgtggactgctttcctctggctcggctatatcaattccgggttgaacccttttctctacgccttcttgaataagtcttttagacgtgccttcctcatcatcctctgctgtgatgatgagcgctaccgaagaccttccattctgggccagactgtcccttgttcaaccacaaccattaatggatccacacatgtactaagtggctgttcccctgtctccagcttcctcctgctcttctgcaatagaccagttcctgtctaactctgaaagtgctctgtacaccgttctgcacaggggacatcatcaggaactcgagaaactgcccatacacaatgacccagaatccctggaatcatgcttctgattgaggacatggctcacaacttagccattcattcgcattcatgtttgcatgaacaggtcaccctggcatcacttctgaacctcatcaccaccagtgaggcatcaggtagtaggggctgagagcccagaggaggtacatggaggacagtgttgg

SEQ ID NO: 327 - DNA, 1481 bp, Homo sapiens
  source 1..1481: mol_type = unassigned DNA
ggcgcaggcagcggctgggagcgcagcggcagcggcggcagcagaagctcggctcagcggctgggggtggccgctcgaatctgccagggcacctcgctccctcgcctctggcagcgggaccctgtgggcattgaaatccaactcactcatgcttatttcctgtaatggacaaacttgatgctaatgtgagttctgaggagggtttcgggtcagtggagaaggtggtgctgctcacgtttctctcgacggttatcctgatggccatcttggggaacctgctggtgatggtggctgtgtgctgggacaggcagctcaggaaaataaaaacaaattatttcattgtatctcttgcttttgcggatctgctggtttcggtgctggtgatgccctttggtgccattgagctggttcaagacatctggatttatggggaggtgttttgtcttgttcggacatctctggacgtcctgctcacaacggcatcgatttttcacctgtgctgcatttctctggataggtattacgccatctgctgccagcctttggtctataggaacaagatgacccctctgcgcatcgcattaatgctgggaggctgctgggtcatccccacgtttatttcttttctccctataatgcaaggctggaataacattggcataattgatttgatagaaaagaggaagttcaaccagaactctaactctacgtactgtgtcttcatggtcaacaagccctacgccatcacctgctctgtggtggccttctacatcccatttctcctcatggtgctggcctattaccgcatctatgtcacagctaaggagcatgcccatcagatccagatgttacaacgggcaggagcctcctccgagagcaggcctcagtcggcagaccagcatagcactcatcgcatgaggacagagaccaaagcagccaagaccctgtgcatcatcatgggttgcttctgcctctgctgggcaccattctttgtcaccaatattgtggatcctttcatagactacactgtccctgggcaggtgtggactgctttcctctggctcggctatatcaattccgggttgaacccttttctctacgccttcttgaataagtcttttagacgtgccttcctcatcatcctctgctgtgatgatgagcgctaccgaagaccttccattctgggccagactgtcccttgttcaaccacaaccattaatggatccacacatgtactaaggtacaccgttctgcacaggggacatcatcaggaactcgagaaactgcccatacacaatgacccagaatccctggaatcatgcttctgattgaggacatggctcacaacttagccattcattcgcattcatgtttgcatgaacaggtcaccctggcatcacttctgaacctcatcaccaccagtgaggcatcaggtagtaggggctgagagcccagaggaggtacatggaggacagtgttgg

SEQ ID NO: 328 - DNA, 3082 bp, Homo sapiens
  source 1..3082: mol_type = unassigned DNA
gcggcagcggcggcagcagaagctcggctcagcggctgggggtggccgctcgaatctgccagggcacctcgctccctcgcctctggcagcgggaccctgtgggcattgaaatccaactcactcatgcttatttcctgtaatggacaaacttgatgctaatgtgagttctgaggagggtttcgggtcagtggagaaggtggtgctgctcacgtttctctcgacggttatcctgatggccatcttggggaacctgctggtgatggtggctgtgtgctgggacaggcagctcaggaaaataaaaacaaattatttcattgtatctcttgcttttgcggatctgctggtttcggtgctggtgatgccctttggtgccattgagctggttcaagacatctggatttatggggaggtgttttgtcttgttcggacatctctggacgtcctgctcacaacggcatcgatttttcacctgtgctgcatttctctggataggtattacgccatctgctgccagcctttggtctataggaacaagatgacccctctgcgcatcgcattaatgctgggaggctgctgggtcatccccacgtttatttcttttctccctataatgcaaggctggaataacattggcataattgatttgatagaaaagaggaagttcaaccagaactctaactctacgtactgtgtcttcatggtcaacaagccctacgccatcacctgctctgtggtggccttctacatcccatttctcctcatggtgctggcctattaccgcatctatgtcacagctaaggagcatgcccatcagatccagatgttacaacgggcaggagcctcctccgagagcaggcctcagtcggcagaccagcatagcactcatcgcatgaggacagagaccaaagcagccaagaccctgtgcatcatcatgggttgcttctgcctctgctgggcaccattctttgtcaccaatattgtggatcctttcatagactacactgtccctgggcaggtgtggactgctttcctctggctcggctatatcaattccgggttgaacccttttctctacgccttcttgaataagtcttttagacgtgccttcctcatcatcctctgctgtgatgatgagcgctaccgaagaccttccattctgggccagactgtcccttgttcaaccacaaccattaatggatccacacatgtactaaggacagattttctgtttgacagagacattttagcaaggtattggacaaagcctgccagagcgggtccattctcaggcacattgagcattagatgtttgactgcaaggaagcctgtcttgggggatgcagtggagtgtggtggccagtgggagagtcagtgtcacccgccagcaacttctcctttggtggctgctcagcccagtgacacttaggcccctgggacaatgacccagaagacagccatgcctccgaaagagggccaggtcctaagctgctgcttgtgcgcgactgcacccggtattctcttcacctgaggctttccgtccgccagtgcaggaacccggtgctcgctgggcttttcctctgagattccagcaggtggcgctggagggagtcaggggacataatggcctccttgttcactttttatttcccaacactccctcttcccagattctctgcttttgccgcgtggtctctggtgtctctgacatgttcccgtcactcactgtgtctgatctgtctcactcacgttctaagcacgatagcttgctgcgtcctatctcggtcactgatgtctccaaatacgccttctttgctgtgtgggcttccagatatcaacaaaatactccctctctgttcctgtcttagccagaggcgtcgctcctgtcttgcttacttgcttggtcacgtccgtcacagccatgttcaagctatcccctgcctcttcttcgccctgttctgtgccagacgctaacacacttttctccctgtgtctgggtccaaacgtgcatcctcttggttggcccccttgtcagtcccagacgtccacttgctcttccttatgtccaatgtctgtcctcctcttcaggacatgctccatttattttccatggaagacacagggtcagagatctgtcagaggaaaatggtctccacagcaactctggagggaagctgaagacagatagcttcctcctggtgtcctggccgctggcgtgtctgccctgagatgctcgctctcctgctgggctagaacgggacgtcttctaaaaagccttgggcagggctagcaacatcgtaggtgtttattaggcttcaggatctttcccatgaacttgtgatatcattttgaaacccttcaatctggctttgttgctgccaaaggagataactgttggaagttcacactggggaaactcattttcccctgcagctcccccaaggtgcaggagggcaggatccagcagcactggggatgccgaggcaatgctgtacttgaagccagaggacccaaattgccgccctggctgtgctgcaaacaagctgtgagatcttgaatagtgttctttcatctctggaccccactttccacatctgtgcactcaagcttggactagaggacctttaagttttctttctgtttctaagacaacagtatgctgctatagccgtctgctacctcgagaagccatggcctgcctgccttttggctttgtttcaaaggaacgaccctcctcatttgggccttttagacccctgacctttccagctttgtccttcagattaatctggatgtcttttattcaaagctgagtcagtggctcttgcgaatgccccatagcagaagtcccgggaaggtaaatgccaaacccagagccatgtgagattctgactttgatcttggctgtggtttaatagcatctcaggattatttatcatattctctttttttcttattgcttataaggtgtcagttattgtttccattgttgtttactttagttctggaactgaaaccgacaggaagaaactttggaataaggaagagaagattgaccaaaccatccaaatgccaaaaagaaaaa

SEQ ID NO: 329 - DNA, 3018 bp, Homo sapiens
  source 1..3018: mol_type = unassigned DNA
ggcgcaggcagcggctgggagcgcagcggcagcggcggcagcagaagctcggctcagcggctgggggtggccgctcgaatctgccagggcacctcgctccctcgcctctggcagcgggaccctgtgggcattgaaatccaactcactcatgcttatttcctgtaatggacaaacttgatgctaatgtgagttctgaggagggtttcgggtcagtggagaaggtggtgctgctcacgtttctctcgacggttatcctgatggccatcttggggaacctgctggtgatggtggctgtgtgctgggacaggcagctcaggaaaataaaaacaaattatttcattgtatctcttgcttttgcggatctgctggtttcggtgctggtgatgccctttggtgccattgagctggttcaagacatctggatttatggggaggtgttttgtcttgttcggacatctctggacgtcctgctcacaacggcatcgatttttcacctgtgctgcatttctctggataggtattacgccatctgctgccagcctttggtctataggaacaagatgacccctctgcgcatcgcattaatgctgggaggctgctgggtcatccccacgtttatttcttttctccctataatgcaaggctggaataacattggcataattgatttggaaaggagtctaaaccaaggcctgggccaggattttcatgcgatagaaaagaggaagttcaaccagaactctaactctacgtactgtgtcttcatggtcaacaagccctacgccatcacctgctctgtggtggccttctacatcccatttctcctcatggtgctggcctattaccgcatctatgtcacagctaaggagcatgcccatcagatccagatgttacaacgggcaggagcctcctccgagagcaggcctcagtcggcagaccagcatagcactcatcgcatgaggacagagaccaaagcagccaagaccctgtgcatcatcatgggttgcttctgcctctgctgggcaccattctttgtcaccaatattgtggatcctttcatagactacactgtccctgggcaggtgtggactgctttcctctggctcggctatatcaattccgggttgaacccttttctctacgccttcttgaataagtcttttagacgtgccttcctcatcatcctctgctgtgatgatgagcgctaccgaagaccttccattctgggccagactgtcccttgttcaaccacaaccattaatggatccacacatgtactaagggatgcagtggagtgtggtggccagtgggagagtcagtgtcacccgccagcaacttctcctttggtggctgctcagcccagtgacacttaggcccctgggacaatgacccagaagacagccatgcctccgaaagagggccaggtcctaagctgctgcttgtgcgcgactgcacccggtattctcttcacctgaggctttccgtccgccagtgcaggaacccggtgctcgctgggcttttcctctgagattccagcaggtggcgctggagggagtcaggggacataatggcctccttgttcactttttatttcccaacactccctcttcccagattctctgcttttgccgcgtggtctctggtgtctctgacatgttcccgtcactcactgtgtctgatctgtctcactcacgttctaagcacgatagcttgctgcgtcctatctcggtcactgatgtctccaaatacgccttctttgctgtgtgggcttccagatatcaacaaaatactccctctctgttcctgtcttagccagaggcgtcgctcctgtcttgcttacttgcttggtcacgtccgtcacagccatgttcaagctatcccctgcctcttcttcgccctgttctgtgccagacgctaacacacttttctccctgtgtctgggtccaaacgtgcatcctcttggttggcccccttgtcagtcccagacgtccacttgctcttccttatgtccaatgtctgtcctcctcttcaggacatgctccatttattttccatggaagacacagggtcagagatctgtcagaggaaaatggtctccacagcaactctggagggaagctgaagacagatagcttcctcctggtgtcctggccgctggcgtgtctgccctgagatgctcgctctcctgctgggctagaacgggacgtcttctaaaaagccttgggcagggctagcaacatcgtaggtgtttattaggcttcaggatctttcccatgaacttgtgatatcattttgaaacccttcaatctggctttgttgctgccaaaggagataactgttggaagttcacactggggaaactcattttcccctgcagctcccccaaggtgcaggagggcaggatccagcagcactggggatgccgaggcaatgctgtacttgaagccagaggacccaaattgccgccctggctgtgctgcaaacaagctgtgagatcttgaatagtgttctttcatctctggaccccactttccacatctgtgcactcaagcttggactagaggacctttaagttttctttctgtttctaagacaacagtatgctgctatagccgtctgctacctcgagaagccatggcctgcctgccttttggctttgtttcaaaggaacgaccctcctcatttgggccttttagacccctgacctttccagctttgtccttcagattaatctggatgtcttttattcaaagctgagtcagtggctcttgcgaatgccccatagcagaagtcccgggaaggtaaatgccaaacccagagccatgtgagattctgactttgatcttggctgtggtttaatagcatctcaggattatttatcatattctctttttttcttattgcttataaggtgtcagttattgtttccattgttgtttactttagttctggaactgaaaccgacaggaagaaactttggaataaggaagagaagattgaccaaaccatccaaatgcc

SEQ ID NO: 330 - DNA, 2962 bp, Homo sapiens
  source 1..2962: mol_type = unassigned DNA
gcggcagcggcggcagcagaagctcggctcagcggctgggggtggccgctcgaatctgccagggcacctcgctccctcgcctctggcagcgggaccctgtgggcattgaaatccaactcactcatgcttatttcctgtaatggacaaacttgatgctaatgtgagttctgaggagggtttcgggtcagtggagaaggtggtgctgctcacgtttctctcgacggttatcctgatggccatcttggggaacctgctggtgatggtggctgtgtgctgggacaggcagctcaggaaaataaaaacaaattatttcattgtatctcttgcttttgcggatctgctggtttcggtgctggtgatgccctttggtgccattgagctggttcaagacatctggatttatggggaggtgttttgtcttgttcggacatctctggacgtcctgctcacaacggcatcgatttttcacctgtgctgcatttctctggataggtattacgccatctgctgccagcctttggtctataggaacaagatgacccctctgcgcatcgcattaatgctgggaggctgctgggtcatccccacgtttatttcttttctccctataatgcaaggctggaataacattggcataattgatttgatagaaaagaggaagttcaaccagaactctaactctacgtactgtgtcttcatggtcaacaagccctacgccatcacctgctctgtggtggccttctacatcccatttctcctcatggtgctggcctattaccgcatctatgtcacagctaaggagcatgcccatcagatccagatgttacaacgggcaggagcctcctccgagagcaggcctcagtcggcagaccagcatagcactcatcgcatgaggacagagaccaaagcagccaagaccctgtgcatcatcatgggttgcttctgcctctgctgggcaccattctttgtcaccaatattgtggatcctttcatagactacactgtccctgggcaggtgtggactgctttcctctggctcggctatatcaattccgggttgaacccttttctctacgccttcttgaataagtcttttagacgtgccttcctcatcatcctctgctgtgatgatgagcgctaccgaagaccttccattctgggccagactgtcccttgttcaaccacaaccattaatggatccacacatgtactaagggatgcagtggagtgtggtggccagtgggagagtcagtgtcacccgccagcaacttctcctttggtggctgctcagcccagtgacacttaggcccctgggacaatgacccagaagacagccatgcctccgaaagagggccaggtcctaagctgctgcttgtgcgcgactgcacccggtattctcttcacctgaggctttccgtccgccagtgcaggaacccggtgctcgctgggcttttcctctgagattccagcaggtggcgctggagggagtcaggggacataatggcctccttgttcactttttatttcccaacactccctcttcccagattctctgcttttgccgcgtggtctctggtgtctctgacatgttcccgtcactcactgtgtctgatctgtctcactcacgttctaagcacgatagcttgctgcgtcctatctcggtcactgatgtctccaaatacgccttctttgctgtgtgggcttccagatatcaacaaaatactccctctctgttcctgtcttagccagaggcgtcgctcctgtcttgcttacttgcttggtcacgtccgtcacagccatgttcaagctatcccctgcctcttcttcgccctgttctgtgccagacgctaacacacttttctccctgtgtctgggtccaaacgtgcatcctcttggttggcccccttgtcagtcccagacgtccacttgctcttccttatgtccaatgtctgtcctcctcttcaggacatgctccatttattttccatggaagacacagggtcagagatctgtcagaggaaaatggtctccacagcaactctggagggaagctgaagacagatagcttcctcctggtgtcctggccgctggcgtgtctgccctgagatgctcgctctcctgctgggctagaacgggacgtcttctaaaaagccttgggcagggctagcaacatcgtaggtgtttattaggcttcaggatctttcccatgaacttgtgatatcattttgaaacccttcaatctggctttgttgctgccaaaggagataactgttggaagttcacactggggaaactcattttcccctgcagctcccccaaggtgcaggagggcaggatccagcagcactggggatgccgaggcaatgctgtacttgaagccagaggacccaaattgccgccctggctgtgctgcaaacaagctgtgagatcttgaatagtgttctttcatctctggaccccactttccacatctgtgcactcaagcttggactagaggacctttaagttttctttctgtttctaagacaacagtatgctgctatagccgtctgctacctcgagaagccatggcctgcctgccttttggctttgtttcaaaggaacgaccctcctcatttgggccttttagacccctgacctttccagctttgtccttcagattaatctggatgtcttttattcaaagctgagtcagtggctcttgcgaatgccccatagcagaagtcccgggaaggtaaatgccaaacccagagccatgtgagattctgactttgatcttggctgtggtttaatagcatctcaggattatttatcatattctctttttttcttattgcttataaggtgtcagttattgtttccattgttgtttactttagttctggaactgaaaccgacaggaagaaactttggaataaggaagagaagattgaccaaaccatccaaatgccaaaaagaaaaa

SEQ ID NO: 331 - DNA, 1201 bp, Homo sapiens
  source 1..1201: mol_type = unassigned DNA
tgcttatttcctgtaatggacaaacttgatgctaatgtgagttctgaggagggtttcgggtcagtggagaaggtggtgctgctcacgtttctctcgacggttatcctgatggccatcttggggaacctgctggtgatggtggctgtgtgctgggacaggcagctcaggaaaataaaaacaaattatttcattgtatctcttgcttttgcggatctgctggtttcggtgctggtgatgccctttggtgccattgagctggttcaagacatctggatttatggggaggtgttttgtcttgttcggacatctctggacgtcctgctcacaacggcatcgatttttcacctgtgctgcatttctctggataggtattacgccatctgctgccagcctttggtctataggaacaagatgacccctctgcgcatcgcattaatgctgggaggctgctgggtcatccccacgtttatttcttttctccctataatgcaaggctggaataacattggcataattgatttgatagaaaagaggaagttcaaccagaactctaactctacgtactgtgtcttcatggtcaacaagccctacgccatcacctgctctgtggtggccttctacatcccatttctcctcatggtgctggcctattaccgcatctatgtcacagctaaggagcatgcccatcagatccagatgttacaacgggcaggagcctcctccgagagcaggcctcagtcggcagaccagcatagcactcatcgcatgaggacagagaccaaagcagccaagaccctgtgcatcatcatgggttgcttctgcctctgctgggcaccattctttgtcaccaatattgtggatcctttcatagactacactgtccctgggcaggtgtggactgctttcctctggctcggctatatcaattccgggttgaacccttttctctacgccttcttgaataagtcttttagacgtgccttcctcatcatcctctgctgtgatgatgagcgctaccgaagaccttccattctgggccagactgtcccttgttcaaccacaaccattaatggatccacacatgtactaagattttgagctccttgaggactgtggccaattcttattgctcatttttttttcttagtgcccaacacaggtttttgtacactgaagttatcaaataaattcattggatgta

SEQ ID NO: 332 - DNA, 1236 bp, Homo sapiens
  source 1..1236: mol_type = unassigned DNA
atggacaaacttgatgctaatgtgagttctgaggagggtttcgggtcagtggagaaggtggtgctgctcacgtttctctcgacggttatcctgatggccatcttggggaacctgctggtgatggtggctgtgtgctgggacaggcagctcaggaaaataaaaacaaattatttcattgtatctcttgcttttgcggatctgctggtttcggtgctggtgatgccctttggtgccattgagctggttcaagacatctggatttatggggaggtgttttgtcttgttcggacatctctggacgtcctgctcacaacggcatcgatttttcacctgtgctgcatttctctggataggtattacgccatctgctgccagcctttggtctataggaacaagatgacccctctgcgcatcgcattaatgctgggaggctgctgggtcatccccacgtttatttcttttctccctataatgcaaggctggaataacattggcataattgatttgatagaaaagaggaagttcaaccagaactctaactctacgtactgtgtcttcatggtcaacaagccctacgccatcacctgctctgtggtggccttctacatcccatttctcctcatggtgctggcctattaccgcatctatgtcacagctaaggagcatgcccatcagatccagatgttacaacgggcaggagcctcctccgagagcaggcctcagtcggcagaccagcatagcactcatcgcatgaggacagagaccaaagcagccaagaccctgtgcatcatcatgggttgcttctgcctctgctgggcaccattctttgtcaccaatattgtggatcctttcatagactacactgtccctgggcaggtgtggactgctttcctctggctcggctatatcaattccgggttgaacccttttctctacgccttcttgaataagtcttttagacgtgccttcctcatcatcctctgctgtgatgatgagcgctaccgaagaccttccattctgggccagactgtcccttgttcaaccacaaccattaatggatccacacatgtactaagttctggaactgaaaccgacaggaagaaactttggaataaggaagagaagattgaccaaaccatccaaatgccaaaaagaaaaagaaaaaaaaaagcctctctgtcctatgaagacttaattctgttggggagaaagtcatgttttagggaaggaaaatag

SEQ ID NO: 333 - DNA, 1323 bp, Homo sapiens
  source 1..1323: mol_type = unassigned DNA
cctgtaatggacaaacttgatgctaatgtgagttctgaggagggtttcgggtcagtggagaaggtggtgctgctcacgtttctctcgacggttatcctgatggccatcttggggaacctgctggtgatggtggctgtgtgctgggacaggcagctcaggaaaataaaaacaaattatttcattgtatctcttgcttttgcggatctgctggtttcggtgctggtgatgccctttggtgccattgagctggttcaagacatctggatttatggggaggtgttttgtcttgttcggacatctctggacgtcctgctcacaacggcatcgatttttcacctgtgctgcatttctctggataggtattacgccatctgctgccagcctttggtctataggaacaagatgacccctctgcgcatcgcattaatgctgggaggctgctgggtcatccccacgtttatttcttttctccctataatgcaaggctggaataacattggcataattgatttgatagaaaagaggaagttcaaccagaactctaactctacgtactgtgtcttcatggtcaacaagccctacgccatcacctgctctgtggtggccttctacatcccatttctcctcatggtgctggcctattaccgcatctatgtcacagctaaggagcatgcccatcagatccagatgttacaacgggcaggagcctcctccgagagcaggcctcagtcggcagaccagcatagcactcatcgcatgaggacagagaccaaagcagccaagaccctgtgcatcatcatgggttgcttctgcctctgctgggcaccattctttgtcaccaatattgtggatcctttcatagactacactgtccctgggcaggtgtggactgctttcctctggctcggctatatcaattccgggttgaacccttttctctacgccttcttgaataagtcttttagacgtgccttcctcatcatcctctgctgtgatgatgagcgctaccgaagaccttccattctgggccagactgtcccttgttcaaccacaaccattaatggatccacacatgtactaaggtacaccgttctgcacaggggacatcatcaggaactcgagaaactgcccatacacaatgacccagaatccctggaatcatgcttctgattgaggacatggctcacaacttagccattcattcgcattcatgtttgcatgaacaggtcaccctggcatcacttctgaacctcatcaccaccagtgaggcatcaggtagtaggggctgagagcccagaggaggtacatggaggacagtgttgg

SEQ ID NO: 334 - DNA, 1242 bp, Homo sapiens
  source 1..1242: mol_type = unassigned DNA
taatggacaaacttgatgctaatgtgagttctgaggagggtttcgggtcagtggagaaggtggtgctgctcacgtttctctcgacggttatcctgatggccatcttggggaacctgctggtgatggtggctgtgtgctgggacaggcagctcaggaaaataaaaacaaattatttcattgtatctcttgcttttgcggatctgctggtttcggtgctggtgatgccctttggtgccattgagctggttcaagacatctggatttatggggaggtgttttgtcttgttcggacatctctggacgtcctgctcacaacggcatcgatttttcacctgtgctgcatttctctggataggtattacgccatctgctgccagcctttggtctataggaacaagatgacccctctgcgcatcgcattaatgctgggaggctgctgggtcatccccacgtttatttcttttctccctataatgcaaggctggaataacattggcataattgatttgatagaaaagaggaagttcaaccagaactctaactctacgtactgtgtcttcatggtcaacaagccctacgccatcacctgctctgtggtggccttctacatcccatttctcctcatggtgctggcctattaccgcatctatgtcacagctaaggagcatgcccatcagatccagatgttacaacgggcaggagcctcctccgagagcaggcctcagtcggcagaccagcatagcactcatcgcatgaggacagagaccaaagcagccaagaccctgtgcatcatcatgggttgcttctgcctctgctgggcaccattctttgtcaccaatattgtggatcctttcatagactacactgtccctgggcaggtgtggactgctttcctctggctcggctatatcaattccgggttgaacccttttctctacgccttcttgaataagtcttttagacgtgccttcctcatcatcctctgctgtgatgatgagcgctaccgaagaccttccattctgggccagactgtcccttgttcaaccacaaccattaatggatccacacatgtactaagtggctgttcccctgtctccagcttcctcctgctcttctgcaatagaccagttcctgtctaactctgaaagtgctctgtacaccgttctgcacaggggacatcatcaggaactcgagaaactgcccatacacaatgacccagaatccctggaatcatgcttctga

SEQ ID NO: 335 - DNA, 1326 bp, Homo sapiens
  source 1..1326: mol_type = unassigned DNA
atggacaaacttgatgctaatgtgagttctgaggagggtttcgggtcagtggagaaggtggtgctgctcacgtttctctcgacggttatcctgatggccatcttggggaacctgctggtgatggtggctgtgtgctgggacaggcagctcaggaaaataaaaacaaattatttcattgtatctcttgcttttgcggatctgctggtttcggtgctggtgatgccctttggtgccattgagctggttcaagacatctggatttatggggaggtgttttgtcttgttcggacatctctggacgtcctgctcacaacggcatcgatttttcacctgtgctgcatttctctggataggtattacgccatctgctgccagcctttggtctataggaacaagatgacccctctgcgcatcgcattaatgctgggaggctgctgggtcatccccacgtttatttcttttctccctataatgcaaggctggaataacattggcataattgatttgatagaaaagaggaagttcaaccagaactctaactctacgtactgtgtcttcatggtcaacaagccctacgccatcacctgctctgtggtggccttctacatcccatttctcctcatggtgctggcctattaccgcatctatgtcacagctaaggagcatgcccatcagatccagatgttacaacgggcaggagcctcctccgagagcaggcctcagtcggcagaccagcatagcactcatcgcatgaggacagagaccaaagcagccaagaccctgtgcatcatcatgggttgcttctgcctctgctgggcaccattctttgtcaccaatattgtggatcctttcatagactacactgtccctgggcaggtgtggactgctttcctctggctcggctatatcaattccgggttgaacccttttctctacgccttcttgaataagtcttttagacgtgccttcctcatcatcctctgctgtgatgatgagcgctaccgaagaccttccattctgggccagactgtcccttgttcaaccacaaccattaatggatccacacatgtactaagtggctgttcccctgtctccagcttcctcctgctcttctgcaatagaccagttcctgtctaactctgaaagtgctctatttctactttaattccactgtggcctgagagcagacattgtgtaatttctattcttttacatttgttaaggtacaccgttctgcacaggggacatcatcaggaactcgagaaactgcccatacacaatgacccagaatccctggaatcatgcttctgattgaggacatggctc

SEQ ID NO: 336 - DNA, 2912 bp, Homo sapiens
  source 1..2912: mol_type = unassigned DNA
agcattcgctctccggagctgcagcctccgaaggggtggcgggggcaacagggacagaaggcaggtcccagaaagcaggttcccccaaaactggcttccctagcacggagttaaggctgcagccggctgcctagagagaagggtgggcagggagacaacgcggtgagagcgactgctctgacgcaccagcccctctcctgcacccacacgctgctggccgcccagcttctccccgatctgggagatgctcggctctgggcggccaaacagcctttccaccaaggcgaggagccctgggctcctgacagcttaggcgggccctggctgcgacacgcagcccctcgcctctgcttccttagcctctgagggcttcagacctgccgcgcttgcagccacaccatctccaacggatgctcactagcaggaaattggggccaaattcacaggcactttccagaaactcccccactggccagaggttgcaaacatccggattggctctgggcacagtggccgccttaagtcctcctgaacaccccttctgcaagtaccccagggcggtctcctgacccagagatggatttacctgtgaacctaacctccttttccctctccaccccctcccctttggagaccaaccacagcctcggcaaagacgacctgcgccccagctcgcccctgctctcggtcttcggagtgcttattctcaccttgctgggctttctggtggcggcgacgttcgcctggaacctgctggtgctggcgaccatcctccgtgtacgcaccttccaccgcgtgccccacaacctggtggcatccatggccgtctcggatgtcctggtggccgcgctggtcatgccgctgagcctggtgcacgagctgtccgggcgccgctggcagctaggtcggaggctgtgccagctttggatcgcgtgcgacgtgctttgctgcacggccagcatctggaacgtgacggccatagccctggaccgctactggtccatcacgcgccacatggaatacacgctccgcacccgcaagtgcgtctccaacgtcatgatcgcgctcacctgggcactctccgctgtcatctctctggccccgctgctttttggctggggagagacgtactctgagggcagcgaggagtgccaggtaagccgcgagccttcctacgccgtgttctccaccgtaggcgccttctacctgccgctctgtgtggtgctcttcgtgtactggaagatctacaaggctgccaagttccgcgtgggctccaggaagaccaatagcgtctcacccatatccgaagctgtggaggtgaaggactctgccaaacagccccagatggtgttcacggtccgccacgccaccgtcaccttccagccagaaggggacacgtggcgggagcagaaggagcagcgggccgccctcatggtgggcatcctcattggcgtgttcgtgctctgctggatccccttctttctcaccgagctcatcagtcccctctgctcctgtgacatccccgccatctggaaaagcatcttcctgtggcttggctactccaactccttctttaaccccctgatctatacggctttcaacaagaactacaacagcgccttcaagaacttcttttctaggcaacactgagggagaggaccaggattgaaaaaagtttcttcccataattcagtggaattcccagttcatccatttcccatccccacccaacagccatgtggacgggatgaatcctcaccattctccagggtcatcttcagaactgcactggcctcttttccacctcctcagtaggaatatgactcctcatagagttacggtgacatgatgtatctaacttatctactatccctttctctgtgctgacagtcatggtctttgcccgcaaagtgtcctttcctccccaaattcactctggcatggtgatcgacattgtcttaaagaagtcaaggcaaataagaaggaggaggtaaaacaatatgggcaggttgagattgaatagaaaagaatgaacaagtcatgatgtagacctctgagggtaggagaccatagttccaggctttctggcacagtccccatttcaaatattctctgtggtcctagtacatatatcctaatactgatggggtatgacccaagagttgaccacaaaacactgtctccaaatatattaaagtatatagtcctatccatgagagcagggaatcttagctttaaggttttgtttgtggcaaccacacacgaacatacacacacacacacacacaactatgaaagaggcaggtgttctagctagctagtttactccaaaatgcaatccgttgacatgaaacaggcactgagggtaactacttcctttcattttgaagcaacagtttataaacaggaaagtctactggtttcatagaatctgtcagatttgtttatttgctactggtttcacgcgcgtggactatattccagtgtttctagtcaaagacctttatcctcaaatcatgagattagagtaaaacaactgctgtaaggttgagcatttcatgaccaatgactatgaaggcacattcaccaaacacaggcactttaagggcatccttgattaatttgctaattgctattttttgttggtatgtgaattcctgctaggaggccgaggctagtaggcaatgaaaaagacagaacaatggtaaaatgcagccccagtcctctacaaattgacagtataatttatgaggtgaggcagttaagtgatgatgcagcatttggatgatcatgtaaaaccagtgtcattacacaaaacttaaaaaaaaatcctaggcaataaaactgcctgtggtctgctatgtctctgactcttcaaatgcatgaattaaagaatgatataataatctctg

SEQ ID NO: 337 - DNA, 1984 bp, Homo sapiens
  source 1..1984: mol_type = unassigned DNA
cccgagagcgcccattcacccccctcacccacctccccgcgttcccacttccccgcactctgacccggccggacgcccctcccctatcttgccgcccgccccctccagggggctctgctcccaccccagggagcccatccgacctctgcttgacttcccgccgcttccttcaggggcctcggctcatcgggtgcccctccccaaacttccaacccgtttgctccaggagttcctgccccatccccgagggcgcccaaatagccacactgtgtcctcctgtagtcgctgccccctgacctagcgcgacccagcgcccccgcccatgtccccccactcacctcccccggggggcgtggtgagtcgcggtctgttctcacggacggtccccgtccagcctgcgcttcgccggggccctcatctgctttcccgccaccctatcactcccttgccgtccaccctcggtcctcatggtcccagagccgggcccaaccgccaatagcaccccggcctggggggcagggccgccgtcggccccggggggcagcggctgggtggcggccgcgctgtgcgtggtcatcgcgctgacggcggcggccaactcgctgctgatcgcgctcatctgcactcagcccgcgctgcgcaacacgtccaacttcttcctggtgtcgctcttcacgtctgacctgatggtggggctggtggtgatgccgccggccatgctgaacgcgctgtacgggcgctgggtgctggcgcgcggcctctgcctgctctggaccgccttcgacgtgatgtgctgcagcgcctccatcctcaacctctgcctcatcagcctggaccgctacctgctcatcctctcgccgctgcgctacaagctgcgcatgacgcccctgcgtgccctggccctagtcctgggcgcctggagcctcgccgctctcgcctccttcctgcccctgctgctgggctggcacgagctgggccacgcacggccacccgtccctggccagtgccgcctgctggccagcctgccttttgtccttgtggcgtcgggcctcaccttcttcctgccctcgggtgccatatgcttcacctactgcaggatcctgctagctgcccgcaagcaggccgtgcaggtggcctccctcaccaccggcatggccagtcaggcctcggagacgctgcaggtgcccaggaccccacgcccaggggtggagtctgctgacagcaggcgtctagccacgaagcacagcaggaaggccctgaaggccagcctgacgctgggcatcctgctgggcatgttctttgtgacctggttgcccttctttgtggccaacatagtccaggccgtgtgcgactgcatctccccaggcctcttcgatgtcctcacatggctgggttactgtaacagcaccatgaaccccatcatctacccactcttcatgcgggacttcaagcgggcgctgggcaggttcctgccatgtccacgctgtccccgggagcgccaggccagcctggcctcgccatcactgcgcacctctcacagcggcccccggcccggccttagcctacagcaggtgctgccgctgcccctgccgccggactcagattcggactcagacgcaggctcaggcggctcctcgggcctgcggctcacggcccagctgctgcttcctggcgaggccacccaggaccccccgctgcccaccagggccgctgccgccgtcaatttcttcaacatcgaccccgcggagcccgagctgcggccgcatccacttggcatccccacgaactgacccgggcttggggctggccaatggggagctggattgagcagaacccagaccctgagtccttgggccagctcttggctaagaccaggaggctgcaagtctcctagaagccctctgagctccagaggggtgcgcagagctgaccccctgctgccatctccaggccccttacctgcagggatcatagctgactcaga

SEQ ID NO: 338 - DNA, 3028 bp, Homo sapiens
  source 1..3028: mol_type = unassigned DNA
ccatgggcagcggcacacggcggcgcgatgatggacgttaacagcagcggccgcccggacctctacgggcacctccgctctttccttctgccagaagtggggcgcgggctgcccgacttgagccccgacggtggcgccgacccggtcgcgggctcctgggcgccgcacctgctgagcgaggtgacagccagcccggcgcccacctgggacgcgcccccggacaatgcctccggctgtggggaacagatcaactacggcagagtcgagaaagttgtgatcggctccatcctgacgctcatcacgctgctgacgatcgcgggcaactgcctggtggtgatctccgtgtgcttcgtcaagaagctccgccagccctccaactacctgatcgtgtccctggcgctggccgacctctcggtggctgtggcggtcatgcccttcgtcagcgtcaccgacctcatcgggggcaagtggatctttggacactttttctgtaatgtcttcatcgccatggacgtcatgtgctgcacggcctcgatcatgaccctgtgcgtgatcagcattgacaggtaccttgggatcacaaggcccctcacataccctgtgaggcagaatgggaaatgcatggcgaagatgattctctccgtctggcttctctccgcctccatcaccttacctccactctttggatgggctcagaatgtaaatgatgataaggtgtgcttgatcagccaggactttggctatacgatttactctaccgcagtggcattttatatccccatgtccgtcatgcttttcatgtactaccagatttacaaggctgccaggaagagtgctgccaaacacaagtttcctggcttccctcgagtggagccagacagcgtcatcgccctgaatggcatagtgaagctccagaaggaggtggaagagtgtgcaaacctttcgagactcctcaagcatgaaaggaaaaacatctccatctttaagcgagaacagaaagcagccaccaccctggggatcatcgtcggggcctttaccgtgtgctggctgccatttttcctcctctcgacagccagacccttcatctgtggcacttcctgcagctgcatcccactgtgggtggagaggacatttctgtggctaggctatgcaaactctctcattaacccttttatatatgccttcttcaaccgggacctgaggaccacctatcgcagcctgctccagtgccagtaccggaatatcaaccggaagctctcagctgcaggcatgcatgaagccctgaagcttgctgagaggccagagagacctgagtttgtgctacaaaatgctgactactgtagaaaaaaaggtcatgattcatgattgaaagcagaacaatggagatgaaataaacaaggcaaaatagaggtggaaacagaaggaagtcatttgctgagtctgcagaatggaatgcagcttctgtcctttcttgggatgtctaaaacatgacaaacagggtgatctgttgtacacactatcttatgagggagatggtgacttctccttttttctgtggatcagtgctattgtgtgttctcagtttaagatagcagatcatctcagcagtaagcacaccaacagaactgagttccagaaaggaagcagtttctggtgctttgcatatgtccaaatccatgcaagtgggagaaagttccagtgcacacttcccatgcttctgagtctaggcgttgtggtgaatatgcaggaatcattcatgagacagaatgtattttgttgtatgacagaaggcttttccaagcaaactgcggtgagcgtagtgttgaatatgttgcatgtccatgttagaaaacagaatccagtcatcagctaatacaaatgatttcccagagcagtgtttgtttcaagcttctgtcaaatagtttggcttttctgcagggtctctgtgatttccccacctatgtacttttctgtgttaactcacttattatggtataactcaggaacaggtctcaggatggagagaagcatacaacatgagcaaagctttttctcgtgctctgaagggtcttgagaggggagtgggatgccttctgtgaggatttttatcgcagtgaagctcaagtggtacccaactgcgttgtaattaacatgattattggcatgtttttgactctcattttctacaaggctgcagtgggcccacccatgggctggcccataactgtatgttatgtggaagaagtgtgggaatgatgggttttccatgaaatgtgatgcttctggagatggggcataaacatgttcattcttgttgagctgcattgtgttaaaccaaattgtgtgaagcgaggtcacctggaccactcttgggaaatgcttcagaacaccagtctgttccttctagagaatttgtttttgtgttctatgtatcttaaatcaaatgtgtgcctaagcaattctgtcctctgattcccacccctacccaccaaaaaatggtagacatgaaaggcaggtgaggaaacagaaaaggtctctttgcagatatatattttttaaatggcactatgtagtaattaagagctaaggagacagaaagacagtagatgagaatagaagagtacctgtacctacaaggggaaaaatgaatgcaattctttatttgataagagtgaactgaaagagaatattattttcctacaataaagcaagctgtcctctcacaggataaagtggaattctgacatggattatggacttcttctaactcccattgacattgcttcttaccagacatggggaaaagctacctttcctgaaaggggaggagggcactgtcctttcagacaaagcttgtacaaattcctgaaccgcaaatttgctgaagtgaccgtatatattatattcataatttaaatgattatttatggtcagatacatattgttaaacttgaaaatgttttattacattacatcaaataaagtttatttgtagctgaaataaagcaacgtaagtaacaatttttaa

SEQ ID NO: 339 - DNA, 3126 bp, Homo sapiens
  source 1..3126: mol_type = unassigned DNA
ccatgggcagcggcacacggcggcgcgatgatggacgttaacagcagcggccgcccggacctctacgggcacctccgctctttccttctgccagaagtggggcgcgggctgcccgacttgagccccgacggtggcgccgacccggtcgcgggctcctgggcgccgcacctgctgagcgaggtgacagccagcccggcgcccacctgggacgcgcccccggacaatgcctccggctgtggggaacagatcaactacggcagagtcgagaaagttgtgatcggctccatcctgacgctcatcacgctgctgacgatcgcgggcaactgcctggtggtgatctccgtgtgcttcgtcaagaagctccgccagccctccaactacctgatcgtgtccctggcgctggccgacctctcggtggctgtggcggtcatgcccttcgtcagcgtcaccgacctcatcgggggcaagtggatctttggacactttttctgtaatgtcttcatcgccatggacgtcatgtgctgcacggcctcgatcatgaccctgtgcgtgatcagcattgacaggtaccttgggatcacaaggcccctcacataccctgtgaggcagaatgggaaatgcatggcgaagatgattctctccgtctggcttctctccgcctccatcaccttacctccactctttggatgggctcagaatgtaaatgatgataaggtgtgcttgatcagccaggactttggctatacgatttactctaccgcagtggcattttatatccccatgtccgtcatgcttttcatgtactaccagatttacaaggctgccaggaagagtgctgccaaacacaagtttcctggcttccctcgagtggagccagacagcgtcatcgccctgaatggcatagtgaagctccagaaggaggtggaagagtgtgcaaacctttcgagactcctcaagcatgaaaggaaaaacatctccatctttaagcgagaacagaaagcagccaccaccctggggatcatcgtcggggcctttaccgtgtgctggctgccatttttcctcctctcgacagccagacccttcatctgtggcacttcctgcagctgcatcccactgtgggtggagaggacatttctgtggctaggctatgcaaactctctcattaacccttttatatatgccttcttcaaccgggacctgaggaccacctatcgcagcctgctccagtgccagtaccggaatatcaaccggaagctctcagctgcaggcatgcatgaagccctgaagcttgctgagaggccagagagacctgagtttgtgctgagggcctgcacaaggagggtgctgttgagaccagaaaagaggccaccggtatctgtgtgggtgctacaatctccagaccatcacaattggttagcagacaaaatgctgactactgtagaaaaaaaggtcatgattcatgattgaaagcagaacaatggagatgaaataaacaaggcaaaatagaggtggaaacagaaggaagtcatttgctgagtctgcagaatggaatgcagcttctgtcctttcttgggatgtctaaaacatgacaaacagggtgatctgttgtacacactatcttatgagggagatggtgacttctccttttttctgtggatcagtgctattgtgtgttctcagtttaagatagcagatcatctcagcagtaagcacaccaacagaactgagttccagaaaggaagcagtttctggtgctttgcatatgtccaaatccatgcaagtgggagaaagttccagtgcacacttcccatgcttctgagtctaggcgttgtggtgaatatgcaggaatcattcatgagacagaatgtattttgttgtatgacagaaggcttttccaagcaaactgcggtgagcgtagtgttgaatatgttgcatgtccatgttagaaaacagaatccagtcatcagctaatacaaatgatttcccagagcagtgtttgtttcaagcttctgtcaaatagtttggcttttctgcagggtctctgtgatttccccacctatgtacttttctgtgttaactcacttattatggtataactcaggaacaggtctcaggatggagagaagcatacaacatgagcaaagctttttctcgtgctctgaagggtcttgagaggggagtgggatgccttctgtgaggatttttatcgcagtgaagctcaagtggtacccaactgcgttgtaattaacatgattattggcatgtttttgactctcattttctacaaggctgcagtgggcccacccatgggctggcccataactgtatgttatgtggaagaagtgtgggaatgatgggttttccatgaaatgtgatgcttctggagatggggcataaacatgttcattcttgttgagctgcattgtgttaaaccaaattgtgtgaagcgaggtcacctggaccactcttgggaaatgcttcagaacaccagtctgttccttctagagaatttgtttttgtgttctatgtatcttaaatcaaatgtgtgcctaagcaattctgtcctctgattcccacccctacccaccaaaaaatggtagacatgaaaggcaggtgaggaaacagaaaaggtctctttgcagatatatattttttaaatggcactatgtagtaattaagagctaaggagacagaaagacagtagatgagaatagaagagtacctgtacctacaaggggaaaaatgaatgcaattctttatttgataagagtgaactgaaagagaatattattttcctacaataaagcaagctgtcctctcacaggataaagtggaattctgacatggattatggacttcttctaactcccattgacattgcttcttaccagacatggggaaaagctacctttcctgaaaggggaggagggcactgtcctttcagacaaagcttgtacaaattcctgaaccgcaaatttgctgaagtgaccgtatatattatattcataatttaaatgattatttatggtcagatacatattgttaaacttgaaaatgttttattacattacatcaaataaagtttatttgtagctgaaataaagcaacgtaagtaacaatttttaa

SEQ ID NO: 340 - DNA, 3033 bp, Homo sapiens
  source 1..3033: mol_type = unassigned DNA
ccatgggcagcggcacacggcggcgcgatgatggacgttaacagcagcggccgcccggacctctacgggcacctccgctctttccttctgccagaagtggggcgcgggctgcccgacttgagccccgacggtggcgccgacccggtcgcgggctcctgggcgccgcacctgctgagcgaggtgacagccagcccggcgcccacctgggacgcgcccccggacaatgcctccggctgtggggaacagatcaactacggcagagtcgagaaagttgtgatcggctccatcctgacgctcatcacgctgctgacgatcgcgggcaactgcctggtggtgatctccgtgtgcttcgtcaagaagctccgccagccctccaactacctgatcgtgtccctggcgctggccgacctctcggtggctgtggcggtcatgcccttcgtcagcgtcaccgacctcatcgggggcaagtggatctttggacactttttctgtaatgtcttcatcgccatggacgtcatgtgctgcacggcctcgatcatgaccctgtgcgtgatcagcattgacaggtaccttgggatcacaaggcccctcacataccctgtgaggcagaatgggaaatgcatggcgaagatgattctctccgtctggcttctctccgcctccatcaccttacctccactctttggatgggctcagaatgtaaatgatgataaggtgtgcttgatcagccaggactttggctatacgatttactctaccgcagtggcattttatatccccatgtccgtcatgcttttcatgtactaccagatttacaaggctgccaggaagagtgctgccaaacacaagtttcctggcttccctcgagtggagccagacagcgtcatcgccctgaatggcatagtgaagctccagaaggaggtggaagagtgtgcaaacctttcgagactcctcaagcatgaaaggaaaaacatctccatctttaagcgagaacagaaagcagccaccaccctggggatcatcgtcggggcctttaccgtgtgctggctgccatttttcctcctctcgacagccagacccttcatctgtggcacttcctgcagctgcatcccactgtgggtggagaggacatttctgtggctaggctatgcaaactctctcattaacccttttatatatgccttcttcaaccgggacctgaggaccacctatcgcagcctgctccagtgccagtaccggaatatcaaccggaagctctcagctgcaggcatgcatgaagccctgaagcttgctgagaggccagagagacctgagtttgtgctgtaagacaaaatgctgactactgtagaaaaaaaggtcatgattcatgattgaaagcagaacaatggagatgaaataaacaaggcaaaatagaggtggaaacagaaggaagtcatttgctgagtctgcagaatggaatgcagcttctgtcctttcttgggatgtctaaaacatgacaaacagggtgatctgttgtacacactatcttatgagggagatggtgacttctccttttttctgtggatcagtgctattgtgtgttctcagtttaagatagcagatcatctcagcagtaagcacaccaacagaactgagttccagaaaggaagcagtttctggtgctttgcatatgtccaaatccatgcaagtgggagaaagttccagtgcacacttcccatgcttctgagtctaggcgttgtggtgaatatgcaggaatcattcatgagacagaatgtattttgttgtatgacagaaggcttttccaagcaaactgcggtgagcgtagtgttgaatatgttgcatgtccatgttagaaaacagaatccagtcatcagctaatacaaatgatttcccagagcagtgtttgtttcaagcttctgtcaaatagtttggcttttctgcagggtctctgtgatttccccacctatgtacttttctgtgttaactcacttattatggtataactcaggaacaggtctcaggatggagagaagcatacaacatgagcaaagctttttctcgtgctctgaagggtcttgagaggggagtgggatgccttctgtgaggatttttatcgcagtgaagctcaagtggtacccaactgcgttgtaattaacatgattattggcatgtttttgactctcattttctacaaggctgcagtgggcccacccatgggctggcccataactgtatgttatgtggaagaagtgtgggaatgatgggttttccatgaaatgtgatgcttctggagatggggcataaacatgttcattcttgttgagctgcattgtgttaaaccaaattgtgtgaagcgaggtcacctggaccactcttgggaaatgcttcagaacaccagtctgttccttctagagaatttgtttttgtgttctatgtatcttaaatcaaatgtgtgcctaagcaattctgtcctctgattcccacccctacccaccaaaaaatggtagacatgaaaggcaggtgaggaaacagaaaaggtctctttgcagatatatattttttaaatggcactatgtagtaattaagagctaaggagacagaaagacagtagatgagaatagaagagtacctgtacctacaaggggaaaaatgaatgcaattctttatttgataagagtgaactgaaagagaatattattttcctacaataaagcaagctgtcctctcacaggataaagtggaattctgacatggattatggacttcttctaactcccattgacattgcttcttaccagacatggggaaaagctacctttcctgaaaggggaggagggcactgtcctttcagacaaagcttgtacaaattcctgaaccgcaaatttgctgaagtgaccgtatatattatattcataatttaaatgattatttatggtcagatacatattgttaaacttgaaaatgttttattacattacatcaaataaagtttatttgtagctgaaataaagcaacgtaagtaacaatttttaa

SEQ ID NO: 341 - DNA, 1455 bp, Homo sapiens
  source 1..1455: mol_type = unassigned DNA
atgatggacgttaacagcagcggccgcccggacctctacgggcacctccgctctttccttctgccagaagtggggcgcgggctgcccgacttgagccccgacggtggcgccgacccggtcgcgggctcctgggcgccgcacctgctgagcgaggtgacagccagcccggcgcccacctgggacgcgcccccggacaatgcctccggctgtggggaacagatcaactacggcagagtcgagaaagttgtgatcggctccatcctgacgctcatcacgctgctgacgatcgcgggcaactgcctggtggtgatctccgtgtgcttcgtcaagaagctccgccagccctccaactacctgatcgtgtccctggcgctggccgacctctcggtggctgtggcggtcatgcccttcgtcagcgtcaccgacctcatcgggggcaagtggatctttggacactttttctgtaatgtcttcatcgccatggacgtcatgtgctgcacggcctcgatcatgaccctgtgcgtgatcagcattgacaggtaccttgggatcacaaggcccctcacataccctgtgaggcagaatgggaaatgcatggcgaagatgattctctccgtctggcttctctccgcctccatcaccttacctccactctttggatgggctcagaatgtaaatgatgataaggtgtgcttgatcagccaggactttggctatacgatttactctaccgcagtggcattttatatccccatgtccgtcatgcttttcatgtactaccagatttacaaggctgccaggaagagtgctgccaaacacaagtttcctggcttccctcgagtggagccagacagcgtcatcgccctgaatggcatagtgaagctccagaaggaggtggaagagtgtgcaaacctttcgagactcctcaagcatgaaaggaaaaacatctccatctttaagcgagaacagaaagcagccaccaccctggggatcatcgtcggggcctttaccgtgtgctggctgccatttttcctcctctcgacagccagacccttcatctgtggcacttcctgcagctgcatcccactgtgggtggagaggacatttctgtggctaggctatgcaaactctctcattaacccttttatatatgccttcttcaaccgggacctgaggaccacctatcgcagcctgctccagtgccagtaccggaatatcaaccggaagctctcagctgcaggcatgcatgaagccctgaagcttgctgagaggccagagagacctgagtttgtgctcataaccagaacctcaggagttcatcaggcactcgaaaattttccctggggtaatgaagtgaatagatggaggaaaagctgtgaatacttttgcactgacaaaatgctgactactgtagaaaaaaaggtcatgattcatgattgaaagcagaacaatgga

SEQ ID NO: 342 - DNA, 5234 bp, Homo sapiens
  source 1..5234: mol_type = unassigned DNA
ggcatgctagatggtccaagtgcaatgaccagattttgcaacttaattgcttccgagccagacatcgcaaaggtacctttgtgcatcgactcctccaattttgctgtgattgaagctgggttaaagtgctgccaagggaagtgcattgtcaatagcattagtctgaaggaaggagaggcaacagaaacagacacaaaaatcagagtgtgcacccgggcctaccatctgcttgtgaaaaaactgggctttaatccaaatgacattatttttgaccctaatatcctaaccattgggactggaatggaggaacacaacttgtatgccattaattttatccatgcaacaaaagtcattaaagaaacattacctggagccagaataagtggaggtctttccaacttgtccttctccttccgaggaatggaagccattcgagaagcaatgcatggggttttcctttaccatgcaatcaagtctggcatggacatggggatagtgaatgctggaaacctccctgtgtatgatgatatccataaggaacttctgcagctctgtgaagatctcatctggaataaagaccctgaggccactgagaagctcttacgttatgcccagactcaaggcacaggagggaagaaagtcattcagactgatgagtggagaaatggccctgtcgaagaacgccttgagtatgcccttgtgaagggcattgaaaaacatattattgaggatactgaggaagccaggttaaaccaaaaaaaatatccccgacctctcaatataattgaaggacccctgatgaatggaatgaaaattgttggtgatctttttggagctggaaaaatgtttctacctcaggttataaagtcagcccgggttatgaagaaggctgttggccaccttatccctttcatggaaaaagaaagagaagaaaccagagtgcttaacggcacagtagaagaagaggacccttaccagggcaccatcgtgctggccactgttaaaggcgacgtgcacgacataggcaagaacatagttggagtagtccttggctgcaataatttccgagttattgatttaggagtcatgactccatgtgataagatactgaaagctgctcttgaccacaaagcagatataattggcctgtcaggactcatcactccttccctggatgaaatgatttttgttgccaaggaaatggagagattagctataaggattccattgttgattggaggagcaaccacttcaaaaacccacacagcagttaaaatagctccgagatacagtgcacctgtaatccatgtcctggacgcgtccaagagtgtggtggtgtgttcccagctgttagatgaaaatctaaaggatgaatactttgaggaaatcatggaagaatatgaagatattagacaggaccattatgagtctctcaaggagaggagatacttacccttaagtcaagccagaaaaagtggtttccaaatggattggctgtctgaacctcacccagtgaagcccacgtttattgggacccaggtctttgaagactatgacctgcagaagctggtggactacattgactggaagcctttctttgatgtctggcagctccggggcaagtacccgaatcgaggctttcccaagatatttaacgacaaaacagtaggtggagaggccaggaaggtctacgatgatgcccacaatatgctgaacacactgattagtcaaaagaaactccgggcccggggtgtggttgggttctggccagcacagagtatccaagacgacattcacctgtacgcagaggctgctgtgccccaggctgcagagcccatagccaccttctatgggttaaggcaacaggctgagaaggactctgccagcacggagccatactactgcctctcagacttcatcgctcccttgcattctggcatccgtgactacctgggcctgtttgccgttgcctgctttggggtagaagagctgagcaaggcctatgaggatgatggtgacgactacagcagcatcatggtcaaggcgctgggggaccggctggcagaggcctttgcagaagagctccatgaaagagttcgccgagaactgtgggcctactgtggcagtgagcagctggacgtcgcagacctgcgcaggctgcggtacaagggcatccgcccggctcctggctaccccagccagcccgaccacaccgagaagctcaccatgtggagactcgcagacatcgagcagtctacaggcattaggttaacagaatcattagcaatggcacctgcttcagcagtctcaggcctctacttctccaatttgaagtccaaatattttgctgtggggaagatttccaaggatcaggttgaggattatgcattgaggaagaacatatctgtggctgaggttgagaaatggcttggacccattttgggatatgatacagactaactttttttttttttttgccttttttattcttgatgatcctcaaggaaatacaacctagggtgccttaaaaataacaacaacaaaaaacctgtgtgcatctggctgacacttacctgcttctggttttcgaagactatttagtggaaccttgtagaggagcagggtcttcctgcagtgcctggaaaacaggcgctgtttttttgggaccttgcgtgaagagcagtgagcagggttcctgtggtttccctggtccctctgagatggggacagactgaagacagaggtcgtttgatttcaaagcaagtcaacctgcttttttctgtttttacagtggaatctaggaggccacttagtcgtctttttttcctcttagaagaaaagcctgaaactgagttgaatagagaagtgtgaccctgtgacaaaatgatactgtgagaaatggggcattttaatctaagtggttataacagtggattctgacggggaaggtgtagctctgttctcttcggaagacctcgttttctaaaggctggactaaatggctgcagaactccctttggcaaaaggcatgcgctcactgcttgcttgtcagaaacactgaagccatttgccccagtgtggtcaagcagccatgctttctgggcattttcgtcctcccataatttcatatttccgtacccctgaggaaacaaaaaggaaatgaggagagaaagttactgttaagggtggttaacattttttttgttttgttttgttttggtttttttttttttgagacagagtctggctctgtcgcccaggctggagtgcaggggcgcaatctcggctcatagcaagctccgcctcctgggttcatgccattctcctgcctcagcctccagagtagctgggactacaggtgcccgccaccacacccggctaattttttgtgtttttacaaaatacaaaaaagtagagacaggatttcactgtgttagccaggatggtcttgatctcccgacctcgtgatctgcccacctcagcctcccaaaatgctgggattacaggcgtgagccaccgagcctggccggttaacatcttttaattgtttccaggattgagcaggttctcagctgggctctgatatcccgtgcggagttggacaagtgggcagcataaagtcactcatttcttaccattttattcccctcaattctcaatatattcagtaatgaagaatggtgccaccactcaagcaacaagcctcaaactcaaccatgtcatctttttcttggatgattgcagttatttcaaaaatttgcatgcaaaatatacactcatcctacttcaagatggtggtggcaatagtcaggagaaggtaacattggagtcctggtttgattcgaaggatgaagacgaagaagcaagggaggaacaaatgaagaaccatctttgttcatgaataggaatattcaagattataaaggtatcaggtctcctaaaattgatctatggatttaataccattttcaatggaaattccaacagattttattgaatgaaacaagcaggtgtttatatggagtagcaaaggacttaaaattaccaaatgcttctaaatatgaaggagaggttggggacacgcaccctatgtgataccaagttttattgtcaagacagtgtcatggtgcagaggtaggcattctgagcaggggaacaaaataagggcctagaaactcacccgtgcatatgttgacctttgcaaaatgacctggtgacatggcaagtcagtggggacaggaaggaccactccctaagtaatcccagaacaatggctattcatgtgggaaaaaaagaaattttactttctctcaccttacctggtgataagttccaaatatgttaagggctttaatacaaaaagcaaaaattgtcagtgtttggatgaaaaaagccttagggcaggaaagaatctcttgagacataaagtagtaatcataaaggacaagatggttaagtcaattctgttaaaactcaaggcttatattaagcaaacacttgaagtgagaagatgatccacaacttgagaagacatttataatacaaataactgatgaaggattcataatcacaaatatagagaattcctatttaaaaaaatagaaaaatagtgaagactacacaagaggaaatagggcttttaaataaatagatgttctgtagcattggtcagggaaatatgaattaggaccacaatgagattccattttatatccataagatttgcaaaggttgggtctgacagtaccagttgttagatctgtagggacttgtacaacattgtggatgtgtaaacaggcaccactgctttaaaaaacaattatcccttacagacttgaacatttgcagacgttatgatcttgcttccaactcccacctgtatgtccagcaaactcttgcatgtggccactaggaggaatgtgtaagaatgttcatagttacatatttataatagttaataactggaaaaagtgaaatgtatgtctgtctacaggaaaataggtgaataattagatatatatattcattctacgggatattattcagtagtggaaatgagtgaactacagctatacctcacaataagaatgaatctcagaaaatattaaggaaaaaagcaagtttgaagagaccacatggggcgtactatttttattgagcccaaaaacaagcaaaaccaaagaatatgtagtctaagcatacgtatacaataaaactatgctattaaaaaaaaa

SEQ ID NO: 343 - DNA, 10529 bp, Homo sapiens
  source 1..10529: mol_type = unassigned DNA
aaaggttctaaatgtctgcggggctcagagccggatgtcacgtcgtcctcctctgccggttttctcttgggtccttttccgtgccgtcccgcgactccgcctctggccgcgcgtgtctggctgctaggccgacaccaaggactggccgggtacccgggaagaaagcacgtgctccagcagttgccgcgcccagccccgagagaggccctagggcgctgcgggctttcggggtccgcagtccccccgcgacgcgagccaacgggaggcgtcaaaagacccgggccttgtgtggcaggctcgcctggcgctggctggcgtggcccttggccgtcgtcacctgtggagagcacgtcttctctgccgcgccctctgcgcaaggaggagactcgacaacatgtcacccgcgctccaagacctgtcgcaacccgaaggtctgaagaaaaccctgcgggatgagatcaatgccattctgcagaagaggattatggtgctggatggagggatggggaccatgatccagcgggagaagctaaacgaagaacacttccgaggtcaggaatttaaagatcatgccaggccgctgaaaggcaacaatgacattttaagtataactcagcctgatgtcatttaccaaatccataaggaatacttgctggctggggcagatatcattgaaacaaatacttttagcagcactagtattgcccaagctgactatggccttgaacacttggcctaccggatgaacatgtgctctgcaggagtggccagaaaagctgccgaggaggtaactctccagacaggaattaagaggtttgtggcaggggctctgggtccgactaataagacactctctgtgtccccatctgtggaaaggccggattataggaacatcacatttgatgagcttgttgaagcataccaagagcaggccaaaggacttctggatggcggggttgatatcttactcattgaaactatttttgatactgccaatgccaaggcagccttgtttgcactccaaaatctttttgaggagaaatatgctccccggcctatctttatttcagggacgatcgttgataaaagtgggcggactctttccggacagacaggagagggatttgtcatcagcgtgtctcatggagaaccactctgcattggattaaattgtgctttgggtgcagctgaaatgagaccttttattgaaataattggaaaatgtacaacagcctatgtcctctgttatcccaatgcaggtcttcccaacacctttggtgactatgatgaaacgccttctatgatggccaagcacctaaaggattttgctatggatggcttggtcaatatagttggaggatgctgtgggtcaacaccagatcatatcagggaaattgctgaagctgtgaaaaattgtaagcctagagttccacctgccactgcttttgaaggacatatgttactgtctggtctagagcccttcaggattggaccgtacaccaactttgttaacattggagagcgctgtaatgttgcaggatcaaggaagtttgctaaactcatcatggcaggaaactatgaagaagccttgtgtgttgccaaagtgcaggtggaaatgggagcccaggtgttggatgtcaacatggatgatggcatgctagatggtccaagtgcaatgaccagattttgcaacttaattgcttccgagccagacatcgcaaaggtacctttgtgcatcgactcctccaattttgctgtgattgaagctgggttaaagtgctgccaagggaagtgcattgtcaatagcattagtctgaaggaaggagaggacgacttcttggagaaggccaggaagattaaaaagtatggagctgctatggtggtcatggcttttgatgaagaaggacaggcaacagaaacagacacaaaaatcagagtgtgcacccgggcctaccatctgcttgtgaaaaaactgggctttaatccaaatgacattatttttgaccctaatatcctaaccattgggactggaatggaggaacacaacttgtatgccattaattttatccatgcaacaaaagtcattaaagaaacattacctggagccagaataagtggaggtctttccaacttgtccttctccttccgaggaatggaagccattcgagaagcaatgcatggggttttcctttaccatgcaatcaagtctggcatggacatggggatagtgaatgctggaaacctccctgtgtatgatgatatccataaggaacttctgcagctctgtgaagatctcatctggaataaagaccctgaggccactgagaagctcttacgttatgcccagactcaaggcacaggagggaagaaagtcattcagactgatgagtggagaaatggccctgtcgaagaacgccttgagtatgcccttgtgaagggcattgaaaaacatattattgaggatactgaggaagccaggttaaaccaaaaaaaatatccccgacctctcaatataattgaaggacccctgatgaatggaatgaaaattgttggtgatctttttggagctggaaaaatgtttctacctcaggttataaagtcagcccgggttatgaagaaggctgttggccaccttatccctttcatggaaaaagaaagagaagaaaccagagtgcttaacggcacagtagaagaagaggacccttaccagggcaccatcgtgctggccactgttaaaggcgacgtgcacgacataggcaagaacatagttggagtagtccttggctgcaataatttccgagttattgatttaggagtcatgactccatgtgataagatactgaaagctgctcttgaccacaaagcagatataattggcctgtcaggactcatcactccttccctggatgaaatgatttttgttgccaaggaaatggagagattagctataaggattccattgttgattggaggagcaaccacttcaaaaacccacacagcagttaaaatagctccgagatacagtgcacctgtaatccatgtcctggacgcgtccaagagtgtggtggtgtgttcccagctgttagatgaaaatctaaaggatgaatactttgaggaaatcatggaagaatatgaagatattagacaggaccattatgagtctctcaaggagaggagatacttacccttaagtcaagccagaaaaagtggtttccaaatggattggctgtctgaacctcacccagtgaagcccacgtttattgggacccaggtctttgaagactatgacctgcagaagctggtggactacattgactggaagcctttctttgatgtctggcagctccggggcaagtacccgaatcgaggctttcccaagatatttaacgacaaaacagtaggtggagaggccaggaaggtctacgatgatgcccacaatatgctgaacacactgattagtcaaaagaaactccgggcccggggtgtggttgggttctggccagcacagagtatccaagacgacattcacctgtacgcagaggctgctgtgccccaggctgcagagcccatagccaccttctatgggttaaggcaacaggctgagaaggactctgccagcacggagccatactactgcctctcagacttcatcgctcccttgcattctggcatccgtgactacctgggcctgtttgccgttgcctgctttggggtagaagagctgagcaaggcctatgaggatgatggtgacgactacagcagcatcatggtcaaggcgctgggggaccggctggcagaggcctttgcagaagagctccatgaaagagttcgccgagaactgtgggcctactgtggcagtgagcagctggacgtcgcagacctgcgcaggctgcggtacaagggcatccgcccggctcctggctaccccagccagcccgaccacaccgagaagctcaccatgtggagactcgcagacatcgagcagtctacaggcattaggttaacagaatcattagcaatggcacctgcttcagcagtctcaggcctctacttctccaatttgaagtccaaatattttgctgtggggaagatttccaaggatcaggttgaggattatgcattgaggaagaacatatctgtggctgaggttgagaaatggcttggacccattttgggatatgatacagactaactttttttttttttttgccttttttattcttgatgatcctcaaggaaatacaacctagggtgccttaaaaataacaacaacaaaaaacctgtgtgcatctggctgacacttacctgcttctggttttcgaagactatttagtggaaccttgtagaggagcagggtcttcctgcagtgcctggaaaacaggcgctgtttttttgggaccttgcgtgaagagcagtgagcagggttcctgtggtttccctggtccctctgagatggggacagactgaagacagaggtcgtttgatttcaaagcaagtcaacctgcttttttctgtttttacagtggaatctaggaggccacttagtcgtctttttttcctcttagaagaaaagcctgaaactgagttgaatagagaagtgtgaccctgtgacaaaatgatactgtgagaaatggggcattttaatctaagtggttataacagtggattctgacggggaaggtgtagctctgttctcttcggaagacctcgttttctaaaggctggactaaatggctgcagaactccctttggcaaaaggcatgcgctcactgcttgcttgtcagaaacactgaagccatttgccccagtgtggtcaagcagccatgctttctgggcattttcgtcctcccataatttcatatttccgtacccctgaggaaacaaaaaggaaatgaggagagaaagttactgttaagggtggttaacattttttttgttttgttttgttttggtttttttttttttgagacagagtctggctctgtcgcccaggctggagtgcaggggcgcaatctcggctcatagcaagctccgcctcctgggttcatgccattctcctgcctcagcctccagagtagctgggactacaggtgcccgccaccacacccggctaattttttgtgtttttacaaaatacaaaaaagtagagacaggatttcactgtgttagccaggatggtcttgatctcccgacctcgtgatctgcccacctcagcctcccaaaatgctgggattacaggcgtgagccaccgagcctggccggttaacatcttttaattgtttccaggattgagcaggttctcagctgggctctgatatcccgtgcggagttggacaagtgggcagcataaagtcactcatttcttaccattttattcccctcaattctcaatatattcagtaatgaagaatggtgccaccactcaagcaacaagcctcaaactcaaccatgtcatctttttcttggatgattgcagttatttcaaaaatttgcatgcaaaatatacactcatcctacttcaagatggtggtggcaatagtcaggagaaggtaacattggagtcctggtttgattcgaaggatgaagacgaagaagcaagggaggaacaaatgaagaaccatctttgttcatgaataggaatattcaagattataaaggtatcaggtctcctaaaattgatctatggatttaataccattttcaatggaaattccaacagattttattgaatgaaacaagcaggtgtttatatggagtagcaaaggacttaaaattaccaaatgcttctaaatatgaaggagaggttggggacacgcaccctatgtgataccaagttttattgtcaagacagtgtcatggtgcagaggtaggcattctgagcaggggaacaaaataagggcctagaaactcacccgtgcatatgttgacctttgcaaaatgacctggtgacatggcaagtcagtggggacaggaaggaccactccctaagtaatcccagaacaatggctattcatgtgggaaaaaaagaaattttactttctctcaccttacctggtgataagttccaaatatgttaagggctttaatacaaaaagcaaaaattgtcagtgtttggatgaaaaaagccttagggcaggaaagaatctcttgagacataaagtagtaatcataaaggacaagatggttaagtcaattctgttaaaactcaaggcttatattaagcaaacacttgaagtgagaagatgatccacaacttgagaagacatttataatacaaataactgatgaaggattcataatcacaaatatagagaattcctatttaaaaaaatagaaaaatagtgaagactacacaagaggaaatagggcttttaaataaatagatgttctgtagcattggtcagggaaatatgaattaggaccacaatgagattccattttatatccataagatttgcaaaggttgggtctgacagtaccagttgttagatctgtagggacttgtacaacattgtggatgtgtaaacaggcaccactgctttaaaaaacaattatcccttacagacttgaacatttgcagacgttatgatcttgcttccaactcccacctgtatgtccagcaaactcttgcatgtggccactaggaggaatgtgtaagaatgttcatagttacatatttataatagttaataactggaaaaagtgaaatgtatgtctgtctacaggaaaataggtgaataattagatatatatattcattctacgggatattattcagtagtggaaatgagtgaactacagctatacctcacaataagaatgaatctcagaaaatattaaggaaaaaagcaagtttgaagagaccacatggggcgtactatttttattgagcccaaaaacaagcaaaaccaaagaatatgtagtctaagcatacgtatacaataaaactatgctattaaaaaaaaagaaggtaactgataaaccaaaattgagcatagtaattacccacagaaggaggaagtggaagggacaggagcacataggtagatgccaagttatgcagctgttctggttcctcctggtaggcttacaagtgtttactatatgctattaatacattatactttataactaatagataacagttttttacatattaaatatgttctacttaaatatattataaaaaataaaggcaaagtggaatgataacctaaaatctggtatggtgattttgtaggtaatgtttgtatatgtcaaatacagtttttaaggaaaggaagaacatcttagggtaaacagcagctagaaaggtgaggggcaggagagtggtgcatccttgctgctgccagcagtgcccagataccaggctttggggaatgagtggatggctggaccatttgctaagacagaggccaggggatgggagaaatgatgagttttggaaagattcgatgtgactagactgaatataggcagttggatactagactttggaatttaaaaagaatgtctggagttagaattgagagacttgaacgtggagatggaggtcaggctgcagtgcgatgggatcatctatggagcatatgaggagaagagaatctggaggaggaggagggggagccagcaggggagcagctgtgggttggaggaagccaggagggagagtgcaatgccgagaaagcaatgaagagcgtttcgaagcatgccagcagaacccaatgctgcaaagaggcctgggaatgggattgctgagggcccttctcacagtgagcccctcaagagcagcgtcaggggattgtggggactgttggcacacagctggctttgctaggttgaagacaatgggaggtgtggaagacttgttgactcatttaaagaagattggagggaaaggtaggattgagagtgtttcagacagaaaaaggattatatgctgagggtaaagcacaagtacagagggttgcagatagtgcagaagtctttaaaaacaattattttaacccaacttccagggagactgaatttcttctgccagtcagtaacaccatcaacctgggagttgcccctgacccctccagtcttagctcctgctcctgtaacaaaataccacaaactggttagcttatagagaacagatgtttatttcttacagttcaggagtctggaagtccaagatcatggtgccatcatggccgagttctggtgagggccctcttctgggatgcagcggccagcttctcatgttctcacagtgggtggagggtaagcttgctctctggcctcctcttaaaaaggcactaatcccattcatgagggctccaccttcatgacctaattacctcccaaagatgccatctccaaacaccatcattctggggattccatttcaacatgatttgggggatacatcagaccataacacttttctttttctcaaccttcacatccagttggttctcaagccctggcgattttacgcgctagataggtcttaagttcatctctacgcctgccctggttaaggttctcatcatttctcctctggattcatctgcaacacaggctgccgggttggttcccacctcctagagctggaagagtgggctctctgattctttacacccccgcctcaatcctcctgctgcctgaataaccatctccccgtgacctaggatatatcccagccccttagaggcatgcaaagccttccatgtctgaccctgcctcatgtcttggaagccctagactgctgctgtaccctgaaggaggtacctgctcacattggcccctctgtctggaataaccccaccccggttccacccaagtcaggaaagcttcccaacccctccctcccaccaccccaaagctaagtgaagtgacccctcttcttgcctctgtaacaccgccatgcacatttcatacagcccttgctgaaacttcatctagttctctgttagacttaacattccctaagggcaggtttggaaccttactcatctttatatggcgtctaaaatagtgcttgctttatgataggtgctcagtaaaggttgtcttgaattgagcagatcctctagggacaggagttggatggagagcagactgtaaagcctcatgagggcaggggccctgcctcttcctgagctcaggatacccagagcctagctcagtgcctgccatgaaattgttcactccatcaagccttgttaaatgagttcggggcggggggagcatgatggttttctctctctcagaaagaaagcgctgtatcaaagccctagcaccctctctacacccaccttcagtatttcatattagatgcggcccaagtgatactttctttaccgtcccgtgaagacagcatattggcagccctgcaaaaacaaaacaaaacaaaaccctcagttcatggcatacttgctataaatcagctatgtgtattgtcaaattgtagaactgaaagtatattctgattcggtgtgtgtataaggaaatatacaccagtatatgcattaaaacgtcaagaagagctgggcacagtgtcacatgcctgtaaacccagctattcaggaggctgaggtgggaggatcggttgaggccaggagtttgaggctgcagtgagctatgattgcacagctgcactccagcctgtgctgagacctcatctcttaaaaaataaaaaataaaaagtctaagaggatacacagaaatttttaagtggttacctccacggaatgggattaggggatcagaggtgagggaactcatggtttggctatttctcgttctttctgcactgtttcaaatttttacaagtgtatgttattgtacttttaaaaagattagcttggcaacaagtctagcctgaaatgggtgctattttgactagtctgagtgaaaagtgaggatttaaatgaagtaacccctaaactcagccagtcccatgtttttttaacacttggaatatctaattccatttacactgcattcttcaaatgtaattttcaaagatgccttttgcctcatcccttgcttttaagtattattatagacttttggagactcacgaaacaagcaatccctaaattctcgcccaggaaagtatcttggattaaatggtttttgagaaccttgagagtgtatattctatgaaatggaagaaacaagaactagacagagtcacaaatgctgttgatcacagacaatctctgccatccataaggtaaatgtaatacatctggcgacctgctgagtgtgaacttgcagcaggtgaggaaggaactctgaactctcacaatcttgtttcttcatttcccagagagaaactcggcaaagagaaaaaggacatttccctccaggttatctgaaagaatttcaatgcttacctttaatcatgtgacattgtttatcttggattaaaagaaaagaaaatgtatttattttgtgcatattttcaataaaatatataaaatcgagttggtatatagtgccaaataccattaattaaaaatattttaacctga

SEQ ID NO: 344 - DNA, 3780 bp, Homo sapiens
  source 1..3780: mol_type = unassigned DNA
agattgagcgcagaactaaccgcgctctgaaaggttctaaatgtctgcggggctcagagccggatgtcacgtcgtcctcctctgccggttttctcttgggtccttttccgtgccgtcccgcgactccgcctctggccgcgcgtgtctggctgctaggccgacaccaaggactggccgggtacccgggaagaaagcacgtgctccagcagttgccgcgcccagccccgagagaggccctagggcgctgcgggctttcggggtccgcagtccccccgcgacgcgagccaacgggaggcgtcaaaagacccgggccttgtgtggcaggctcgcctggcgctggctggcgtggcccttggccgtcgtcacctgtggagagcacgtcttctctgccgcgccctctgcgcaaggaggagactcgacaacatgtcacccgcgctccaagacctgtcgcaacccgaaggtctgaagaaaaccctgcgggatgagatcaatgccattctgcagaagaggattatggtgctggatggagggatggggaccatgatccagcgggagaagctaaacgaagaacacttccgaggtcaggaatttaaagatcatgccaggccgctgaaaggcaacaatgacattttaagtataactcagcctgatgtcatttaccaaatccataaggaatacttgctggctggggcagatatcattgaaacaaatacttttagcagcactagtattgcccaagctgactatggccttgaacacttggcctaccggatgaacatgtgctctgcaggagtggccagaaaagctgccgaggaggtaactctccagacaggaattaagaggtttgtggcaggggctctgggtccgactaataagacactctctgtgtccccatctgtggaaaggccggattataggaacatcacatttgatgagcttgttgaagcataccaagagcaggccaaaggacttctggatggcggggttgatatcttactcattgaaactatttttgatactgccaatgccaaggcagccttgtttgcactccaaaatctttttgaggagaaatatgctccccggcctatctttatttcagggacgatcgttgataaaagtgggcggactctttccggacagacaggagagggatttgtcatcagcgtgtctcatggagaaccactctgcattggattaaattgtgctttgggtgcagctgaaatgagaccttttattgaaataattggaaaatgtacaacagcctatgtcctctgttatcccaatgcaggtcttcccaacacctttggtgactatgatgaaacgccttctatgatggccaagcacctaaaggattttgctatggatggcttggtcaatatagttggaggatgctgtgggtcaacaccagatcatatcagggaaattgctgaagctgtgaaaaattgtaagcctagagttccacctgccactgcttttgaaggacatatgttactgtctggtctagagcccttcaggattggaccgtacaccaactttgttaacattggagagcgctgtaatgttgcaggatcaaggaagtttgctaaactcatcatggcaggaaactatgaagaagccttgtgtgttgccaaagtgcaggtggaaatgggagcccaggtgttggatgtcaacatggatgatggcatgctagatggtccaagtgcaatgaccagattttgcaacttaattgcttccgagccagacatcgcaaaggtacctttgtgcatcgactcctccaattttgctgtgattgaagctgggttaaagtgctgccaagggaagtgcattgtcaatagcattagtctgaaggaaggagaggacgacttcttggagaaggccaggaagattaaaaagtatggagctgctatggtggtcatggcttttgatgaagaaggacagactcaaggcacaggagggaagaaagtcattcagactgatgagtggagaaatggccctgtcgaagaacgccttgagtatgcccttgtgaagggcattgaaaaacatattattgaggatactgaggaagccaggttaaaccaaaaaaaatatccccgacctctcaatataattgaaggacccctgatgaatggaatgaaaattgttggtgatctttttggagctggaaaaatgtttctacctcaggttataaagtcagcccgggttatgaagaaggctgttggccaccttatccctttcatggaaaaagaaagagaagaaaccagagtgcttaacggcacagtagaagaagaggacccttaccagggcaccatcgtgctggccactgttaaaggcgacgtgcacgacataggcaagaacatagttggagtagtccttggctgcaataatttccgagttattgatttaggagtcatgactccatgtgataagatactgaaagctgctcttgaccacaaagcagatataattggcctgtcaggactcatcactccttccctggatgaaatgatttttgttgccaaggaaatggagagattagctataaggattccattgttgattggaggagcaaccacttcaaaaacccacacagcagttaaaatagctccgagatacagtgcacctgtaatccatgtcctggacgcgtccaagagtgtggtggtgtgttcccagctgttagatgaaaatctaaaggatgaatactttgaggaaatcatggaagaatatgaagatattagacaggaccattatgagtctctcaaggagaggagatacttacccttaagtcaagccagaaaaagtggtttccaaatggattggctgtctgaacctcacccagtgaagcccacgtttattgggacccaggtctttgaagactatgacctgcagaagctggtggactacattgactggaagcctttctttgatgtctggcagctccggggcaagtacccgaatcgaggctttcccaagatatttaacgacaaaacagtaggtggagaggccaggaaggtctacgatgatgcccacaatatgctgaacacactgattagtcaaaagaaactccgggcccggggtgtggttgggttctggccagcacagagtatccaagacgacattcacctgtacgcagaggctgctgtgccccaggctgcagagcccatagccaccttctatgggttaaggcaacaggctgagaaggactctgccagcacggagccatactactgcctctcagacttcatcgctcccttgcattctggcatccgtgactacctgggcctgtttgccgttgcctgctttggggtagaagagctgagcaaggcctatgaggatgatggtgacgactacagcagcatcatggtcaaggcgctgggggaccggctggcagaggcctttgcagaagagctccatgaaagagttcgccgagaactgtgggcctactgtggcagtgagcagctggacgtcgcagacctgcgcaggctgcggtacaagggcatccgcccggctcctggctaccccagccagcccgaccacaccgagaagctcaccatgtggagactcgcagacatcgagcagtctacaggcattaggttaacagaatcattagcaatggcacctgcttcagcagtctcaggcctctacttctccaatttgaagtccaaatattttgctgtggggaagatttccaaggatcaggttgaggattatgcattgaggaagaacatatctgtggctgaggttgagaaatgtatgtctgtctacaggaaaataggtgaataa

SEQ ID NO: 345 - DNA, 998 bp, Homo sapiens
  source 1..998: mol_type = unassigned DNA
aggttctaaatgtctgcggggctcagagccggatgtcacgtcgtcctcctctgccggttttctcttgggtccttttccgtgccgtcccgcgactccgcctctggccgcgcgtgtctggctgctaggccgacaccaaggactggccgggtacccgggaagaaagcacgtgctccagcagttgccgcgcccagccccgagagaggccctagggcgctgcgggctttcggggtccgcagtccccccgcgacgcgagccaacgggaggcgtcaaaagacccgggccttgtgtggcaggctcgcctggcgctggctggcgtggcccttggccgtcgtcacctgtggagagcacgtcttctctgccgcgccctctgcgcaaggaggagactcgacaacatgtcacccgcgctccaagacctgtcgcaacccggaatacttgctggctggggcagatatcattgaaacaaatacttttagcagcactagtattgcccaagctgactatggccttgaacacttggcctaccggatgaacatgtgctctgcaggagtggccagaaaagctgccgaggaggtaactctccagacaggaattaagaggtttgtggcaggggctctgggtccgactaataagacactctctgtgtccccatctgtggaaaggccggattataggaacatcaacctgccagtggggagctaacttacccttgctcttgggctgtacaaggtgaagtacgcatttgatgagcttgttgaagcataccaagagcaggccaaaggacttctggatggcggggttgatatcttactcattgaaactatttttgatactgccaatgccaaggcagccttgtttgcactccaaaatctttttgaggagaaatatgctccccggcctatctttatttcagggacgatcgttgataaaagtgggcggactctttccggacagacaggagagggatttgtcatcagcgtgtctcatggagaaccactctg

SEQ ID NO: 346 - DNA, 4157 bp, Homo sapiens
  source 1..4157: mol_type = unassigned DNA
cgcaaggaggagactcgacaacatgtcacccgcgctccaagacctgtcgcaacccgaaggtctgaagaaaaccctgcgggatgagatcaatgccattctgcagaagaggattatggtgctggatggagggatggggaccatgatccagcgggagaagctaaacgaagaacacttccgaggtcaggaatttaaagatcatgccaggccgctgaaaggcaacaatgacattttaagtataactcagcctgatgtcatttaccaaatccataaggaatacttgctggctggggcagatatcattgaaacaaatacttttagcagcactagtattgcccaagctgactatggccttgaacacttggcctaccggatgaacatgtgctctgcaggagtggccagaaaagctgccgaggaggtaactctccagacaggaattaagaggtttgtggcaggggctctgggtccgactaataagacactctctgtgtccccatctgtggaaaggccggattataggaacatcacatttgatgagcttgttgaagcataccaagagcaggccaaaggacttctggatggcggggttgatatcttactcattgaaactatttttgatactgccaatgccaaggcagccttgtttgcactccaaaatctttttgaggagaaatatgctccccggcctatctttatttcagggacgatcgttgataaaagtgggcggactctttccggacagacaggagagggatttgtcatcagcgtgtctcatggagaaccactctgcattggattaaattgtgctttgggtgcagctgaaatgagaccttttattgaaataattggaaaatgtacaacagcctatgtcctctgttatcccaatgcaggtcttcccaacacctttggtgactatgatgaaacgccttctatgatggccaagcacctaaaggattttgctatggatggcttggtcaatatagttggaggatgctgtgggtcaacaccagatcatatcagggaaattgctgaagctgtgaaaaattgtaagcctagagttccacctgccactgcttttgaaggacatatgttactgtctggtctagagcccttcaggattggaccgtacaccaactttgttaacattggagagcgctgtaatgttgcaggatcaaggaagtttgctaaactcatcatggcaggaaactatgaagaagccttgtgtgttgccaaagtgcaggtggaaatgggagcccaggtgttggatgtcaacatggatgatggcatgctagatggtccaagtgcaatgaccagattttgcaacttaattgcttccgagccagacatcgcaaaggtacctttgtgcatcgactcctccaattttgctgtgattgaagctgggttaaagtgctgccaagggaagtgcattgtcaatagcattagtctgaaggaaggagaggacgacttcttggagaaggccaggaagattaaaaagtatggagctgctatggtggtcatggcttttgatgaagaaggacaggcaacagaaacagacacaaaaatcagagtgtgcacccgggcctaccatctgcttgtgaaaaaactgggctttaatccaaatgacattatttttgaccctaatatcctaaccattgggactggaatggaggaacacaacttgtatgccattaattttatccatgcaacaaaagtcattaaagaaacattacctggagccagaataagtggaggtctttccaacttgtccttctccttccgaggaatggaagccattcgagaagcaatgcatggggttttcctttaccatgcaatcaagtctggcatggacatggggatagtgaatgctggaaacctccctgtgtatgatgatatccataaggaacttctgcagctctgtgaagatctcatctggaataaagaccctgaggccactgagaagctcttacgttatgcccagactcaaggcacaggagggaagaaagtcattcagactgatgagtggagaaatggccctgtcgaagaacgccttgagtatgcccttgtgaaggttataaagtcagcccgggttatgaagaaggctgttggccaccttatccctttcatggaaaaagaaagagaagaaaccagagtgcttaacggcacagtagaagaagaggacccttaccagggcaccatcgtgctggccactgttaaaggcgacgtgcacgacataggcaagaacatagttggagtagtccttggctgcaataatttccgagttattgatttaggagtcatgactccatgtgataagatactgaaagctgctcttgaccacaaagcagatataattggcctgtcaggactcatcactccttccctggatgaaatgatttttgttgccaaggaaatggagagattagctataaggattccattgttgattggaggagcaaccacttcaaaaacccacacagcagttaaaatagctccgagatacagtgcacctgtaatccatgtcctggacgcgtccaagagtgtggtggtgtgttcccagctgttagatgaaaatctaaaggatgaatactttgaggaaatcatggaagaatatgaagatattagacaggaccattatgagtctctcaaggagaggagatacttacccttaagtcaagccagaaaaagtggtttccaaatggattggctgtctgaacctcacccagtgaagcccacgtttattgggacccaggtctttgaagactatgacctgcagaagctggtggactacattgactggaagcctttctttgatgtctggcagctccggggcaagtacccgaatcgaggctttcccaagatatttaacgacaaaacagtaggtggagaggccaggaaggtctacgatgatgcccacaatatgctgaacacactgattagtcaaaagaaactccgggcccggggtgtggttgggttctggccagcacagagtatccaagacgacattcacctgtacgcagaggctgctgtgccccaggctgcagagcccatagccaccttctatgggttaaggcaacaggctgagaaggactctgccagcacggagccatactactgcctctcagacttcatcgctcccttgcattctggcatccgtgactacctgggcctgtttgccgttgcctgctttggggtagaagagctgagcaaggcctatgaggatgatggtgacgactacagcagcatcatggtcaaggcgctgggggaccggctggcagaggcctttgcagaagagctccatgaaagagttcgccgagaactgtgggcctactgtggcagtgagcagctggacgtcgcagacctgcgcaggctgcggtacaagggcatccgcccggctcctggctaccccagccagcccgaccacaccgagaagctcaccatgtggagactcgcagacatcgagcagtctacaggcattaggttaacagaatcattagcaatggcacctgcttcagcagtctcaggcctctacttctccaatttgaagtccaaatattttgctgtggggaagatttccaaggatcaggttgaggattatgcattgaggaagaacatatctgtggctgaggttgagaaatggcttggacccattttgggatatgatacagactaactttttttttttttttgccttttttattcttgatgatcctcaaggaaatacaacctagggtgccttaaaaataacaacaacaaaaaacctgtgtgcatctggctgacacttacctgcttctggttttcgaagactatttagtggaaccttgtagaggagcagggtcttcctgcagtgcctggaaaacaggcgctgtttttttgggaccttgcgtgaagagcagtgagcagggttcctgtggtttccctggtccctctgagatggggacagactgaagacagaggtcgtttgatttcaaagcaagtcaacctgcttttttctgtttttacagtggaatctaggaggccacttagtcgtctttttttcctcttagaagaaaagcctgaaactgagttgaatagagaagtgtgaccctgtgacaaaatgatactgtgagaaatggggcattttaatctaagtggttataacagtggattctgacggggaaggt

SEQ ID NO: 347 - DNA, 3274 bp, Homo sapiens
  source 1..3274: mol_type = unassigned DNA
ggagctttctattggtcctgggtaccgagcatgggcgctgcgtcagtgcgcgctggcgcaaggttggtggaagtcgcgttgtgcagtttcactgttacatgccttgaagtgatgaggaggtttctgttactatatgctacacagcagggacaggcaaaggccatcgcagaagaaatatgtgagcaagctgtggtacatggattttctgcagatcttcactgtattagtgaatccgataagtatgacctaaaaaccgaaacagctcctcttgttgttgtggtttctaccacgggcaccggagacccacccgacacagcccgcaagtttgttaaggaaatacagaaccaaacactgccggttgatttctttgctcacctgcggtatgggttactgggtctcggtgattcagaatacacctacttttgcaatggggggaagataattgataaacgacttcaagagcttggagcccggcatttctatgacactggacatgcagatgactgtgtaggtttagaacttgtggttgagccgtggattgctggactctggccagccctcagaaagcattttaggtcaagcagaggacaagaggagataagtggcgcactcccggtggcatcacctgcatcctcgaggacagaccttgtgaagtcagagctgctacacattgaatctcaagtcgagcttctgagattcgatgattcaggaagaaaggattctgaggttttgaagcaaaatgcagtgaacagcaaccaatccaatgttgtaattgaagactttgagtcctcacttacccgttcggtacccccactctcacaagcctctctgaatattcctggtttacccccagaatatttacaggtacatctgcaggagtctcttggccaggaggaaagccaagtatctgtgacttcagcagatccagtttttcaagtgccaatttcaaaggcagttcaacttactacgaatgatgccataaaaaccactctgctggtagaattggacatttcaaatacagacttttcctatcagcctggagatgccttcagcgtgatctgccctaacagtgattctgaggtacaaagcctactccaaagactgcagcttgaagataaaagagagcactgcgtccttttgaaaataaaggcagacacaaagaagaaaggagctaccttaccccagcatatacctgcgggatgttctctccagttcatttttacctggtgtcttgaaatccgagcaattcctaaaaaggcatttttgcgagcccttgtggactataccagtgacagtgctgaaaagcgcaggctacaggagctgtgcagtaaacaaggggcagccgattatagccgctttgtacgagatgcctgtgcctgcttgttggatctcctcctcgctttcccttcttgccagccaccactcagtctcctgctcgaacatcttcctaaacttcaacccagaccatattcgtgtgcaagctcaagtttatttcacccaggaaagctccattttgtcttcaacattgtggaatttctgtctactgccacaacagaggttctgcggaagggagtatgtacaggctggctggccttgttggttgcttcagttcttcagccaaacatacatgcatcccatgaagacagcgggaaagccctggctcctaagatatccatctctcctcgaacaacaaattctttccacttaccagatgacccctcaatccccatcataatggtgggtccaggaaccggcatagccccgtttattgggttcctacaacatagagagaaactccaagaacaacacccagatggaaattttggagcaatgtggttgttttttggctgcaggcataaggatagggattatctattcagaaaagagctcagacatttccttaagcatgggatcttaactcatctaaaggtttccttctcaagagatgctcctgttggggaggaggaagccccagcaaagtatgtgcaagacaacatccagcttcatggccagcaggtggcgagaatcctcctccaggagaacggccatatttatgtgtgtggagatgcaaagaatatggccaaggatgtacatgatgcccttgtgcaaataataagcaaagaggttggagttgaaaaactagaagcaatgaaaaccctggccactttaaaagaagaaaaacgctaccttcaggatatttggtcataaaaccagaaattaaagaaagaggattaagcttttttgactgaaagtactaaaagtcagctttactagtgccaaacctttaaattttcaaaagaaaattttctttcaacatttcttgaaggacatggagtggagattggatcatttaacaatataacaaaacttcctgatttgattttacgtatcttctatctacgcccttcctgtgcctgtgactctccccaaattgccctgttgccttgagctcttctgagctaaggcagccttcagtccctatcagcgcctcctttacttcccagagaacttcacagagactctgtccttccatgcaaaggcttcctgaaatagggagactgactgagtagctcattcttgtgacttacagtgccaacatttaaaaaagtatgaaaatgatttatttttatatgatgtatacccataaagaatgctcatattaatgtacttaaattacacatgtagagcatatctgttatatgtttatgtaactatcaaatggttatttgttactaaagctatatttctgataaaaaatattttaggataattgcctacagagggatttatttttatgatgctggaaatatgaaatgtattttaaaatttcactctggcatatgatttatctatcaccattacttttttttaagtcacaatttcagaattttgggacatttgcattcaatttacaggtaccagtacgtacatattttaatagaaagatacaacctttttattttcactccttttatttctgctgcttggcacatttttgagttttcccacattatttgtctccatgataccactcaagcagtgtgctggacctaaaatactgactttagttagtatccttggatttttagattcccagtgtctaattccctgttataatttgcacaaacaaaacaaaatgttatgataatctttctccactgttctaatatatattgtatttttatttgatagcttgggatttaaaacatctctgttgaaggcttttgatccttttgagaaataaagatctgaaagaaatggcataatcttaaaa

SEQ ID NO: 348 - DNA, 1128 bp, Homo sapiens
  source 1..1128: mol_type = unassigned DNA
agtgcgcgctggcgcaaggttggtggaagtcgcgttgtgcagtttcactgttacatgccttgaagtgatgaggaggtttctgttactatatgctacacagcagggacaggcaaaggccatcgcagaagaaatatgtgagcaagctgtggtacatggattttctgcagatcttcactgtattagtgaatccgataaggtctcggtgattcagaatacacctacttttgcaatggggggaagataattgataaacgacttcaagagcttggagcccggcatttctatgacactggacatgcagatgactgtgtaggtttagaacttgtggttgagccgtggattgctggactctggccagccctcagaaagcattttaggtcaagcagaggacaagaggagataagtggcgcactcccggtggcatcacctgcatcctcgaggacagaccttgtgaagtcagagctgctacacattgaatctcaagtcgagcttctgagattcgatgattcaggaagaaaggattctgaggttttgaagcaaaatgcagtgaacagcaaccaatccaatgttgtaattgaagactttgagtcctcacttacccgttcggtacccccactctcacaagcctctctgaatattcctggtttacccccagaatatttacaggtacatctgcaggagtctcttggccaggaggaaagccaagtatctgtgacttcagcagatccagtttttcaagtgccaatttcaaaggcagttcaacttactacgaatgatgccataaaaaccactctgctggtagaattggacatttcaaatacagacttttcctatcagcctggagatgccttcagcgtgatctgccctaacagtgattctgaggtacaaagcctactccaaagactgcagcttgaagataaaagagagcactgcgtccttttgaaaataaaggcagacacaaagaagaaaggagctaccttaccccagcatatacctgcgggatgttctctccagttcatttttacctggtgtcttgaaatccgagcaattcctaaaaaggcatttttgcgagcccttgtggactataccagtgacagtgctgaaaagcgcaggctacaggagctgtgc

SEQ ID NO: 349 - DNA, 3215 bp, Homo sapiens
  source 1..3215: mol_type = unassigned DNA
ggttcgtgcccggctggcgcggcgtggtttcactgttacatgccttgaagtgatgaggaggtttctgttactatatgctacacagcagggacaggcaaaggccatcgcagaagaaatatgtgagcaagctgtggtacatggattttctgcagatcttcactgtattagtgaatccgataagtatgacctaaaaaccgaaacagctcctcttgttgttgtggtttctaccacgggcaccggagacccacccgacacagcccgcaagtttgttaaggaaatacagaaccaaacactgccggttgatttctttgctcacctgcggtatgggttactgggtctcggtgattcagaatacacctacttttgcaatggggggaagataattgataaacgacttcaagagcttggagcccggcatttctatgacactggacatgcagatgactgtgtaggtttagaacttgtggttgagccgtggattgctggactctggccagccctcagaaagcattttaggtcaagcagaggacaagaggagataagtggcgcactcccggtggcatcacctgcatcctcgaggacagaccttgtgaagtcagagctgctacacattgaatctcaagtcgagcttctgagattcgatgattcaggaagaaaggattctgaggttttgaagcaaaatgcagtgaacagcaaccaatccaatgttgtaattgaagactttgagtcctcacttacccgttcggtacccccactctcacaagcctctctgaatattcctggtttacccccagaatatttacaggtacatctgcaggagtctcttggccaggaggaaagccaagtatctgtgacttcagcagatccagtttttcaagtgccaatttcaaaggcagttcaacttactacgaatgatgccataaaaaccactctgctggtagaattggacatttcaaatacagacttttcctatcagcctggagatgccttcagcgtgatctgccctaacagtgattctgaggtacaaagcctactccaaagactgcagcttgaagataaaagagagcactgcgtccttttgaaaataaaggcagacacaaagaagaaaggagctaccttaccccagcatatacctgcgggatgttctctccagttcatttttacctggtgtcttgaaatccgagcaattcctaaaaaggcatttttgcgagcccttgtggactataccagtgacagtgctgaaaagcgcaggctacaggagctgtgcagtaaacaaggggcagccgattatagccgctttgtacgagatgcctgtgcctgcttgttggatctcctcctcgctttcccttcttgccagccaccactcagtctcctgctcgaacatcttcctaaacttcaacccagaccatattcgtgtgcaagctcaagtttatttcacccaggaaagctccattttgtcttcaacattgtggaatttctgtctactgccacaacagaggttctgcggaagggagtatgtacaggctggctggccttgttggttgcttcagttcttcagccaaacatacatgcatcccatgaagacagcgggaaagccctggctcctaagatatccatctctcctcgaacaacaaattctttccacttaccagatgacccctcaatccccatcataatggtgggtccaggaaccggcatagccccgtttattgggttcctacaacatagagagaaactccaagaacaacacccagatggaaattttggagcaatgtggttgttttttggctgcaggcataaggatagggattatctattcagaaaagagctcagacatttccttaagcatgggatcttaactcatctaaaggtttccttctcaagagatgctcctgttggggaggaggaagccccagcaaagtatgtgcaagacaacatccagcttcatggccagcaggtggcgagaatcctcctccaggagaacggccatatttatgtgtgtggagatgcaaagaatatggccaaggatgtacatgatgcccttgtgcaaataataagcaaagaggttggagttgaaaaactagaagcaatgaaaaccctggccactttaaaagaagaaaaacgctaccttcaggatatttggtcataaaaccagaaattaaagaaagaggattaagcttttttgactgaaagtactaaaagtcagctttactagtgccaaacctttaaattttcaaaagaaaattttctttcaacatttcttgaaggacatggagtggagattggatcatttaacaatataacaaaacttcctgatttgattttacgtatcttctatctacgcccttcctgtgcctgtgactctccccaaattgccctgttgccttgagctcttctgagctaaggcagccttcagtccctatcagcgcctcctttacttcccagagaacttcacagagactctgtccttccatgcaaaggcttcctgaaatagggagactgactgagtagctcattcttgtgacttacagtgccaacatttaaaaaagtatgaaaatgatttatttttatatgatgtatacccataaagaatgctcatattaatgtacttaaattacacatgtagagcatatctgttatatgtttatgtaactatcaaatggttatttgttactaaagctatatttctgataaaaaatattttaggataattgcctacagagggatttatttttatgatgctggaaatatgaaatgtattttaaaatttcactctggcatatgatttatctatcaccattacttttttttaagtcacaatttcagaattttgggacatttgcattcaatttacaggtaccagtacgtacatattttaatagaaagatacaacctttttattttcactccttttatttctgctgcttggcacatttttgagttttcccacattatttgtctccatgataccactcaagcagtgtgctggacctaaaatactgactttagttagtatccttggatttttagattcccagtgtctaattccctgttataatttgcacaaacaaaacaaaatgttatgataatctttctccactgttctaatatatattgtatttttatttgatagcttgggatttaaaacatctctgttgaaggcttttgatccttttgagaaataaagatctgaaagaaatggcataatcttaaaa

SEQ ID NO: 350 - DNA, 567 bp, Homo sapiens
  source 1..567: mol_type = unassigned DNA
gtcggctacggttcccggattccggccgctcgccctgcactaatctcctgggagaggcggcccggggcggggtttcactgttacatgccttgaagtgatgaggaggtttctgttactatatgctacacagcagggacaggcaaaggccatcgcagaagaaatatgtgagcaagctgtggtacatggattttctgcagatcttcactgtattagtgaatccgataagtatgacctaaaaaccgaaacagctcctcttgttgttgtggtttctaccacgggcaccggagacccacccgacacagcccgcaagtttgttaaggaaatacagaaccaaacactgccggttgatttctttgctcacctgcggtatgggttactgggtctcggtgattcagaatacacctacttttgcaatggggggaagataattgataaacgacttcaagagcttggagcccggcatttctatgacactggacatgcagatgactgtgtaggtttagaacttgtggttgagccgtggattgctggactctggccagccctcagaaagcattttaggtcaag

SEQ ID NO: 351 - DNA, 628 bp, Homo sapiens
  source 1..628: mol_type = unassigned DNA
tcccggattccggccgctcgccctgcactaatctcctgggagaggcggcccggggcgggggtgggcagccggcttgcgcccgtggttcccacgcccttcggcctccgggggtcgccgcgggcgcgggctggggctcggacttggcctttggcctttggctttggtgtccccgggagcgtgtccttgggctcggcgtcggcctctgccgcgggaggcccctgggcggcgtggggtctctcctcatgttctgcctttggttctaggcgctttccaggcctagggaaaccgcactcggggacgcggggaactggggaacatgccgggttggggcggcgcgctccggggaacccgggacgttccgagcgcccacccggcgggacgcggccgtgagttctgcccgcggccgtgagctctgcccaccgcctccgcgccgcttccggggctgctggggcccgggcctccgctgagagtcgtgggaagtttcactgttacatgccttgaagtgatgaggaggtttctgttactatatgctacacagcagggacaggcaaaggccatcgcagaagaaatatgtgagcaagctgtggtacatggattttctgcagatcttcactgtattagtgaatcc

SEQ ID NO: 352 - DNA, 520 bp, Homo sapiens
  source 1..520: mol_type = unassigned DNA
taggatcaaataagaaccaagaatcctatcattttaatatagtttttacttttatctttttttaaaaagaggaaaccaaaagctatttaagactgttgtgaatgatactgtggctcaagttttgttcaggttcttggcttgtgccacatcgtttttcagtttcactgttacatgccttgaagtgatgaggaggtttctgttactatatgctacacagcagggacaggcaaaggccatcgcagaagaaatatgtgagcaagctgtggtacatggattttctgcagatcttcactgtattagtgaatccgataagtatgacctaaaaaccgaaacagctcctcttgttgttgtggtttctaccacgggcaccggagacccacccgacacagcccgcaagtttgttaaggaaatacagaaccaaacactgccggttgatttctttgctcacctgcggtatgggttactgggtctcggtgattcagaatacacctacttttgcaatggggggaagataattgat

SEQ ID NO: 353 - DNA, 1742 bp, Homo sapiens
  source 1..1742: mol_type = unassigned DNA
gtgatgctctgggatcccgcgcttccgagactcgcagtctacgcgagctgcctgtttttttcctgcttggacgcgcatgagggccccgtccatggaccgcgcggccgtggcgagggtgggcgcggtagcgagcgccagcgtgtgcgccctggtggcgggggtggtgctggctcagtacatattcaccttgaagaggaagacggggcggaagaccaagatcatcgagatgaagattggataaccaagaaatgactaatcaagagtctgccgtacatgtgaaaatgatgccagaattccagaaaagttcagttcgaatcaagaaccctacaagagtagaagaaattatctgtggtcttatcaaaggaggagctgccaaacttcagataataacggactttgatatgacactcagtagattttcatataaagggaaaagatgcccaacatgtcataatatcattgacaactgtaagctggttacagatgaatgtagaaaaaagttattgcaactaaaggaaaaatattacgctattgaagttgatcctgttcttactgtagaagagaagtacccttatatggtggaatggtatactaaatcacatggtttgcttgttcagcaagctttaccaaaagctaaacttaaagaaattgtggcagaatctgacgttatgctcaaagaaggatatgagaatttctttgataagctccaacaacatagcatccccgtgttcatattttcggctggaatcggcgatgtactagaggaagttattcgtcaagctggtgtttatcatcccaatgtcaaagttgtgtccaattttatggattttgatgaaactggggtgctcaaaggatttaaaggagaactaattcatgtatttaacaaacatgatggtgccttgaggaatacagaatatttcaatcaactaaaagacaatagtaacataattcttctgggagactcccaaggagacttaagaatggcagatggagtggccaatgttgagcacattctgaaaattggatatctaaatgatagagtggatgagcttttagaaaagtacatggactcttatgatattgttttagtacaagatgaatcattagaagtagccaactctattttacagaagattctataaacaagcattctccaagaagacctctctcctgtgggtgcaattgaactgttcatccgttcatcttgctgagagacttatttataatatatccttactctcgaagtgttccctttgtataactgaagtattttcagatatggtgaatgcattgactggaagctccttttctccacctctctcaacacactcctcaccgtatcttttaacccatttaaaaaaaaaaaaaagctaaaattagaaaaataactccctacttttccaaagtgaattttgtagtttaatgttatcatgcagcttttgaggagtcttttacactgggaaagtttgtagaaattttaaaataagttttatgaaatggtgaaataatatgcatgattttaagtattgccatttttgtaatttgggttattatgctgatggtatcaccatctcttgaaattgtgttaggtttggttattttgtctggggaaaaaatatttactggaaaagactagcagttagtgttggaaaaacctggtggtgtttacaatgttgctaatcattacaaaacattctatattgaagcactgataataaatatgaaatgcaaaacctttttaa

SEQ ID NO: 354 - DNA, 7207 bp, Homo sapiens
  source 1..7207: mol_type = unassigned DNA
gcagagcggcgcggcggcggtggcggcagcaggcagcaggcatgaccatggcagcggcggcggtggtggcacgcggggccggggcgagggcagcgacagcggcggctttgcggggtggctgcgggaccgcggctcgggggcggccgtgtgcgggccccgcccggcccttgtgcactgcacccgggaccgccccggacatgaagcgctacctgtgggagcgctaccgggaggcgaagagaagcacagaagaattggttccttccattatgagcaacttgttgaatccagatgccattttctcaaacaatgaaatgagcctgtcagacattgaaatctatggcttcgattatgattacaccttggtgttttattcaaagcacctccacacgctgatatttaatgctgcacgggaccttctcatcaatgaacaccggtatccagcagaaatcaggaagtatgagtatgacccaaattttgcaattcgtggacttcattatgatgtacagcgggcagtattaatgaagatcgatgcttttcattatatccagctgggaactgtctacagaggcctcagtgttgtccctgatgaagaagtcattgaaatgtacgaggggtcccacgtgcccttggagcagatgagtgacttttacggaaagagctctcatggaaacacgatgaagcagttcatggacatcttctccctgcccgagatgaccctcctgtcctgcgtgaatgaatacttcctcaagaacaacatcgactatgagcctgtgcatctgtacaaagatgtcaaggattcaattcgagacgtccacatcaaaggaataatgtacagagcaattgaagcagacattgaaaagtacatctgctatgctgagcagacccgcgcagtgttggccaaactggctgatcatggcaagaagatgtttctcatcaccaatagccccagtagctttgtggacaaagggatgagttatatcgttgggaaagactggagggacctgttcgatgtggtcattgttcaggctgagaagccaaacttctttaatgataagcggaggcctttccgaaagatgaatgagaaaggtgtcttactctgggataaaatccataagttgcagaaaggccagatatacaagcagggtaatttatatgaatttttgaagcttactggatggagaggatccagagtgttgtattttggtgaccatatatacagtgacctggcggatttgaccctaaagcatggctggaggactggtgcaatcatcccagagttgagatctgagctcaaaatcatgaacacggagcaatacattcaaaccatgacctggctgcagaccttgactggcttattggaacagatgcaggttcacagagatgctgagtcacagctggttttgcaggagtggaaaaaggaaaggaaggagatgcgagaaatgaccaagagtttcttcaatgcccagtttggaagcctgttccgcacagaccagaacccaacctacttcctaaggcgcctgtcgcgcttcgctgacatctacatggcgtctctgagctgcctcctgaactatgacgtcagccacactttctacccccggaggactccactgcagcacgaactgcccgcctggtcagaaaggccccccaccttcggaacccctctcctgcaggaggcccaggccaagtagccaagggcaaaaactagaaactgtaactgcccctgattgggcaggcatgatggggttgacttcatgtgggtctgagtgttgcttttggaaaagatacagataagccttttgatatttattttgtaccttacggagaataattctcccaatggttaagacaggagctagcagcccacccctccagcctttccccccatgcagggctgaaaggcaagcttcacattggaactctgattttgcctttttgtttactgaggtcctggaacatcaggtttcctgggataggtgagaccacttgatgccatgtctgtattctagcaggtcaagcttgaaacggttcttgactcctccatggaacatttcctgaacatttacgggctatgcattgggaactgcaggggcacagtgatgggcaaagattagctgcttccagaaggctgatttcgtgggctccacaatggtaaaacgctgctgtgagtggcagagaggttccccaggtgatggccagttcccaaatcatttggtactaaggctttgacattctggcacatcacatcaaatagaacacagcctccctggaaggacttaagtgagaaagaacaagagaagctgcaactcctggacccttttgtcctcagtgtgtggttcctgcgtccttccccagcatggaggagggcaggagagaggagatgagagctctggtcaaaacctgccagctagtggaacagccttctgtagagccttctgcaagaaacgagtgggtttgaagaaccaaaacatttgtggtaggtctcccaggagcttgttaaacctggaaacaccacctgagttggtttcatctgctcattggaagaaagaaaatgaaccaggaaaaagcatctttgtcatgaaatgctatgccatgccacccacccagttgaattggaatcctgttaaaacatgagatttaccagaaacagtcctttgtctagatggaaacaaacaagatcctggcttctctctaatgagttaccaactgagaggtgcttggattggccaggggaggaggaagatggccaccacaacttagccatgtccagccttctcttagatttcactcctgtgatgtttgtgcgactatttgggagtttgtgtagtttgttttttttttttttgttttgttttgtttttttttagatgtctaagatgggaaagggcgaaggacattgaagctaaggaatagatatgacctagctaaccaagcttttctcatttccttctgttttgttttgttgagatggagttttgctcttattgcccaggctggagtgcagtggcacaatctcagctcactgcaacctctgcctcccgggttcaagcgattctcctgcctcagcctcccaagtagctgggattacaggcatgcactaccacacccagctaattttgtatttctagtagagatggggtttctccatgttggtcaggctggtctcgaactcccgacctcagataatctgcccgccttggcctcccaaattgctgggattacaggtgtgagccaccgcacctggcctgcttttttcatttctttctaggggcaatgcaagtggcatgtattccttttgttggagggaagaatccttaattgcacctgcatttgtagtatccttcaatgtaaagtgcatatttactgcactctctgagtgctatgggaatgtctgctgttattagttatggggctgctaatactgttttaattgcatatgctatatcaatacttctgttcagattagcctaatctagtattgctaaaactcattttaagcttttgcggtaacttgtatatattcttaaatctaaaggatggcaggaacatgaggggagcttgtggagagtgcttgcttattcaacatttttattgtgataaatgtatgtaaccatctattgatgaaatccaagtctggcattccatgggctccttgccagatggcagaaacttaatgagttatatagcatcctttgtaatgctgcttgttatagttggaatgtacttgtgatatttggctgtatttaactataatggtgaaggtgaccctttagatccaataaggcttctccccatcttctacattttgttatgaacacagtaaggcacagtagtatgttctttttttggaacagggtaggcattttgtttattgtttgcttgcttctaggtgttttcgccatcagggtgtattggaggctgacacttaatgggtgtgtgttgcgcccagaactgctcggtgtcggggttctaaaagaatgcgctggtgttcttggcttcaagtttctgctttggagaagcagattcaggaagtaggtgttgcttaaaaataattcttggtttttatctaatcagatattcattgattacctaccaggtgccagttatagggtgttttgtttactcaagaatgaagtagaactatttttaaaacctgtttccatgagtgttcacgttaggtgacctaagctttgaaggagaaaaacatttttgggtatgaataatgagttttgtaatcaattcccagttagaagaatttcagtctctgggccattgagcttggcagtgttgagatctcccatgtgacagaagcctgacatctgggccaccaaggctcactgactgtgtaccttgcagactgtagacccatgtcgtggcggtaacggggccgaacacagtcattcccatgtgaacgatggaggcacatcccactttattattaatccttgtatatactcagtcaggacagattttaacttgtcgctgtcatgactttttttttttttttttgaggcaaggtctcgctctgttgcccattctggagtgcagtggtgtgatctcggctcactgcaacctcttgcctcccaggttcaagcaattttcgtgcctcagcctcccgagtagctgggactactggtacatgccaccaggcctggccaagttttgtagttttaatagagatggggtttcaccatgttggccaggctggtctcaaactcctagcctcaagtgttctgcccacctcagccttccaaagtgctgggattctgggtgtgagccactgtcatgcctggcctcgtcatgactcttttctctttttttttttttttttttttgagatttagttttgctctttttgcccaggccggagtgcaatggcacgatcttggctcactccaacctccgcctcctgggttcaagtgattctcctgcctcagcctcccgagtagctgggattacaggtgcccaccaccacatccagctaatttttttgtatttttagtagagacggggtttcaccatgttggccaggctggtctcgaactcctgaccttgggtaatccacctgccttggcctcccaaggtgctgggattacaggcatgagccaccgtgcccagcctatcatgactcaactgggatctggcacactgcactgggtgttttgttctctgatgtgcacattgatgaatgcatattggtacaagggaaatgaatctgttttcagccatttaaaaaattgtgttgtaaagcaaacaaaaatagcttgaacatttaaaaattactgtttaatattgtttgactgattttctaagaattatgtgaacaatgatgagtccagggcagcagccatcacaaatatgacagtccagcaaggcccatggaggtccctttggaagggacttgcacagctgattttctttttccagtgttgtttttacgggtgaaacgtggcttttgaaatactttagttgtttggcttagagctcccactttccccctaacatagtgcctgtctgttttttaaaacattttacccttcggcactattttctgctattcccattaatattatgtaacataaaccacttgctactgatttgggcatattacagactacaattactagttgctttgaatgcattggcactcttaattattgcaaaggagaattgaaaagtagtcttgtggtcctagttaatttagctttgggcaaactaagtggcttttcttctgtcctcttctcaaaaggccttttaagcagcagagactgggctaaatactggaactgaattccacttttctgcctgctcatttgctgccaaagaccacttggggctccttgtctagaatgctctaagacgaaatttggccagacacagggttccttgattgttctgttcaactaatagagaacctacattttgccttcttaatatcgactttcttttgtaccaggtttttctttctttcttttttgccttaggagcttagctcaaagttcagctaacctttgacactactagtgtcatttagtaacagtaatctttgacactactagtgtcatttaggagcttagctcaaagttcagctaacctttgacactgctagtgcgttcaagaaagggtagggaatgaagtacccttaatgcagggtcagcaaacttttcctgtaaaaggccagataggaagtatttttggctttttgggctgtttgcttttgctactactactgtgggaatgaccatggtcatggctgtgttccagcacaacttgatttaccaagacaagctgtgggctgtatttggtcctcaggctgtggcttgctagcccctgctctaatggattgtgttggcggcaatggcaagattcccttgctgagaacatgcagatgaataaccttatagctgggatgcagagaggagaaagttctgtaggtaataagtgcactgtattccctctgagctacttcctgggcatagttacatgtatggccagtgtgtgtacttgagccatcaggctcagacacttgttgaatatacctctcattgcattagtttgtaattgtgctagtgctgggtgctgagctcagctgcccggatgacctttccagactgaaggacatactcccctaacagctgggagtgctgctggctggccatttacttccagcccttatgaggagtttcccctgctgaagagccctgcctgccccagatcatacccccttcctgcctgtaacccttaccggctccatatggggtacaaagggctggcctcctcaccccaacttgggaaaccctctggggccatcccagctccagagccccttgtggggtcagtgagacctcattgtggccacattacagcccagtgcctctccctgacaagcctgtacccagccggctcagcccacagcactgtcctatgaaccttcctgcacgccattctccacctcagtatctgctttcggggaacccaacctgcgacagtgcttctgtgtgttttcagtcctgcaggtttgaactctgactttggagacttttccagttatctcgtggaatgacagattgtgcctgtatgatatcaggcacaattaatgcaaattaggcagacctatttattctagatgtgaatttgctatttattttaaatgttgattttatgtgttatgtgactctgaacttattgccaaataaaagtttgaattgta

SEQ ID NO: 355 - DNA, 5263 bp, Homo sapiens
  source 1..5263: mol_type = unassigned DNA
gagggcgcgcgttgaggcggctgcggcagttgcgcgctgggattgttgcggtgcgctggagccgaatacaaaatacagttaaaataaaatgtcaacctcctggagtgatcggttacagaatgcagcagatatgcctgctaacatggataagcatgccctgaaaaagtatcgtcgagaagcctatcatcgggtgtttgtgaaccgaagtttagcaatggaaaagataaagtgttttggttttgatatggattatacccttgctgtgtacaagtccccagagtatgagtcccttggttttgagcttactgtggagagattagtttctattggctatccccaggagttgctcagctttgcttatgattctacattccctaccaggggacttgtctttgacacactgtatggaaatcttttgaaagtcgatgcctatggaaacctcttggtctgtgcacatggatttaactttataaggggaccagaaactagagaacagtatccaaataaatttatccagcgagatgatactgaaagattttacattctgaacacactattcaacctaccagagacctacctgttggcctgcctagtagatttttttactaattgtcccagatataccagttgtgaaacaggatttaaagatggggacctcttcatgtcctaccggagtatgttccaggatgtaagagatgctgttgactgggttcattacaagggctcccttaaggaaaagacagttgaaaatcttgagaagtatgtagtcaaagatggaaaactgcctttgcttctgagccggatgaaggaagtagggaaagtatttcttgctaccaacagtgactataaatatacagataaaattatgacttacctgtttgacttcccacatggccccaagcctgggagctcccatcgaccatggcagtcctactttgacttgatcttggtggatgcacggaaaccactcttttttggagaaggcacagtactgcgtcaggtggatactaaaactggcaagctgaaaattggtacctacacagggcccctacagcatggtatcgtctactcaggaggttcttctgatacgatctgtgacctgttgggagccaagggaaaagacattttgtatattggagatcacatttttggggacattttaaaatcaaagaaacggcaagggtggcgaacttttttggtgattcctgaactcgcacaggagctacatgtctggactgacaagagttcacttttcgaagaacttcagagcttggatattttcttggctgaactctacaagcatcttgacagcagtagcaatgagcgtccagacatcagttccatccagagacgtattaagaaagtaactcatgacatggacatgtgctatgggatgatgggaagcctgtttcgcagtggctcccggcagaccctttttgccagtcaagtgatgcgttatgctgacctctatgcagcatctttcatcaacctgctgtattaccctttcagctacctcttcagggctgcccatgtcttgatgcctcatgaatcaacggtggagcacacacacgtagatatcaatgagatggagtctcctcttgccacccggaaccgcacatcagtggatttcaaagacactgactacaagcggcaccagctgacacggtcaattagtgagattaaacctcccaacctcttcccactggccccccaggaaattacacactgccatgacgaagatgatgatgaagaggaggaggaggaggaagaataaggaggaaaaccaaaaccccaagcacccattaaacaagtcctggcaggactcacaggaacaaacgaggtccctgttagggttctactcgggggagggagggggctccatgaaaggtacgtctgaaaagtttctgaagattttattatcatagatacttgttttggttttgtgtatctgtactctctgcagatggtccaaaattgtaatggagtctgtattagaagaaaataagggtaaaatcaggctgaactgcatgtatatggctccactgtggcttgtgacacttttaaaatcatccgtatgtcagtgtatctggatacacgaggaaaaggaaagagtctcagagtggaacaaagagtgggaagaggtgatctgtaatgttacaaattgtgctattactccaaggtccaacttttccagtgcattacatggtattgtatatcagtggagaaatgtattatttccatgatcaaatgtagtctctgttaaggtcaagttttcttttataagcctttaattcatcctcagtgactctggcaaggctgcttctctatcactggctttgcacagaagtatgctctacttgcgttgctttagggcaggattctattttgagggaaaagacagtatccttattaccttttgtttgtttaatagcacaaatgcttatttgttatccaaaaacaacctccttcttatctgtgataaatctatagaaagaatttagctgcaagtggacaaaggaacaagcccccagaaaagaaagggaagaactgccttcttatactacagaacatgcattagtgtgggctatatagctgtggctcatgctacccaattccagatttctttgtcctctaagagttgattgctgtatattaaaattgaacatcagaggatgggaagagggctctgtaagccagaaccttactaaagtagagggcacaatcagtgtgaataaattcacttcagaatctcaagtcaaggccaggcacggcggctcacgcctgtaatcccagcactttgggaggccgagacaggcggatcacctgaggtcgggagttcgagaccagccttaccaacatggagaaaccccatctctactaaaaatacaaaattacctgggcgtggtggtgcatgcctgtaatcccatcatctactcaggaggctgaggcaggagaattgcttgaacccaggaggcggaggttgcagtgagccaggattgtgccattgcactccagcctgggcaacaagaacaaaactccatctcaaaaaataaaaatcccaatcccaagtcgaaatcacctcttgttttaaacaagaatgaatcattactgtgtatgttagggtattaaaactgtttcaccagtacagtgaaagttgtttcaacattttaaacaaacagtggttatagactctttctttaaccattgtatattttcttccattcttgtcattggtcaataggggagggtagattagctgctccagaattcaataaagtgtaatatttctaacggtgactttgacctattctgtagtacaactgtaatagctattggtcttcaagtgggtttagatttggtgacatcagtttgatattctcttaaaggaaataaatattcaagaactgattatgttctaacatgattatattcatggtgttacataggcctcaattttttcacagaaagatttttggaacaggactgtgaagtgaggctttttaaaaaattattttataagcagagaacacagcctgataacttagtcaaggatatactgtctgtctcactactttggacttatatggcttcagattaagtcatccaagaaacatacatacattctaaatggtatatattgggaatatatgcccctttaaaagaatcaggtcagaaatgcaataacaattagactagactgttgcccgtgttaggagaatgtgtggtcatcctagttactaattactctcactcaagatggagatgttgtccagtttaacatagtcttaagttttcttaaacccaaataatttatgagtagcttattacatctgcagagctaccttattataatagtacatttacatattgtctcttttagagtaaggaccacatgattgctttgctttaatttaccactttttgtattgcatccatataagagtgtcttactagccagatgattccatggcaaatgattctctgggtccaaagatcggaaagtgaaaagcacacagctggaataagcaacaactccactgctagttacagctctccgtaggaccaccaaaacgtattcaagagctctaggattccataagacccagagcaaaatggtgcctctctgtatattattcttaagagtgtgctgggaagtcaatggtccatgggtaggcagggcagctgtaactgggctttttaaaacaaattatgagttttctctctgttgccagtagttaaggaagctgaacttaaaaggtatacttttttccttaaaaaaaaaaaaaaaaaaaaaaaaaaaaaaaatcctgcggagttttataccgtgagaagaccattctgccacttcttttgagaattttttcccaggcattttgaaaacactataggcattgtagaacaccaggcaaccccttcttggttgctagactgaactcccaaccttacagcatgtactgacaggtcccctagcctccccagcagttggtcagtggtacagcagacccaggccctgctgggtttccttgggcagaggaattgcccagtacattcattcatctctgcaaagatagatagtcagtgaaaactctgatggtgtacttcagaaaagttggtcacagccaagaaagtttagggttctatttagacctaagatttttctcttgccataagcatacctctgctgagacctaaaataataacgcaaacccttcaagctaccctaagatacttttagaagtcgtttttaatagaactacaaatccttaagtcacattagcattgttaagaaaccactttaaaaagccacatgcagttgcatgtcagatttagaagtattttgtccatgtttaggtatttctaaatcagatgtatttatttaagaaatactttgtcaacaactttaaagcccagcaatttttccaaggctgcctggtcattttaaaataaatactctgcttattcaccacgaatagcctgagacaactacatatttaagtctgtattagggtaggaaccttacccacattccatgttatggaaactatttaatctgtctttgatggtgggaaaaatggtaactatgatctagctattgccatacagttaacgctccaattcctcactgggcttagtagtttagggctcaaatacttatgtttctcatgatgatctttagtggtgatcagggaatccagcttttcttaaaagtttttcctcaaatagaacaatttcaaatgatacacaacttttgggaggccctgag

SEQ ID NO: 356 - DNA, 839 bp, Homo sapiens
  source 1..839: mol_type = unassigned DNA
cgcgcgttgaggcggctgcggcagttgcgcgctgggattgttgcggtgcgctggagccgaatacaaaatacagttaaaataaaatgtcaacctcctggagtgatcggttacagaatgcagcagatatgcctgctaacatggataagcatgccctgaaaaagtatcgtcgagaagcctatcatcgggtgtttgtgaaccgaagtttagcaatggaaaagataaagtgttttggttttgatatggattatacccttgctgtgtacaagtccccagagtatgagtcccttggttttgagcttactgtggagagattagtttctattggctatccccaggagttgctcagctttgcttatgattctacattccctaccaggggacttgtctttgacacactgtatggaaatcttttgaaagtcgatgcctatggaaacctcttggtctgtgcacatggatttaactttataaggggttctcaggtagctgttcagaagagaccagaaactagagaacagtatccaaataaatttatccagcgagatgatactgaaagattttacattctgaacacactattcaacctaccagagacctacctgttggcctgcctagtagatttttttactaattgtcccagatataccagttgtgaaacaggatttaaagatggggacctcttcatgtcctaccggagtatgttccaggatgtaagagatgctgttgactgggttcattacaagggctcccttaaggaaaagacagttgaaaatcttgagaagtatgtagtcaaagatagtaaaagtagcagaatacagtattttctcaaagtactgtggtaa

SEQ ID NO: 357 - DNA, 3365 bp, Homo sapiens
  source 1..3365: mol_type = unassigned DNA
aatacaaaatacagttaaaataaaatgtcaacctcctggagtgatcggttacagaatgcagcagatatgcctgctaacatggataagcatgccctgaaaaagtatcgtcgagaagcctatcatcgggtgtttgtgaaccgaagtttagcaatggaaaagataaagtgttttggttttgatatggattatacccttgctgtgtacaagtccccagagtatgagtcccttggttttgagcttactgtggagagattagtttctattggctatccccaggagttgctcagctttgcttatgattctacattccctaccaggggacttgtctttgacacactgtatggaaatcttttgaaagtcgatgcctatggaaacctcttggtctgtgcacatggatttaactttataaggggaccagaaactagagaacagtatccaaataaatttatccagcgagatgatactgaaagattttacattctgaacacactattcaacctaccagagacctacctgttggcctgcctagtagatttttttactaattgtcccagatataccagttgtgaaacaggatttaaagatggggacctcttcatgtcctaccggagtatgttccaggatgtaagagatgctgttgactgggttcattacaagggctcccttaaggaaaagacagttgaaaatcttgagaagtatgtagtcaaagatggaaaactgcctttgcttctgagccggatgaaggaagtagggaaagtatttcttgctaccaacagtgactataaatatacagataaaattatgacttacctgtttgacttcccacatggccccaagcctgggagctcccatcgaccatggcagtcctactttgacttgatcttggtggatgcacggaaaccactcttttttggagaaggcacagtactgcgtcaggtggatactaaaactggcaagctgaaaattggtacctacacagggcccctacagcatggtatcgtctactcaggaggttcttctgatacgatctgtgacctgttgggagccaagggaaaagacattttgtatattggagatcacatttttggggacattttaaaatcaaagaaacggcaagggtggcgaacttttttggtgattcctgaactcgcacaggagctacatgtctggactgacaagagttcacttttcgaagaacttcagagcttggatattttcttggctgaactctacaagcatcttgacagcagtagcaatgagcgtccagacatcagttccatccagagacgtattaagaaagtaactcatgacatggacatgtgctatgggatgatgggaagcctgtttcgcagtggctcccggcagaccctttttgccagtcaagtgatgcgttatgctgacctctatgcagcatctttcatcaacctgctgtattaccctttcagctacctcttcagggctgcccatgtcttgatgcctcatgaatcaacggtggagcacacacacgtagatatcaatgagatggagtctcctcttgccacccggaaccgcacatcagtggatttcaaagacactgactacaagcggcaccagctgacacggtcaattagtgagattaaacctcccaacctcttcccactggccccccaggaaattacacactgccatgacgaagatgatgatgaagaggaggaggaggaggaagaataaggaggaaaaccaaaaccccaagcacccattaaacaagtcctggcaggactcacaggaacaaacgaggtccctgttagggttctactcgggggagggagggggctccatgaaaggtacgtctgaaaagtttctgaagattttattatcatagatacttgttttggttttgtgtatctgtactctctgcagatggtccaaaattgtaatggagtctgtattagaagaaaataagggtaaaatcaggctgaactgcatgtatatggctccactgtggcttgtgacacttttaaaatcatccgtatgtcagtgtatctggatacacgaggaaaaggaaagagtctcagagtggaacaaagagtgggaagaggtgatctgtaatgttacaaattgtgctattactccaaggtccaacttttccagtgcattacatggtattgtatatcagtggagaaatgtattatttccatgatcaaatgtagtctctgttaaggtcaagttttcttttataagcctttaattcatcctcagtgactctggcaaggctgcttctctatcactggctttgcacagaagtatgctctacttgcgttgctttagggcaggattctattttgagggaaaagacagtatccttattaccttttgtttgtttaatagcacaaatgcttatttgttatccaaaaacaacctccttcttatctgtgataaatctatagaaagaatttagctgcaagtggacaaaggaacaagcccccagaaaagaaagggaagaactgccttcttatactacagaacatgcattagtgtgggctatatagctgtggctcatgctacccaattccagatttctttgtcctctaagagttgattgctgtatattaaaattgaacatcagaggatgggaagagggctctgtaagccagaaccttactaaagtagagggcacaatcagtgtgaataaattcacttcagaatctcaagtcaaggccaggcacggcggctcacgcctgtaatcccagcactttgggaggccgagacaggcggatcacctgaggtcgggagttcgagaccagccttaccaacatggagaaaccccatctctactaaaaatacaaaattacctgggcgtggtggtgcatgcctgtaatcccatcatctactcaggaggctgaggcaggagaattgcttgaacccaggaggcggaggttgcagtgagccaggattgtgccattgcactccagcctgggcaacaagaacaaaactccatctcaaaaaataaaaatcccaatcccaagtcgaaatcacctcttgttttaaacaagaatgaatcattactgtgtatgttagggtattaaaactgtttcaccagtacagtgaaagttgtttcaacattttaaacaaacagtggttatagactctttctttaaccattgtatattttcttccattcttgtcattggtcaataggggagggtagattagctgctccagaattcaataaagtgtaatatttctaacggtgactttgacctattctgtagtacaactgtaatagctattggtcttcaagtgggtttagatttggtgacatcagtttgatattctcttaaaggaaataaatattcaagaactgattatgttctaacatgattata

SEQ ID NO: 358 - DNA, 440 bp, Homo sapiens
  source 1..440: mol_type = unassigned DNA
gtactgcgtcaggtggatactaaaactggcaagctgaaaattggtacctacacagggcccctacagcatggtatcgtctactcaggaggttcttctgatacgatctgtgacctgttgggagccaagggaaaagacattttgtatattggagatcacatttttggggacattttaaaatcaaagaaacggcaagggtggcgaacttttttggtgattcctgaactcgcacaggagctacatgtctggactgacaagagttcacttttcgaagaacttcagagcttggatattttcttggctgaactctacaagcatcttgacagcagtagcaatgagcgtccagacatcagttccatccagagacgtattaagatgcctcatgaatcaacggtggagcacacacacgtagatatcaatgagatggagtctcctcttgccac

SEQ ID NO: 359 - DNA, 2009 bp, Homo sapiens
  source 1..2009: mol_type = unassigned DNA
acgattcctgtctcttacaggaacttgccatttggattgtctccttccttaactggccagccttaaacagttcaggccattagttatttttcctagtcttgaaatttttaaaaaaattattcttaagttttcaagtatttaaagctgaggatattggtcactgagatattgcctagttagggttcggcattgtgcccaaatttgttgggcctctcagggcctgagttctctgtgctttaacaaatgagctacagttctcaagagatcagtgaagcttgtttgttgatcctgtattctcatccagaggaagtagatctttgagaatgtctaaggaaggggtgtttgtgaaccgaagtttagcaatggaaaagataaagtgttttggttttgatatggattatacccttgctgtgtacaagtccccagagtatgagtcccttggttttgagcttactgtggagagattagtttctattggctatccccaggagttgctcagctttgcttatgattctacattccctaccaggggacttgtctttgacacactgtatggaaatcttttgaaagtcgatgcctatggaaacctcttggtctgtgcacatggatttaactttataaggggaccagaaactagagaacagtatccaaataaatttatccagcgagatgatactgaaagattttacattctgaacacactattcaacctaccagagacctacctgttggcctgcctagtagatttttttactaattgtcccagatataccagttgtgaaacaggatttaaagatggggacctcttcatgtcctaccggagtatgttccaggatgtaagagatgctgttgactgggttcattacaagggctcccttaaggaaaagacagttgaaaatcttgagaagtatgtagtcaaagatggaaaactgcctttgcttctgagccggatgaaggaagtagggaaagtatttcttgctaccaacagtgactataaatatacagataaaattatgacttacctgtttgacttcccacatggccccaagcctgggagctcccatcgaccatggcagtcctactttgacttgatcttggtggatgcacggaaaccactcttttttggagaaggcacagtactgcgtcaggtggatactaaaactggcaagctgaaaattggtacctacacagggcccctacagcatggtatcgtctactcaggaggttcttctgatacgatctgtgacctgttgggagccaagggaaaagacattttgtatattggagatcacatttttggggacattttaaaatcaaagaaacggcaagggtggcgaacttttttggtgattcctgaactcgcacaggagctacatgtctggactgacaagagttcacttttcgaagaacttcagagcttggatattttcttggctgaactctacaagcatcttgacagcagtagcaatgagcgtccagacatcagttccatccagagacgtattaagaaagtaactcatgacatggacatgtgctatgggatgatgggaagcctgtttcgcagtggctcccggcagaccctttttgccagtcaagtgatgcgttatgctgacctctatgcagcatctttcatcaacctgctgtattaccctttcagctacctcttcagggctgcccatgtcttgatgcctcatgaatcaacggtggagcacacacacgtagatatcaatgagatggagtctcctcttgccacccggaaccgcacatcagtggatttcaaagacactgactacaagcggcaccagctgacacggtcaattagtgagattaaacctcccaacctcttcccactggccccccaggaaattacacactgccatgacgaagatgatgatgaagaggaggaggaggaggaagaataaggaggaaaaccaaaaccccaagcacccattaaacaagtcctggcaggactcacaggaacaaacgaggtccctgttagggttctactc

SEQ ID NO: 360 - DNA, 856 bp, Homo sapiens
  source 1..856: mol_type = unassigned DNA
agttgcgcgctgggattgttgcggtgcgctggagccgaatacaaaatacagttaaaataaaatgtcaacctcctggagtgatcggttacagaatgcagcagatatgcctgctaacatggataagcatgccctgaaaaagtatcgtcgagaagcctatcatcgggtgtttgtgaaccgaagtttagcaatggaaaagataaagtgttttggttttgatatggattatacccttgctgtgtacaagtccccagagtatgagtcccttggttttgagcttactgtggagagattagtttctattggctatccccaggagttgctcagctttgcttatgattctacattccctaccaggggacttgtctttgacacactgtatggaaatcttttgaaagtcgatgcctatggaaacctcttggtctgtgcacatggatttaactttataaggggttctcaggtagctgttcagaagagaccagaaactagagaacagtatccaaataaatttatccagcgagatgatactgaaagattttacattctgaacacactattcaacctaccagagacctacctgttggcctgcctagtagatttttttactaattgtcccagatataccagttgtgaaacaggatttaaagatggggacctcttcatgtcctaccggagtatgttccaggatgtaagagatgctgttgactgggttcattacaagggctcccttaaggaaaagacagttgaaaatcttgagaagtatgtagtcaaagatggaaaactgcctttgcttctgagccggatgaaggaagtagggaaagtatttcttgctaccaacagtgactataaatatacagat

SEQ ID NO: 361 - DNA, 597 bp, Homo sapiens
  source 1..597: mol_type = unassigned DNA
gtttctattggctatccccaggagttgctcagctttgcttatgattctacattccctaccaggggacttgtctttgacacactgtatggaaatcttttgaaagtcgatgcctatggaaacctcttggtctgtgcacatggatttaactttataaggggttctcaggtagctgttcagaagagaccagaaactagagaacagtatccaaataaatttatccagcgagatgatactgaaagattttacattctgaacacactattcaacctaccagagacctacctgttggcctgcctagtagatttttttactaattgtcccagatataccagttgtgaaacaggatttaaagatggggacctcttcatgtcctaccggagtatgttccaggatgtaagagatgctgttgactgggttcattacaagggctcccttaaggaaaagacagttgaaaatcttgagaagtatgtagtcaaagatagtaaaagtagcagaatacagtattttctcaaagtactgtggtaaagatttcttgttttcagtttttgtgcttcctattttcacccacctcccttatttcaagaaagaacactgaat

SEQ ID NO: 362 - DNA, 1670 bp, Homo sapiens
  source 1..1670: mol_type = unassigned DNA
cgtgatgctctgggatcccgcgcttccgagactcgcagtctacgcgagctgcctgtttttttcctgcttggacgcgcatgagggccccgtccatggaccgcgcggccgtggcgagggtgggcgcggtagcgagcgccagcgtgtgcgccctggtggcgggggtggtgctggctcagtacatattcaccttgaagaggaagacggggcggaagaccaagatcatcgagatgatgccagaattccagaaaagttcagttcgaatcaagaaccctacaagagtagaagaaattatctgtggtcttatcaaaggaggagctgccaaacttcagataataacggactttgatatgacactcagtagattttcatataaagggaaaagatgcccaacatgtcataatatcattgacaactgtaagctggttacagatgaatgtagaaaaaagttattgcaactaaaggaaaaatattacgctattgaagttgatcctgttcttactgtagaagagaagtacccttatatggtggaatggtatactaaatcacatggtttgcttgttcagcaagctttaccaaaagctaaacttaaagaaattgtggcagaatctgacgttatgctcaaagaaggatatgagaatttctttgataagctccaacaacatagcatccccgtgttcatattttcggctggaatcggcgatgtactagaggaagttattcgtcaagctggtgtttatcatcccaatgtcaaagttgtgtccaattttatggattttgatgaaactggggtgctcaaaggatttaaaggagaactaattcatgtatttaacaaacatgatggtgccttgaggaatacagaatatttcaatcaactaaaagacaatagtaacataattcttctgggagactcccaaggagacttaagaatggcagatggagtggccaatgttgagcacattctgaaaattggatatctaaatgatagagtggatgagcttttagaaaagtacatggactcttatgatattgttttagtacaagatgaatcattagaagtagccaactctattttacagaagattctataaacaagcattctccaagaagacctctctcctgtgggtgcaattgaactgttcatccgttcatcttgctgagagacttatttataatatatccttactctcgaagtgttccctttgtataactgaagtattttcagatatggtgaatgcattgactggaagctccttttctccacctctctcaacacactcctcaccgtatcttttaacccatttaaaaaaaaaaaaaagctaaaattagaaaaataactccctacttttccaaagtgaattttgtagtttaatgttatcatgcagcttttgaggagtcttttacactgggaaagtttgtagaaattttaaaataagttttatgaaatggtgaaataatatgcatgattttaagtattgccatttttgtaatttgggttattatgctgatggtatcaccatctcttgaaattgtgttaggtttggttattttgtctggggaaaaaatatttactggaaaagactagcagttagtgttggaaaaacctggtggtgtttacaatgttgctaatcattacaaaacattctatattgaagcactgataataaatatga

SEQ ID NO: 363 - DNA, 1635 bp, Homo sapiens
  source 1..1635: mol_type = unassigned DNA
tttcttttgctggtgtagctcgtccggttaccttcaggaagattggataaccaagaaatgactaatcaagagtctgccgtacatgtgaaaatgtgtagcagaaaccagccttcttcgaagtggtcttggtgtgattctcctatccgttatcaaaaacttgaagctgtgatttgcctgagatgccagaattccagaaaagttcagttcgaatcaagaaccctacaagagtagaagaaattatctgtggtcttatcaaaggaggagctgccaaacttcagataataacggactttgatatgacactcagtagattttcatataaagggaaaagatgcccaacatgtcataatatcattgacaactgtaagctggttacagatgaatgtagaaaaaagttattgcaactaaaggaaaaatattacgctattgaagttgatcctgttcttactgtagaagagaagtacccttatatggtggaatggtatactaaatcacatggtttgcttgttcagcaagctttaccaaaagctaaacttaaagaaattgtggcagaatctgacgttatgctcaaagaaggatatgagaatttctttgataagctccaacaacatagcatccccgtgttcatattttcggctggaatcggcgatgtactagaggaagttattcgtcaagctggtgtttatcatcccaatgtcaaagttgtgtccaattttatggattttgatgaaactggggtgctcaaaggatttaaaggagaactaattcatgtatttaacaaacatgatggtgccttgaggaatacagaatatttcaatcaactaaaagacaatagtaacataattcttctgggagactcccaaggagacttaagaatggcagatggagtggccaatgttgagcacattctgaaaattggatatctaaatgatagagtggatgagcttttagaaaagtacatggactcttatgatattgttttagtacaagatgaatcattagaagtagccaactctattttacagaagattctataaacaagcattctccaagaagacctctctcctgtgggtgcaattgaactgttcatccgttcatcttgctgagagacttatttataatatatccttactctcgaagtgttccctttgtataactgaagtattttcagatatggtgaatgcattgactggaagctccttttctccacctctctcaacacactcctcaccgtatcttttaacccatttaaaaaaaaaaaaaagctaaaattagaaaaataactccctacttttccaaagtgaattttgtagtttaatgttatcatgcagcttttgaggagtcttttacactgggaaagtttgtagaaattttaaaataagttttatgaaatggtgaaataatatgcatgattttaagtattgccatttttgtaatttgggttattatgctgatggtatcaccatctcttgaaattgtgttaggtttggttattttgtctggggaaaaaatatttactggaaaagactagcagttagtgttggaaaaacctggtggtgtttacaatgttgctaatcattacaaaacattctatattgaagcactgataataaatatgaaatgcaaaaccttttt

SEQ ID NO: 364 - DNA, 1788 bp, Homo sapiens
  source 1..1788: mol_type = unassigned DNA
agagccagttgccagttctaatagtacagatttaccttctctttaatcgtcacataacttcaattgataatgttatgtagattgacttgtgactagctcagagctagcgaggctgtaaccaagagcatatataaagtactgtgcagcagtgcgtcacaaggtttttgcatagggcttagtcaaggcttttggaaccgccctcagttgcaccttgtgctatattagtacttctcagacaggaagaattttcttttgctggtgtagctcgtccggttaccttcaggaagattggataaccaagaaatgactaatcaagagtctgccgtacatgtgaaaatgatgccagaattccagaaaagttcagttcgaatcaagaaccctacaagagtagaagaaattatctgtggtcttatcaaaggaggagctgccaaacttcagataataacggactttgatatgacactcagtagattttcatataaagggaaaagatgcccaacatgtcataatatcattgacaactgtaagctggttacagatgaatgtagaaaaaagttattgcaactaaaggaaaaatattacgctattgaagttgatcctgttcttactgtagaagagaagtacccttatatggtggaatggtatactaaatcacatggtttgcttgttcagcaagctttaccaaaagctaaacttaaagaaattgtggcagaatctgacgttatgctcaaagaaggatatgagaatttctttgataagctccaacaacatagcatccccgtgttcatattttcggctggaatcggcgatgtactagaggaagttattcgtcaagctggtgtttatcatcccaatgtcaaagttgtgtccaattttatggattttgatgaaactggggtgctcaaaggatttaaaggagaactaattcatgtatttaacaaacatgatggtgccttgaggaatacagaatatttcaatcaactaaaagacaatagtaacataattcttctgggagactcccaaggagacttaagaatggcagatggagtggccaatgttgagcacattctgaaaattggatatctaaatgatagagtggatgagcttttagaaaagtacatggactcttatgatattgttttagtacaagatgaatcattagaagtagccaactctattttacagaagattctataaacaagcattctccaagaagacctctctcctgtgggtgcaattgaactgttcatccgttcatcttgctgagagacttatttataatatatccttactctcgaagtgttccctttgtataactgaagtattttcagatatggtgaatgcattgactggaagctccttttctccacctctctcaacacactcctcaccgtatcttttaacccatttaaaaaaaaaaaaaagctaaaattagaaaaataactccctacttttccaaagtgaattttgtagtttaatgttatcatgcagcttttgaggagtcttttacactgggaaagtttgtagaaattttaaaataagttttatgaaatggtgaaataatatgcatgattttaagtattgccatttttgtaatttgggttattatgctgatggtatcaccatctcttgaaattgtgttaggtttggttattttgtctggggaaaaaatatttactggaaaagactagcagttagtgttggaaaaacctggtggtgtttacaatgttgctaatcattacaaaacattctatattgaagcactgataataaatatgaaatgcaaaa

SEQ ID NO: 365 - DNA, 1107 bp, Homo sapiens
  source 1..1107: mol_type = unassigned DNA
atgactaatcaagagtctgccgtacatgtgaaaatgatgccagaattccagaaaagttcagttcgaatcaagaaccctacaagagtagaagaaattatctgtggtcttatcaaaggaggagctgccaaacttcagataataacggactttgatatgacactcagtagattttcatataaagggaaaagatgcccaacatgtcataatatcattgacaactgtaagctggttacagatgaatgtagaaaaaagttattgcaactaaaggaaaaatattacgctattgaagttgatcctgttcttactgtagaagagaagtacccttatatggtggaatggtatactaaatcacatggtttgcttgttcagcaagctttaccaaaagctaaacttaaagaaattgtggcagaatctgacgttatgctcaaagaaggatatgagaatttctttgataagctccaacaacatagcatccccgtgttcatattttcggctggaatcggcgatgtactagaggaagttattcgtcaagctggtgtttatcatcccaatgtcaaagttgtgtccaattttatggattttgatgaaactggggtgctcaaaggatttaaaggagaactaattcatgtatttaacaaacatgatggtgccttgaggaatacagaatatttcaatcaactaaaagacaatagtaacataattcttctgggagactcccaaggagacttaagaatggcagatggagtggccaatgttgagcacattctgaaaattggatatctaaatgatagagtggatgagcttttagaaaagtacatggactcttatgatattgttttagtacaagatgaatcattagaagtagccaactctattttacagaagattctataaacaagcattctccaagaagacctctctcctgtgggtgcaattgaactgttcatccgttcatcttgctgagagacttatttataatatatccttactctcgaagtgttccctttgtataactgaagtattttcagatatggtgaatgcattgactggaagctccttttctccacctctctcaacacactcctcaccgtatcttttaacccattt

SEQ ID NO: 366 - DNA, 1032 bp, Homo sapiens
  source 1..1032: mol_type = unassigned DNA
tttcttttgctggtgtagctcgtccggttaccttcaggaagattggataaccaagaaatgactaatcaagagtctgccgtacatgtgaaaatgcagaaaccagccttcttcgaagtggtcttggtgtgattctcctatccgttatcaaaaacttgaagctgtgatttgcctgagatgccagaattccagaaaagttcagttcgaatcaagaaccctacaagagtagaagaaattatctgtggtcttatcaaaggaggagctgccaaacttcagataataacggactttgatatgacactcagtagattttcatataaagggaaaagatgcccaacatgtcataatatcattgacaactgtaagctggttacagatgaatgtagaaaaaagttattgcaactaaaggaaaaatattacgctattgaagttgatcctgttcttactgtagaagagaagtacccttatatggtggaatggtatactaaatcacatggtttgcttgttcagcaagctttaccaaaagctaaacttaaagaaattgtggcagaatctgacgttatgctcaaagaaggatatgagaatttctttgataagctccaacaacatagcatccccgtgttcatattttcggctggaatcggcgatgtactagaggaagttattcgtcaagctggtgtttatcatcccaatgtcaaagttgtgtccaattttatggattttgatgaaactggggtgctcaaaggatttaaaggagaactaattcatgtatttaacaaacatgatggtgccttgaggaatacagaatatttcaatcaactaaaagacaatagtaacataattcttctgggagactcccaaggagacttaagaatggcagatggagtggccaatgttgagcacattctgaaaattggatatctaaatgatagagtggatgagcttttagaaaagtacatggactcttatgatattgttttagtacaagatgaatcattagaagtagccaactctattttacagaagattctataa

SEQ ID NO: 367 - DNA, 306 bp, Homo sapiens
  source 1..306: mol_type = unassigned DNA
tttcttttgctggtgtagctcgtccggttaccttcaggaagattggataaccaagaaatgactaatcaagagtctgccgtacatgtgaaaatgtgtagcagaaaccagccttcttcgaagtggtcttggtgtgattctcctatccgttatcaaaaacttgaagctgtgatttgcctgagatgccagaattccagaaaagttcagttcgaatcaagaaccctacaagagtagaagaaattatctgtggtcttatcaaaggaggagctgccaaacttcagataataacggactttgatatgacactca

SEQ ID NO: 368 - DNA, 3548 bp, Homo sapiens
  source 1..3548: mol_type = unassigned DNA
gcactcgcccggctcgcccgctttcgcacccagttcacgcgccacagctatgtgtccccgagccgcgcgggcgcccgcgacgctactcctcgccctgggcgcggtgctgtggcctgcggctggcgcctgggagcttacgattttgcacaccaacgacgtgcacagccggctggagcagaccagcgaggactccagcaagtgcgtcaacgccagccgctgcatgggtggcgtggctcggctcttcaccaaggttcagcagatccgccgcgccgaacccaacgtgctgctgctggacgccggcgaccagtaccagggcactatctggttcaccgtgtacaagggcgccgaggtggcgcacttcatgaacgccctgcgctacgatgccatggcactgggaaatcatgaatttgataatggtgtggaaggactgatcgagccactcctcaaagaggccaaatttccaattctgagtgcaaacattaaagcaaaggggccactagcatctcaaatatcaggactttatttgccatataaagttcttcctgttggtgatgaagttgtgggaatcgttggatacacttccaaagaaaccccttttctctcaaatccagggacaaatttagtgtttgaagatgaaatcactgcattacaacctgaagtagataagttaaaaactctaaatgtgaacaaaattattgcactgggacattcgggttttgaaatggataaactcatcgctcagaaagtgaggggtgtggacgtcgtggtgggaggacactccaacacatttctttacacaggcaatccaccttccaaagaggtgcctgctgggaagtacccattcatagtcacttctgatgatgggcggaaggttcctgtagtccaggcctatgcttttggcaaatacctaggctatctgaagatcgagtttgatgaaagaggaaacgtcatctcttcccatggaaatcccattcttctaaacagcagcattcctgaagatccaagcataaaagcagacattaacaaatggaggataaaattggataattattctacccaggaattagggaaaacaattgtctatctggatggctcctctcaatcatgccgctttagagaatgcaacatgggcaacctgatttgtgatgcaatgattaacaacaacctgagacacacggatgaaatgttctggaaccacgtatccatgtgcattttaaatggaggtggtatccggtcgcccattgatgaacgcaacaatggcacaattacctgggagaacctggctgctgtattgccctttggaggcacatttgacctagtccagttaaaaggttccaccctgaagaaggcctttgagcatagcgtgcaccgctacggccagtccactggagagttcctgcaggtgggcggaatccatgtggtgtatgatctttcccgaaaacctggagacagagtagtcaaattagatgttctttgcaccaagtgtcgagtgcccagttatgaccctctcaaaatggacgaggtatataaggtgatcctcccaaacttcctggccaatggtggagatgggttccagatgataaaagatgaattattaagacatgactctggtgaccaagatatcaacgtggtttctacatatatctccaaaatgaaagtaatttatccagcagttgaaggtcggatcaagttttccacaggaagtcactgccatggaagcttttctttaatatttctttcactttgggcagtgatctttgttttataccaatagccaaaaattctccttgcctttaatgtgtgaaactgcattttttcaagtgagattcaaatctgccttttaggacctggctttgtgacagcaaaaaccatctttacaggctcctagaagctgaaggttagagcattataaaatgaagagacagacatgattactcagggtcagcaacctagtgagttagaaaaaaaattaacatagggccctataaggagaaagccaactatgttaagtttacgtgtccaaattttaatgaaattttactaacaattttaaaccatatttttcttcttcatatccatttctaatccatcaaacagcttatgtttacataaaattttatcattcacaaggaagttttaagcacactgtctcatttgatatccacaacttatttttggtaggaaagagagatgtttttcccacctgtcagatgaaaaaactgaagctcaaaaagggttgacttgaccatacagctaatgctgacagatccaagacctagacctaggtcttttgaactcaagtccagcattctcaactatatcaagttactgttcagaatacttaatatctcctctcttcataattatcaatagccccaagctcatggatgacaaatctctgctttatttcttgtctctattttttcactttatagctcctgttataatagcaagtttaatggtataaacacaggataccatcctctcttgcaacacccatgtgcctttgatgagtcaggtagcaagctgtagtagataatgagaaaggccagaggctgcaaaagacagtcaaaggacacgagagaaaggaaggggaagaacaggactccaggactgttttatattatagaaaagcaagagctaaagagcatttacacatgttaaacagatacttgttaagcatagtgcctgacacacggcattagctgttattttatgagattccatcagctctgcctctgtcctctttcttctaacatgaaggtatcatgagaagagaaccttctaacataagctgtaattctaaacctgcacttgtccctctccagcaagaggctagcactgaattcattctactcatactacacacccagttatggaatgtccagagttctcgaagaaaataaatgactttaggaagaggtatacattttttaagtcgctctgcctccaaatctgaacagtcactgtaaatcattcttaagcccagatatgagaacttctgctggaaagtgggaccctctgagtgggtggtcagaaaatacccatgctgatgaaatgacctatgcccaaagaacaaatacttaacgtgggagtggaaccacatgagcctgctcagctctgcataagtaattcaagaaatgggaggcttcaccttaaaaacagtgtgcaaatggcagctagaggttttgataggaagtatgtttgtttcttagtgtttacaaatattaagtactcttgatacaaaatatacttttaaacttcataacctttttataaaagttgttgcagcaaaataatagcctcggttctatgcatatatggattagctataaaaaatgtcaataagattgtacaaggaaaattagagaaagtcacatttagggtttattttttacacttggccagtaaaatagggtaaatcctattagaattttttaaagaactttttttaagtttcctaaatctgtgtgtgtattgtgaagtggtataagaaatgactttgaaccactttgcaattgtagattcccaacaataaaattgaagat

SEQ ID NO: 369 - DNA, 974 bp, Homo sapiens
  source 1..974: mol_type = unassigned DNA
gcactcgcccggctcgcccgctttcgcacccagttcacgcgccacagctatgtgtccccgagccgcgcgggcgcccgcgacgctactcctcgccctgggcgcggtgctgtggcctgcggctggcgcctgggagcttacgattttgcacaccaacgacgtgcacagccggctggagcagaccagcgaggactccagcaagtgcgtcaacgccagccgctgcatgggtggcgtggctcggctcttcaccaaggttcagcagatccgccgcgccgaacccaacgtgctgctgctggacgccggcgaccagtaccagggcactatctggttcaccgtgtacaagggcgccgaggtggcgcacttcatgaacgccctgcgctacgatgccatggcactgggaaatcatgaatttgataatggtgtggaaggactgatcgagccactcctcaaagaggccaaatttccaattctgagtgcaaacattaaagcaaaggggccactagcatctcaaatatcaggactttatttgccatataaagttcttcctgttggtgatgaagttgtgggaatcgttggatacacttccaaagaaaccccttttctctcaaatccagggacaaatttagtgtttgaagatgaaatcactgcattacaacctgaagtagataagttaaaaactctaaatgtgaacaaaattattgcactgggacattcgggttttgaaatggataaactcatcgctcagaaagtgaggggtgtggacgtcgtggtgggaggacactccaacacatttctttacacaggtaattgtttcaaaaggattgcatgggccaggatgtccagataagcactgtgtctcttttgcctttgtaactgttattactctttttactgctatttaatatgtaatgtatattatatgatctataatatatatgtaatatacattaaatgggaacatgtgcaaatcttacaaa

SEQ ID NO: 370 - DNA, 2008 bp, Homo sapiens
  source 1..2008: mol_type = unassigned DNA
actcctcctctctgcccctcagctcgctcatctttcttcccgccccctctcttttccttctttggttctttgaagtgatgagctagcgcaaccacaaaccatacattccttttgtagaaaaacccgtgcctcgaatgaggcgagactcagagaggacccaggcgcggggcggacccctccaattccttcctcgcgcccccgaaagagcggcgcaccagcagccgaactgccggcgcccaggctccctggtccggccgggatgcggccggtacccgctccccgccgggaacaacctctccactcttcctgcagggagctggtgccagccgacagccgcgccagggccgctccgggtaccagggtcggatcgggtgacgtcgcgaacttgcgcctggccgccaagccggcctccaggctgaagaaggacccgccccggccttgacccgggccccgcccctccagccggggcaccgagccccggccctagctgctcgcccctactcgccggcactcgcccggctcgcccgctttcgcacccagttcacgcgccacagctatgtgtccccgagccgcgcgggcgcccgcgacgctactcctcgccctgggcgcggtgctgtggcctgcggctggcgcctgggagcttacgattttgcacaccaacgacgtgcacagccggctggagcagaccagcgaggactccagcaagtgcgtcaacgccagccgctgcatgggtggcgtggctcggctcttcaccaaggttcagcagatccgccgcgccgaacccaacgtgctgctgctggacgccggcgaccagtaccagggcactatctggttcaccgtgtacaagggcgccgaggtggcgcacttcatgaacgccctgcgctacgatgccatggcactgggaaatcatgaatttgataatggtgtggaaggactgatcgagccactcctcaaagaggccaaatttccaattctgagtgcaaacattaaagcaaaggggccactagcatctcaaatatcaggactttatttgccatataaagttcttcctgttggtgatgaagttgtgggaatcgttggatacacttccaaagaaaccccttttctctcaaatccagggacaaatttagtgtttgaagatgaaatcactgcattacaacctgaagtagataagttaaaaactctaaatgtgaacaaaattattgcactgggacattcgggttttgaaatggataaactcatcgctcagaaagtgaggggtgtggacgtcgtggtgggaggacactccaacacatttctttacacaggcaatccaccttccaaagaggtgcctgctgggaagtacccattcatagtcacttctgatgatgggcggaaggttcctgtagtccaggcctatgcttttggcaaatacctaggctatctgaagatcgagtttgatgaaagaggaaacgtcatctcttcccatggaaatcccattcttctaaacagcagcattcctgaagatccaagcataaaagcagacattaacaaatggaggataaaattggataattattctacccaggaattagggaaaacaattgtctatctggatggctcctctcaatcatgccgctttagagaatgcaacatgggcaacctgatttgtgatgcaatgattaacaacaacctgagacacacggatgaaatgttctggaaccacgtatccatgtgcattttaaatggaggtggtatccggtcgcccattgatgaacgcaacaatggcacaattacctgggagaacctggctgctgtattgccctttggaggcacatttgacctagtccagttaaaaggttccaccctgaagaaggcctttgagcatagcgtgcaccgctacggccagtccactggagagttcctgcaggtgggcgatttaaaggaatgctgtccaatctgtattaaccaggatgattcctggaaggagcagcctactgcacagacatacctgaacacctggttctag

SEQ ID NO: 371 - DNA, 3384 bp, Homo sapiens
  source 1..3384: mol_type = unassigned DNA
cgctttcgcacccagttcacgcgccacagctatgtgtccccgagccgcgcgggcgcccgcgacgctactcctcgccctgggcgcggtgctgtggcctgcggctggcgcctgggagcttacgattttgcacaccaacgacgtgcacagccggctggagcagaccagcgaggactccagcaagtgcgtcaacgccagccgctgcatgggtggcgtggctcggctcttcaccaaggttcagcagatccgccgcgccgaacccaacgtgctgctgctggacgccggcgaccagtaccagggcactatctggttcaccgtgtacaagggcgccgaggtggcgcacttcatgaacgccctgcgctacgatgccatggcactgggaaatcatgaatttgataatggtgtggaaggactgatcgagccactcctcaaagaggccaaatttccaattctgagtgcaaacattaaagcaaaggggccactagcatctcaaatatcaggactttatttgccatataaagttcttcctgttggtgatgaagttgtgggaatcgttggatacacttccaaagaaaccccttttctctcaaatccagggacaaatttagtgtttgaagatgaaatcactgcattacaacctgaagtagataagttaaaaactctaaatgtgaacaaaattattgcactgggacattcgggttttgaaatggataaactcatcgctcagaaagtgaggggtgtggacgtcgtggtgggaggacactccaacacatttctttacacaggcaatccaccttccaaagaggtgcctgctgggaagtacccattcatagtcacttctgatgatgggcggaaggttcctgtagtccaggcctatgcttttggcaaatacctaggctatctgaagatcgagtttgatgaaagaggaaacgtcatctcttcccatggaaatcccattcttctaaacagcagcattcctgaagatccaagcataaaagcagacattaacaaatggaggataaaattggataattattctacccaggaattagggaaaacaattgtctatctggatggctcctctcaatcatgccgctttagagaatgcaacatgggcaacctgatttgtgatgcaatgattaacaacaacctgagacacacggatgaaatgttctggaaccacgtatccatgtgcattttaaatggaggtggtatccggtcgcccattgatgaacgcaacaatggaatccatgtggtgtatgatctttcccgaaaacctggagacagagtagtcaaattagatgttctttgcaccaagtgtcgagtgcccagttatgaccctctcaaaatggacgaggtatataaggtgatcctcccaaacttcctggccaatggtggagatgggttccagatgataaaagatgaattattaagacatgactctggtgaccaagatatcaacgtggtttctacatatatctccaaaatgaaagtaatttatccagcagttgaaggtcggatcaagttttccacaggaagtcactgccatggaagcttttctttaatatttctttcactttgggcagtgatctttgttttataccaatagccaaaaattctccttgcctttaatgtgtgaaactgcattttttcaagtgagattcaaatctgccttttaggacctggctttgtgacagcaaaaaccatctttacaggctcctagaagctgaaggttagagcattataaaatgaagagacagacatgattactcagggtcagcaacctagtgagttagaaaaaaaattaacatagggccctataaggagaaagccaactatgttaagtttacgtgtccaaattttaatgaaattttactaacaattttaaaccatatttttcttcttcatatccatttctaatccatcaaacagcttatgtttacataaaattttatcattcacaaggaagttttaagcacactgtctcatttgatatccacaacttatttttggtaggaaagagagatgtttttcccacctgtcagatgaaaaaactgaagctcaaaaagggttgacttgaccatacagctaatgctgacagatccaagacctagacctaggtcttttgaactcaagtccagcattctcaactatatcaagttactgttcagaatacttaatatctcctctcttcataattatcaatagccccaagctcatggatgacaaatctctgctttatttcttgtctctattttttcactttatagctcctgttataatagcaagtttaatggtataaacacaggataccatcctctcttgcaacacccatgtgcctttgatgagtcaggtagcaagctgtagtagataatgagaaaggccagaggctgcaaaagacagtcaaaggacacgagagaaaggaaggggaagaacaggactccaggactgttttatattatagaaaagcaagagctaaagagcatttacacatgttaaacagatacttgttaagcatagtgcctgacacacggcattagctgttattttatgagattccatcagctctgcctctgtcctctttcttctaacatgaaggtatcatgagaagagaaccttctaacataagctgtaattctaaacctgcacttgtccctctccagcaagaggctagcactgaattcattctactcatactacacacccagttatggaatgtccagagttctcgaagaaaataaatgactttaggaagaggtatacattttttaagtcgctctgcctccaaatctgaacagtcactgtaaatcattcttaagcccagatatgagaacttctgctggaaagtgggaccctctgagtgggtggtcagaaaatacccatgctgatgaaatgacctatgcccaaagaacaaatacttaacgtgggagtggaaccacatgagcctgctcagctctgcataagtaattcaagaaatgggaggcttcaccttaaaaacagtgtgcaaatggcagctagaggttttgataggaagtatgtttgtttcttagtgtttacaaatattaagtactcttgatacaaaatatacttttaaacttcataacctttttataaaagttgttgcagcaaaataatagcctcggttctatgcatatatggattagctataaaaaatgtcaataagattgtacaaggaaaattagagaaagtcacatttagggtttattttttacacttggccagtaaaatagggtaaatcctattagaattttttaaagaactttttttaagtttcctaaatctgtgtgtgtattgtgaagtggtataagaaatgactttgaaccactttgcaattgtagattcccaacaataaaattgaagataagc

SEQ ID NO: 372 - DNA, 689 bp, Homo sapiens
  source 1..689: mol_type = unassigned DNA
tggacgtcgtggtgggaggacactccaacacatttctttacacaggcaatccaccttccaaagaggtgcctgctgggaagtacccattcatagtcacttctgatgatgggcggaaggttcctgtagtccaggcctatgcttttggcaaatacctaggctatctgaagatcgagtttgatgaaagaggaaacgtcatctcttcccatggaaatcccattcttctaaacagcagcattcctgaagatccaagcataaaagcagacattaacaaatggaggataaaattggataattattctacccaggaattagggaaaacaattgtctatctggatggctcctctcaatcatgccgctttagagaatgcaacatgggcaacctgatttgtgatgcaatgattaacaacaacctgagacacacggatgaaatgttctggaaccacgtatccatgtgcattttaaatggaggtggtatccggtcgcccattgatgaacgcaacaatggaatccatgtggtgtatgatctttcccgaaaacctggagacagagtagtcaaattagatgttctttgcaccaagtgtcgagtgcccagttatgaccctctcaaaatggacgaggtatataaggtgatcctcccaaacttcctggccaatggtggagatgggttccagatgataaaagatgaatta

SEQ ID NO: 373 - DNA, 738 bp, Homo sapiens
  source 1..738: mol_type = unassigned DNA
gaaatcccattcttctaaacagcagcattcctgaagatccaagcataaaagcagacattaacaaatggaggataaaattggataattattctacccaggaattagggaaaacaattgtctatctggatggctcctctcaatcatgccgctttagagaatgcaacatgggcaacctgatttgtgatgcaatgattaacaacaacctgagacacacggatgaaatgttctggaaccacgtatccatgtgcattttaaatggaggtggtatccggtcgcccattgatgaacgcaacaatggcacaattacctgggagaacctggctgctgtattgccctttggaggcacatttgacctagtccagttaaaaggttccaccctgaagaaggcctttgagcatagcgtgcaccgctacggccagtccactggagagttcctgcaggtgggcgatttaaaggaatgctgtccaatctgtattaaccaggatgattcctggaaggagcagcctactgcacagacatacctgaacacctggttctagtcccactgtgacctggggcaagttctcaacccctctgggcacagggagaaaacctttcctgtttatctcatggactgcagtgaaagttgaatggaaataaatgcttcctaaattgccaagggcttctgaaacacttttgttaataattccacagtccagtgaattaatcctttaaaagcaatcttattttacctggaaa

SEQ ID NO: 374 - DNA, 1440 bp, Homo sapiens
  source 1..1440: mol_type = unassigned DNA
aggtgatctgtgaaaatggttcgctattcacttgacccggagaaccccacgaaatcatgcaaatcaagaggttccaatcttcgtgttcactttaagaacactcgtgaaactgctcaggccatcaagggtatgcatatacgaaaagccacgaagtatctgaaagatgtcactttacagaaacagtgtgtaccattccgacgttacaatggtggagttggcaggtgtgcgcaggccaagcaatggggctggacacaaggtcggtggcccaaaaagagtgctgaatttttgctgcacatgcttaaaaacgcagagagtaatgctgaacttaagggtttagatgtagattctctggtcattgagcatatccaagtgaacaaagcacctaagatgcgccgccggacctacagagctcatggtcggattaacccatacatgagctctccctgccacattgagatgatccttacggaaaaggaacagattgttcctaaaccagaagaggaggttgcccagaagaaaaagttgaggagctcaagcttgggaaaatggtgtgcattccttgtatcgtcattccagttctgctctggatctacaaaaaattcctggagccatatatataccctctggtttcccccttcgttagtcgtatatggcctaagaaagcaatacaagaatccaatgatacaaacaaaggcaaagtaaactttaagggtgcagacatgaatggattaccaacaaaaggaccaacagaaatctgtgataaaaagaaagactaaagaaattttcctaaaggaccccatcatttaaaaaatggacctgataatatgaagcatcttccttgtaattgtctctgacctttttatctgagaccggaattcaggataggagtctagatatttacctgatactaatcaggaaatatatgatatccgtatttaaaatgtagttagttatatttaatgacctcattcctaagttcctttttcgttaatgtagctttcatttctgttattgctgtttgaataatatgattaaatagaaggtttgtgccagtagacattatgttactaaatcagcactttaaaatctttggttctctaattcatatgaatttgctgtttgctctaatttctttgggctcttctaatttgagtggagtacaattttgttgtgaaacagtccagtgaaactgtgcagggaaatgaaggtagaattttgggaggtaataatgatgtgaaacataaagatttaataattactgtccaacacagtggagcagcttgtccacaaatatagtaattactatttattgctctaaggaagattaaaaaaagatagggaaaagggggaaacttctttgaaaaatgaaacatctgttacattaatgtctaattataaaattttaatccttactgcatttcttctgttcctacaaatgta

SEQ ID NO: 375 - DNA, 1036 bp, Homo sapiens
  source 1..1036: mol_type = unassigned DNA
gacagctagtaagataggaagtgaggccaggtaccttgtgggcagtgatgtcattcggtgcgactcctaagatgtctccagagatgggagagctcacccaaaccaggttgcagaagatctggattccacacagcagcggcagcagcaggctgcaacggagaaggggctcatccataccccagtttaccaattcccccacaatggtgatcatggtgggtttaccagctcgaggcaagacctatatctccacaaagctcacacgatatctcaactggataggaacaccaactaaagacaacatggaagccctgcaaatcaggaagcagtgcgccctggcagccctgaaggatgttcacaactatctcagccatgaggaaggtcatgttgcggtttttgatgccaccaacactaccagagaacgacggtcactgatcctgcagtttgcaaaagaacatggttacaagggtgtctgtgaggagatgacctatgaagaaatccaggaacattaccctgaagaatttgcactgcgagaccaagataaatatcgctaccgctatcccaagggagagtcctatgaggatctggttcagcgtctggagccagtgataatggagctagaacgacaggagaatgtactggtgatctgccaccaggctgtcatgcggtgcctcctggcctatttcctggataaaagttcagatgagcttccatatctcaagtgccctctgcacacagtgctcaaactcactcctgtggcttatggctgcaaagtggaatccatctacctgaatgtggaggccgtgaacacacaccgggagaagcctgagaatgtggacatcacccgggaacctgaggaagccctggatactgtcccagcccactactgagccctttccaagaagtcaaactgcctgtgtcctcatcgccttccacctttaggaaatgctatctttgctcttctcctactctgccttggcctcactgaggcaccccacttccagtgaagaagtcctccgcaactcccaaacaagcctcg

SEQ ID NO: 376 - DNA, 1929 bp, Homo sapiens
  source 1..1929: mol_type = unassigned DNA
gacagctagtaagataggaagtgaggccaggtaccttgtgggcagtgatgtcattcggtgcgactcctaagatgtctccagagatgggagagctcacccaaaccaggttgcagaagatctggattccacacagcagcggcagcagcaggctgcaacggagaaggggctcatccataccccagtttaccaattcccccacaatggtgatcatggtgggtttaccagctcgaggcaagacctatatctccacaaagctcacacgatatctcaactggataggaacaccaactaaagtgtttaatttaggccagtatcgacgagaggcagtgagctacaagaactatgaattctttcttccagacaacatggaagccctgcaaatcaggaagcagtgcgccctggcagccctgaaggatgttcacaactatctcagccatgaggaaggtcatgttgcggtttttgatgccaccaacactaccagagaacgacggtcactgatcctgcagtttgcaaaagaacatggttacaaggtgtttttcattgagtccatttgtaatgaccctggcataattgcagaaaacatcaggcaagtgaaacttggcagccctgattatatagactgtgaccgggaaaaggttctggaagactttctaaagagaattgagtgctatgaggtcaactaccaacccttggatgaggaactggacagccacctgtcctacatcaagatcttcgacgtgggcacacgctacatggtgaaccgagtgcaggatcacatccagagccgcacagtctactacctcatgaatatccatgtcacacctcgctccatctacctttgccgacatggcgagagtgaactcaacatcagaggccgcatcggaggtgactctggcctctcagttcgcggcaagcagtatgcctatgccctggccaacttcattcagtcccagggcatcagctccctgaaggtgtggaccagtcacatgaagaggaccatccagacagctgaggccctgggtgtcccctatgagcagtggaaggccctgaatgagattgatgcgggtgtctgtgaggagatgacctatgaagaaatccaggaacattaccctgaagaatttgcactgcgagaccaagataaatatcgctaccgctatcccaagggagagtcctatgaggatctggttcagcgtctggagccagtgataatggagctagaacgacaggagaatgtactggtgatctgccaccaggctgtcatgcggtgcctcctggcctatttcctggataaaagttcagatgagcttccatatctcaagtgccctctgcacacagtgctcaaactcactcctgtggcttatggctgcaaagtggaatccatctacctgaatgtggaggccgtgaacacacaccgggagaagcctgagaatgtggacatcacccgggaacctgaggaagccctggatactgtcccagcccactactgagccctttccaagaagtcaaactgcctgtgtcctcatcgccttccacctttaggaaatgctatctttgctcttctcctactctgccttggcctcactgaggcaccccacttccagtgaagaagtcctccgcaactcccaaacaagcctcgcttgctggccgcaaccaaggagctatctagctctggaggaaactttctttcttaattcctattctctgacgaataaagacttactgcctacaagaggagaggaggaggtcatggcgaggcttttccagttgttctcaaggtactgaccctaatcctgacccagctctgctgctgtgagggcatggaatgggtgaggatttcctggagggaaaagttctacagtagcacctccaaagatgggggagaagataggtgcctgtgagttcctgtgggccttgttccagcaaggtggc

SEQ ID NO: 377 - DNA, 1591 bp, Homo sapiens
  source 1..1591: mol_type = unassigned DNA
gggaaccaacgaacacctccaggcttcctctttgatgccacccactggacctgccttgggggtctgtaaatgcaagagaaccgagtgttggataattagcgatggaagaaaaaacctctagaataaaagtgtttaatttaggccagtatcgacgagaggcagtgagctacaagaactatgaattctttcttccagacaacatggaagccctgcaaatcaggaagcagtgcgccctggcagccctgaaggatgttcacaactatctcagccatgaggaaggtcatgttgcggtttttgatgccaccaacactaccagagaacgacggtcactgatcctgcagtttgcaaaagaacatggttacaaggtgtttttcattgagtccatttgtaatgaccctggcataattgcagaaaacatcaggcaagtgaaacttggcagccctgattatatagactgtgaccgggaaaaggttctggaagactttctaaagagaattgagtgctatgaggtcaactaccaacccttggatgaggaactggacagccacctgtcctacatcaagatcttcgacgtgggcacacgctacatggtgaaccgagtgcaggatcacatccagagccgcacagtctactacctcatgaatatccatgtcacacctcgctccatctacctttgccgacatggcgagagtgaactcaacatcagaggccgcatcggaggtgactctggcctctcagttcgcggcaagcagtatgcctatgccctggccaacttcattcagtcccagggcatcagctccctgaaggtgtggaccagtcacatgaagaggaccatccagacagctgaggccctgggtgtcccctatgagcagtggaaggccctgaatgagattgatgcgggtgtctgtgaggagatgacctatgaagaaatccaggaacattaccctgaagaatttgcactgcgagaccaagataaatatcgctaccgctatcccaagggagagtcctatgaggatctggttcagcgtctggagccagtgataatggagctagaacgacaggagaatgtactggtgatctgccaccaggctgtcatgcggtgcctcctggcctatttcctggataaaagttcagatgagcttccatatctcaagtgccctctgcacacagtgctcaaactcactcctgtggcttatggctgcaaagtggaatccatctacctgaatgtggaggccgtgaacacacaccgggagaagcctgagaatgtggacatcacccgggaacctgaggaagccctggatactgtcccagcccactactgagccctttccaagaagtcaaactgcctgtgtcctcatcgccttccacctttaggaaatgctatctttgctcttctcctactctgccttggcctcactgaggcaccccacttccagtgaagaagtcctccgcaactcccaaacaagcctcgcttgctggccgcaaccaaggagctatctagctctggaggaaactttctttcttaattcctattctctgacgaataaagacttactgcctacaagaggagaggaggaggtcatggcgaggc

SEQ ID NO: 378 - DNA, 3494 bp, Homo sapiens
  source 1..3494: mol_type = unassigned DNA
gttacagggcaggcgccggggccaaggcagggagggatcttaggagagatcgtaggacatctgaagagctgccatgtctggggcatcttcctcagaacagaacaacaacagctatgaaaccaaaaccccaaatcttcgaatgtcagagaagaaatgttcatgggcctcctacatgaccaactccccgactctgatcgttatgattggtttgccagcccggggtaaaacctacgtgtccaagaaactaacacgctacctcaactggattggagtccccaccaaagtgtttaatcttggggtgtatcggcgtgaagcagtcaagtcctataagtcctacgacttctttcggcatgacaatgaggaggccatgaagatccgcaaacagtgtgctctggtggcgctggaagatgttaaggcgtatctcactgaggagaatggtcagattgcggtgtttgatgccaccaatacaacccgggagaggagggacatgattttgaactttgctgaacagaattccttcaaggtattctttgtggaatccgtctgtgatgatcctgatgtcattgctgccaatattctggaggttaaggtatcaagccctgactatcctgaaaggaacagagagaacgtgatggaggacttcctgaagagaattgaatgctacaaagttacctaccgacctcttgacccagacaactatgacaaggatctttctttcatcaaggtgataaacgtgggccagcgatttttagtcaacagagtccaggactacatccagagcaagatagtctactacctcatgaatatccacgtccagcctcgcaccatttacctttgccggcatggagaaagcgagttcaatctcttggggaagattgggggtgactctggcctctcggtgcggggaaagcagtttgcccaagctctaaggaaatttctggaggaacaggaaataacagacctcaaagtgtggacaagccagttgaagaggaccatacagactgctgaatctctcggggtgccctatgagcagtggaagattctgaatgagattgatgctggtgtgtgtgaagagatgacctatgcagagattgagaaacggtacccagaagagtttgcacttcgagatcaagagaagtatctgtatcgatatcctggtggggagtcataccaggacctggtgcagcggctggagcctgtcatcatggagctggaacgtcagggcaatgtcctcgtcatctcccaccaggctgtcatgcgctgcctcctggcctacttcttggataagggcgcagatgagctaccatacttgagatgccctctccataccatcttcaaacttactcctgtggcctatgggtgcaaagtggaaacaattaaacttaacgtggaggctgtgaacacgcaccgtgacaagccaactgcagcagagaccacactggctgtgcgcagacgcccctccgcagcgtccctcatgttgccttgctaatgatgtggatgttcaggcctcacctctccaaacgactgggatctactgaaaagcttgggatgtcagcttcacagaggctagaacaggaagttaagtgggaactggactttgggggccaccaaaacgaggcctggagaaacgtcaccatatttcctcccctcctgcctaatgggaatatcagttacactgaaaaatttaacttccctgtgcctcaaaacatttagcaacctgaaccagtgactttttgtcatctctgtgctgagtttggtccaagttggtcaatctcattctgtataggcatttaacatcctacctgtgactgtctgcatcctttgctggctcttttttgcccaaagtgcaaatgcacttcttcagatttacttttcaagtgagaaggtaagagctggtctctgccactgttccaggcgagcaggctagagtctaatatacttatgctagcagttaccatttgccacattggaagcaagagacaaatcaccaggtgaatggagggtcttctgagaaattcagtccctaaaacatcttctctgccttgatagaagaacagtgtcagtggcaaccttttcatttagagaagtttttcttgttccaggcccttcaggacaggatctgactgcaagactccccaaaatgggtacccatcttctaagttcccttttgtagctactgtacttttgacttgatgcatgtgcctctcatgcatcaagatggggctgatgtggttctcctgggtggttgggaatgtggactagacagaaaagtagagtgccatttatatcacgtgagtaagtcaagaaagctccttgagaatcagcccgatcagggagtgttttggcttcagaacaggtggaaggagacacgcccctctgtgggctctgtcaccatgatacagtccttgagagagctgtggctgtgacttggagggcagtagtctcctgatacctgcctcttggccactggtcactattgtggtcactgatctctcatataaaagtgagggtggcggggtcatggaccagcgcctcagtgcattagtcattcgcttttccttacagacaaatcagataactcttccccagtgattgtcaaatgtatgaatgtatctctgtaaatgtggttttgacatgtcactgttactgaaggagagtatggaatccccacaggatattatatcttgcaaggaaagtctattttttaaagaatagtatgtttttagctttacttttctttcttttccttttcactcaaatgctcacttgctgggcaaaagggtgagtagcaagaaaagtaatgatatgtagcttttctcaaatggttcttttatactgtggatgatacaggactctgttacctaagatgtgataagctgggctgcaggcggttcagcatccagcaactaggagctgcttttctacgtacaaagctgccttcaggaaggctccttaccctgtagcagatgattttcatctggctgcctaccgcatgctgtactataatgatttagttgtgatatggatttctctctgcatcgaaaactgtcttttgatgatcagacaatgtttatatttagttatttattctatccatgtaaggcatttttgagttttcttgtcactgtttgcatgtatttaatcagaatgtaatataatttatgttgtcaggtttttttttgtttgtttgtttggggttttttttgtagaaatttaggtagttagagcttttaagtctaatgtcatattaacttaagttaaatttccagaacgtagatatctgtcttctgtaaaaggaaaataacgatgttaagggacagtgaattttttttgaatactttgtttctcattgatttttattgtaagtgtaaaccaagagatgcatttctctggagaagtgtttatctcctggattaataaaatcatgctaaaatatgcgagtaatatgtattgcttttgtaataagaacataaaataaaattatttttaattaa

SEQ ID NO: 379 - DNA, 7094 bp, Homo sapiens
  source 1..7094: mol_type = unassigned DNA
ggcgactgtagcgccggtcccggccacaagctgtcggctcggttcggtcgcgttacagggcaggcgccggggccaaggcagggagggatcttaggagagatcgtaggacatctgaagagctgccatgtctggggcatcttcctcagaacagaacaacaacagctatgaaaccaaaaccccaaatcttcgaatgtcagagaagaaatgttcatgggcctcctacatgaccaactccccgactctgatcgttatgattggtttgccagcccggggtaaaacctacgtgtccaagaaactaacacgctacctcaactggattggagtccccaccaaagtgtttaatcttggggtgtatcggcgtgaagcagtcaagtcctataagtcctacgacttctttcggcatgacaatgaggaggccatgaagatccgcaaacagtgtgctctggtggcgctggaagatgttaaggcgtatctcactgaggagaatggtcagattgcggtgtttgatgccaccaatacaacccgggagaggagggacatgattttgaactttgctgaacagaattccttcaaggtattctttgtggaatccgtctgtgatgatcctgatgtcattgctgccaatattctggaggttaaggtatcaagccctgactatcctgaaaggaacagagagaacgtgatggaggacttcctgaagagaattgaatgctacaaagttacctaccgacctcttgacccagacaactatgacaaggatctttctttcatcaaggtgataaacgtgggccagcgatttttagtcaacagagtccaggactacatccagagcaagatagtctactacctcatgaatatccacgtccagcctcgcaccatttacctttgccggcatggagaaagcgagttcaatctcttggggaagattgggggtgactctggcctctcggtgcggggaaagcagtttgcccaagctctaaggaaatttctggaggaacaggaaataacagacctcaaagtgtggacaagccagttgaagaggaccatacagactgctgaatctctcggggtgccctatgagcagtggaagattctgaatgagattgatgctggtgtgtgtgaagagatgacctatgcagagattgagaaacggtacccagaagagtttgcacttcgagatcaagagaagtatctgtatcgatatcctggtggggagtcataccaggacctggtgcagcggctggagcctgtcatcatggagctggaacgtcagggcaatgtcctcgtcatctcccaccaggctgtcatgcgctgcctcctggcctacttcttggataagggcgcagatgagctaccatacttgagatgccctctccataccatcttcaaacttactcctgtggcctatgggtgcaaagtggaaacaattaaacttaacgtggaggctgtgaacacgcaccgtgacaagccaactaacaacttccccaagaaccaaacccctgtaaggatgagaaggaacagctttacgcctctgtccagttcgaatacaataaggcgtccaagaaattacagtgttgggagccggcccctcaagcccctcagccctctccgtgcccaggacatgcaagaaggggccgactagccgaagacccaagtcagcattccggtggtgtaactgtgtgtttccctccagccctggcctcctgcccttgtcactaatcaccaaggagtcattaacttcctccctctatgcccacccctgacacttcaccattaatcttaacacagaacatgaggttatgtgtttataggacaacttaagctgttcttcagtttgaaacatcttttcacccaggggcaagttagcaaattgagtcttttaggacagattctcagatgggatgatctggaggaggaggaaaaagatacactcccttggggctgagcatgccccacactcttggatcttctctctgttccctggtgtcttcactaatgtcctcatgttggtgaagtgttgggggatggagggcgggtgagcagtcgggggacaaaaagtctatttttccttcacttttgtctcttcaatgtgtgttttcctcacactccttacttgactgctttcttcccccactttcatgtcccctctggattgtccagtgtaatgcatggcattgtggtgtctgtctaggaaggaaggggtgattgacaagagacaagtctggcccagttaatgctttctgcagtgggtctaaatggatctggactggaggagtctttcctttcctttctcccttcctctccagccaggtcctgtaagggccagcccagactacaggacatccacagaatattctggagcttgcaagtagacatagggtgagagttcttgcctcctttcatgagaaacagttctaagtcttcgatgccctgggagaatctggctctgagcatgtgggaaatgtcttggtttttatttttaatttagagtcaggcctgggtcttttgaggtctgcagagtggggtttaggagagtagggtgggctctagctcttgcagggctcttagagagcagtcatgtcttttctcccatgactctcaggttctttgccaatcacagcaacttttcctgccaaagccagtatcctctggggctgtttagaagggcagttagattcaggagtcaccactgatgtttgagttgctcaaggcaagaggcagagaagagttcactaaaactgcttatttttgaataatttcagcacactgtccttaagaagaaagaaacatcaaaacaaaatagtttttacatgaccatttttttcccaaatgtggaaaagcttgatgatgaatttaatctctctcattggagtattcttttgttcataaagagaaactatctcatcttgatgtccagagaagtccttggaaccctgtgggatctagctcgtaactgtttgtatttctctattcacttctgtcatttcattttctttgtagggttaaacagaaaatgtttagggaagaaattcttagccccttgatgaccatgatggcttattctctttcccaattttgcatgcaaaatgtacgaatatatgtatgtttttctgagaggcaagtttagggttctcatgggattttaaaaagagataggtgactccccaccttaaagttatctgctggtcttttagaggtaaccagtgagaaggagttagctattttccaagggtgttttcatttggtaatggaagactttttgctgtggttctcatccaggagtattccttagaattgcctttaggattgttgaatcataaacatgcctgtgtccaccttatgcttaatactgactcagaatctctgggatctgggtctggacatgcatgtatttaagtagcttcccggatgattctgattcatagctcgggttaagaactccaccttaggaagttaggtggaaaaatactggatagtagtttctcagacaaaagtgtcagcctaggaattctgaattcctcatagtcctgaaaggacagttctttgggtttgatgtttgagcagatcataatgttaaatgatataaccccctggaaggcaggctgctgtgttttagagggttattctaggttctagtcccatctttaaccctttacattgctgagtgatgtggaacaaatcactgaattaaataattgtctctagagagcagctggggattttaagcaccctggagagaggtgcagaccctgccaggatgataaaggttgtcatcactggcaactgactcctgaccccgggtcctttactcgtatgtcccaagtaggataccataggcagcttctaaaggctgcttacctagattcttctcaaaattgtgtccaagatgttaagtaacctgctattcctgtttagtggttacataacatgtacttagtgtctttgtggagctttgggctggtaggggcagggataggggaaagctaaacagaagtagaagaaaaggtccttgtccagaggaaggttattttaagagacaggacatgtaatttataacaaatggacatttgcaatatagcaacagtctgagtctagaagtgttcaaccatcacatcgcttctcctgacttttctgttgtcctatggctatgagactacaggggttgggggatggggatgcccccaccaccaccagtgtgagaatgagatatggttggggaggcgtgtttggcacttttacaaggttgcattgtccacatttgcttggatggtggcatctgtagcccaaatgggcattcagtcttttcttctgctgtgaggtaagagtaattcagacctaatgaatgagaagagggagcactttgatccacagactttggattaacactgtacccactcttagcaaaaggggacttctctaacaagctagcattgtgttaacctgtcattaacccagcattagagacaggtcactgggatgttcattctggctctcagcctgctgttatttccccactctcacctgtgctagttcgctttctccagaagaggagctgaggtggtcttatcctcagataggacatgagaaattggaatttggcaagcaagggcttcagcatcctttagtttctaaagcaagatcccttcagagaagtctagcaggaagaagccaggagaatgtagaatggaaaagagctcttactccaaattttagagaagtttcagctctacttctcatcttttctctcctggtcttacttgaatgcatgttggtaatctgtatacattactatgactgtgtctatcacaagtcctacaaaataaaaatggacttaaaagtactctctgctgaggctgtaagttttgttttgtgagaaataggtaaagacattagcatttaatctactggaataagctggttgctgtggcttatacctgtagtcccagatacttgggaggctgaggcaggagaatcacttgagaccagcctgggcaatatagtgagacctcacctctaaaaaagttttttataaatttacttgtctaaagtggggaaagggaaattattctgttttcttattcttgcttcaagactatgacagatttgaaagagaattctaaagcagatttagagaacctgcttctcttcttatctcctaatccctaaattgtaatttagctcttatctgtattgttgttttgttttggtaaagggatgatttttacattgagttttaaagtagaataagaaaagcttctaaaaacttgcattgtgctagggatctgccctatatctttgcctctggtgtttcgttgttgttgttattgtttgtttgtttccaaagaagttggagttaaggacacaatatatttgtacccctagactgaatgggtgagtattccatatgaggatctgggtaatcctctttgcaacccacatttggtcttcagagacactggcattttgaagaaacatatgatatagctgtttggaaataaattcatctatgttactttttttttcttttttttttttttttatgagcaggagatcttaattgacagaaactcattggtggttggagtggccaatgggcacgggaaaaagtatccagtaatcagaagaattgtatctgggttatgtaatcttatgcacattccattgtctttgccaagcccagaagccatgttgtgttcattgttaagaaatttgatagatttacccagcttttctatgtattttgacttattgaaaatatgtaacaactgagtcgggttgcagcactggtggggtagaatcgactttccctgaaggtgacacagatgtcagaattgtgtccagggatttaatttagacccatactgtccaggagactgtctctagttggatctctgtgctgactgactgacagacagactttagtgtctgtgtgctgactgacagactctagtagtgtctatatgttgaccaactggtagaccaggaggatctgtgtgctgattgactctagtaggatctgtttgtcactgacagactgtagtagtgtctgtgtgctgactgatagatagactatagtaaaatttgggtgttgcctgactaacggtctagggtctgtaagctgacagtctgcctgctttctgattgtatccattgaagtgtatgtacattatggtaattctctgtctattaaatgtgtctaacaaaggaaggaattaagcactccacgtgttttctttataggggagttctgtacactatgattttaaatagatatttcttatatagtagtggccaaattctcattattttgtacaagataaaggttatgcatcacttttatggtattttgtgaactcagctaagggaatgcctgttcagagcctggagttgttacctttacttgaagtcatctcatccagtcccctgctttagggcaggacttcagttccactgttcatttctgaagcttctgtgtccccagcttaccctgttctgaaatgttgtattccattggacagggctgctatttttagtcagccatgcatttggattttacacttaatctagtaagtaaaaatgagaagaaaatttggcatttaaaaattgattttaagggttggcaaaagtattttttccagtaagcctttcactggatatctgtgaccaatgtttacctacgcaatgtttttgtatctgaattgcttatgtacgttttttattatattgacctaacaagaagatcaacttatgctggtatggtgatggttttgctatggcaaaatcaaagggctgatcatacatggtgccctttgggaagggggatggtgtggggctgagcacctctgggttgaatgggaatgggtcagattgggaagcctaggaagagagttctactgtagatttcctaggcactgctctgttgaaataggaacataagtctttagcaacattctgatttaatcgggtgacactgataacaaagtatgccactcagatccatttaaagtgtgcataactgtatttgaaatgtgtttttgtgtgcgtgtgtgtagaatgggtaaataaaattgttgagtaacttgaacctatcagaa

SEQ ID NO: 380 - DNA, 1783 bp, Homo sapiens
  source 1..1783: mol_type = unassigned DNA
tttcccagtattgcctcactatagaagtctggatcgcttgctacaatttgtgctatgaggcgtctcatctcaggggcacaagctggattcaagactcctccttcgacgacatagtacacactagtaaagaggcaagagttgtctgctgggaccacggttctgacatctgaagagctgccatgtctggggcatcttcctcagaacagaacaacaacagctatgaaaccaaaaccccaaatcttcgaatgtcagagaagaaatgttcatgggcctcctacatgaccaactccccgactctgatcgttatgattggtttgccagcccggggtaaaacctacgtgtccaagaaactaacacgctacctcaactggattggagtccccaccaaaggccaagaaacaagtcccatttggtggggccatcatattattttgctgctgaaggatttgggtgtcttctacagtgtttaatcttggggtgtatcggcgtgaagcagtcaagtcctataagtcctacgacttctttcggcatgacaatgaggaggccatgaagatccgcaaacagtgtgctctggtggcgctggaagatgttaaggcgtatctcactgaggagaatggtcagattgcggtgtttgatgccaccaatacaacccgggagaggagggacatgattttgaactttgctgaacagaattccttcaaggtattctttgtggaatccgtctgtgatgatcctgatgtcattgctgccaatattctggaggttaaggtatcaagccctgactatcctgaaaggaacagagagaacgtgatggaggacttcctgaagagaattgaatgctacaaagttacctaccgacctcttgacccagacaactatgacaaggatctttctttcatcaaggtgataaacgtgggccagcgatttttagtcaacagagtccaggactacatccagagcaagatagtctactacctcatgaatatccacgtccagcctcgcaccatttacctttgccggcatggagaaagcgagttcaatctcttggggaagattgggggtgactctggcctctcggtgcggggaaagcagtttgcccaagctctaaggaaatttctggaggaacaggaaataacagacctcaaagtgtggacaagccagttgaagaggaccatacagactgctgaatctctcggggtgccctatgagcagtggaagattctgaatgagattgatgctggtgtgtgtgaagagatgacctatgcagagattgagaaacggtacccagaagagtttgcacttcgagatcaagagaagtatctgtatcgatatcctggtggggagtcataccaggacctggtgcagcggctggagcctgtcatcatggagctggaacgtcagggcaatgtcctcgtcatctcccaccaggctgtcatgcgctgcctcctggcctacttcttggataagggcgcagatgagctaccatacttgagatgccctctccataccatcttcaaacttactcctgtggcctatgggtgcaaagtggaaacaattaaacttaacgtggaggctgtgaacacgcaccgtgacaagccaactgcagcagagaccacactggctgtgcgcagacgcccctccgcagcgtccctcatgttgccttgctaatgatgtggatgttcaggcctcacctctccaaacgactgggatctactgaaaagcttgggatgtcagcttcacagaggctagaacaggaagttaagtgggaactggactttggggg

SEQ ID NO: 381 - DNA, 1245 bp, Homo sapiens
  source 1..1245: mol_type = unassigned DNA
gatgaggcctttactggttcctatgatttcaggaggttaaggtatcaagccctgactatcctgaaaggaacagagagaacgtgatggaggacttcctgaagagaattgaatgctacaaagttacctaccgacctcttgacccagacaactatgacaaggatctttctttcatcaaggtgataaacgtgggccagcgatttttagtcaacagagtccaggactacatccagagcaagatagtctactacctcatgaatatccacgtccagcctcgcaccatttacctttgccggcatggagaaagcgagttcaatctcttggggaagattgggggtgactctggcctctcggtgcggggaaagcagtttgcccaagctctaaggaaatttctggaggaacaggaaataacagacctcaaagtgtggacaagccagttgaagaggaccatacagactgctgaatctctcggggtgccctatgagcagtggaagattctgaatgagattgatgctggtgtgtgtgaagagatgacctatgcagagattgagaaacggtacccagaagagtttgcacttcgagatcaagagaagtatctgtatcgatatcctggtggggagtcataccaggacctggtgcagcggctggagcctgtcatcatggagctggaacgtcagggcaatgtcctcgtcatctcccaccaggctgtcatgcgctgcctcctggcctacttcttggataagggcgcagggtgcaaagtggaaacaattaaacttaacgtggaggctgtgaacacgcaccgtgacaagccaactgcagcagagaccacactggctgtgcgcagacgcccctccgcagcgtccctcatgttgccttgctaatgatgtggatgttcaggcctcacctctccaaacgactgggatctactgaaaagcttgggatgtcagcttcacagaggctagaacaggaagttaagtgggaactggactttgggggccaccaaaacgaggcctggagaaacgtcaccatatttcctcccctcctgcctaatgggaatatcagttacactgaaaaatttaacttccctgtgcctcaaaacatttagcaacctgaaccagtgactttttgtcatctctgtgctgagtttggtccaagttggtcaatctcattctgtataggcatttaacatcctacctgtgactgtctgcatcctttgctggctcttttttgcccaaagtgcaaatgcac

SEQ ID NO: 382 - DNA, 1679 bp, Homo sapiens
  source 1..1679: mol_type = unassigned DNA
gacatctgaagagctgccatgtctggggcatcttcctcagaacagaacaacaacagctatgaaaccaaaaccccaaatcttcgaatgtcagagaagaaatgttacgaagtcttgctctgtcgcccaggctggagtgcagtgacgggatcatggctcactgcaaccttgaactcctgagctcaagcaatcctcctgagtagctgggactatagcatgggcctcctacatgaccaactccccgactctgatcgttatgattggtttgccagcccggggtaaaacctacgtgtccaagaaactaacacgctacctcaactggattggagtccccaccaaagtgtttaatcttggggtgtatcggcgtgaagcagtcaagtcctataagtcctacgacttctttcggcatgacaatgaggaggccatgaagatccgcaaacagtgtgctctggtggcgctggaagatgttaaggcgtatctcactgaggagaatggtcagattgcggtgtttgatgccaccaatacaacccgggagaggagggacatgattttgaactttgctgaacagaattccttcaaggtattctttgtggaatccgtctgtgatgatcctgatgtcattgctgccaatattctggaggttaaggtatcaagccctgactatcctgaaaggaacagagagaacgtgatggaggacttcctgaagagaattgaatgctacaaagttacctaccgacctcttgacccagacaactatgacaaggatctttctttcatcaaggtgataaacgtgggccagcgatttttagtcaacagagtccaggactacatccagagcaagatagtctactacctcatgaatatccacgtccagcctcgcaccatttacctttgccggcatggagaaagcgagttcaatctcttggggaagattgggggtgactctggcctctcggtgcggggaaagcagtttgcccaagctctaaggaaatttctggaggaacaggaaataacagacctcaaagtgtggacaagccagttgaagaggaccatacagactgctgaatctctcggggtgccctatgagcagtggaagattctgaatgagattgatgctggtgtgtgtgaagagatgacctatgcagagattgagaaacggtacccagaagagtttgcacttcgagatcaagagaagtatctgtatcgatatcctggtggggagtcataccaggacctggtgcagcggctggagcctgtcatcatggagctggaacgtcagggcaatgtcctcgtcatctcccaccaggctgtcatgcgctgcctcctggcctacttcttggataagggcgcagatgagctaccatacttgagatgccctctccataccatcttcaaacttactcctgtggcctatgggtgcaaagtggaaacaattaaacttaacgtggaggctgtgaacacgcaccgtgacaagccaactaacaacttccccaagaaccaaacccctgtaaggatgagaaggaacagctttacgcctctgtccagttcgaatacaataaggcgtccaagaaattacagtgttgggagccggcccctcaagcccctcagccctctccgtgcccaggacatgcaagaaggggccgactagccgaagacccaagtcagcattccggtggtgtaac

SEQ ID NO: 383 - DNA, 1999 bp, Homo sapiens
  source 1..1999: mol_type = unassigned DNA
gaggctgacgtacgcgtctgcggccagcccggactctttaaaagccggcggtgcgcggggcatcccagccaagccggagaggaggcgagcagcagggcctggtggcgagagcgcggctgtcactgcgcccgagcatcccagagctttccgagcggacgagccggccgtgccgggcatccccagcctcgctaccctcgcagcacacgtcgagccccgcacaggcgagggtccggaacttagcccaaagcacgtttcccctggcagcgcaggaaacgcccggccgcgcgccggcgcacgcccccctctcctcctttgttccgggggtcggcggccgctctcctgccagcgtcgggatctcggccccgggaggcgggccgtcgggcgcagccgcgaagatgccgttggaactgacgcagagccgagtgcagaagatctgggtgcccgtggaccacaggccctcgttgcccagatcctgtgggccaaagctgaccaactcccccaccgtcatcgtcatggtgggcctccccgcccggggcaagacctacatctccaagaagctgactcgctacctcaactggattggcgtccccacaaaagtgttcaacgtcggggagtatcgccgggaggctgtgaagcagtacagctcctacaacttcttccgccccgacaatgaggaagccatgaaagtccggaagcaatgtgccttagctgccttgagagatgtcaaaagctacctggcgaaagaagggggacaaattgcggttttcgatgccaccaatactactagagagaggagacacatgatccttcattttgccaaagaaaatgactttaaggcgtttttcatcgagtcggtgtgcgacgaccctacagttgtggcctccaatatcatggaagttaaaatctccagcccggattacaaagactgcaactcggcagaagccatggacgacttcatgaagaggatcagttgctatgaagccagctaccagcccctcgaccccgacaaatgcgacagggacttgtcgctgatcaaggtgattgacgtgggccggaggttcctggtgaaccgggtgcaggaccacatccagagccgcatcgtgtactacctgatgaacatccacgtgcagccgcgtaccatctacctgtgccggcacggcgagaacgagcacaacctccagggccgcatcgggggcgactcaggcctgtccagccggggcaagaagtttgccagtgctctgagcaagttcgtggaggagcagaacctgaaggacctgcgcgtgtggaccagccagctgaagagcaccatccagacggccgaggcgctgcggctgccctacgagcagtggaaggcgctcaatgagatcgacgcgggcgtctgtgaggagctgacctacgaggagatcagggacacctaccctgaggagtatgcgctgcgggagcaggacaagtactattaccgctaccccaccggggagtcctaccaggacctggtccagcgcttggagccagtgatcatggagctggagcggcaggagaatgtgctggtcatctgccaccaggccgtcctgcgctgcctgcttgcctacttcctggataagagtgcagaggagatgccctacctgaaatgccctcttcacaccgtcctgaaactgacgcctgtcgcttatggctgccgtgtggaatccatctacctgaacgtggagtccgtctgcacacaccgggagaggtcagaggatgcaaagaagggacctaacccgctcatgagacgcaatagtgtcaccccgctagccagccccgaacccaccaaaaagcctcgcatcaacagctttgaggagcatgtggcctccacctcggccgccctgcccagctgcctgcccccggaggtgcccacgcagctgcctggacaacctttgctagggcaagcctgtctgtaagtatctctccgatcatcgctgctgcttgcactgctttcttcctgcttgctcatttggcctcc

SEQ ID NO: 384 - DNA, 4216 bp, Homo sapiens
  source 1..4216: mol_type = unassigned DNA
aggcgagcagcagggcctggtggcgagagcgcgccgcgaagatgccgttggaactgacgcagagccgagtgcagaagatctgggtgcccgtggaccacaggccctcgttgcccagatcctgtgggccaaagctgaccaactcccccaccgtcatcgtcatggtgggcctccccgcccggggcaagacctacatctccaagaagctgactcgctacctcaactggattggcgtccccacaaaagtgttcaacgtcggggagtatcgccgggaggctgtgaagcagtacagctcctacaacttcttccgccccgacaatgaggaagccatgaaagtccggaagcaatgtgccttagctgccttgagagatgtcaaaagctacctggcgaaagaagggggacaaattgcggttttcgatgccaccaatactactagagagaggagacacatgatccttcattttgccaaagaaaatgactttaaggcgtttttcatcgagtcggtgtgcgacgaccctacagttgtggcctccaatatcatggaagttaaaatctccagcccggattacaaagactgcaactcggcagaagccatggacgacttcatgaagaggatcagttgctatgaagccagctaccagcccctcgaccccgacaaatgcgacagggacttgtcgctgatcaaggtgattgacgtgggccggaggttcctggtgaaccgggtgcaggaccacatccagagccgcatcgtgtactacctgatgaacatccacgtgcagccgcgtaccatctacctgtgccggcacggcgagaacgagcacaacctccagggccgcatcgggggcgactcaggcctgtccagccggggcaagaagtttgccagtgctctgagcaagttcgtggaggagcagaacctgaaggacctgcgcgtgtggaccagccagctgaagagcaccatccagacggccgaggcgctgcggctgccctacgagcagtggaaggcgctcaatgagatcgacgcgggcgtctgtgaggagctgacctacgaggagatcagggacacctaccctgaggagtatgcgctgcgggagcaggacaagtactattaccgctaccccaccggggagtcctaccaggacctggtccagcgcttggagccagtgatcatggagctggagcggcaggagaatgtgctggtcatctgccaccaggccgtcctgcgctgcctgcttgcctacttcctggataagagtgcagaggagatgccctacctgaaatgccctcttcacaccgtcctgaaactgacgcctgtcgcttatggctgccgtgtggaatccatctacctgaacgtggagtccgtctgcacacaccgggagaggtcagaggatgcaaagaagggacctaacccgctcatgagacgcaatagtgtcaccccgctagccagccccgaacccaccaaaaagcctcgcatcaacagctttgaggagcatgtggcctccacctcggccgccctgcccagctgcctgcccccggaggtgcccacgcagctgcctggacaacctttgctagggcaagcctgtctaacatgaaaggctcccggagcagcgctgactcctccaggaaacactgaggcagacgtgtcggttccattccatttccatttctgcagcttagcttgtgtcctgccctccgcccgaggcaaaacgtatcctgaggacttcttccggagagggtggggtggagcagcgggggagccttggccgaagagaaccatgcttggcaccgtctgtgtcccctcggccgctggacaccagaaagccacgtgggtccctggcgccctgcctttagccgtggggcccccacctccactctctgggtttcctaggaatgtccagcctcggagaccttcacaaagccttgggagggtgatgagtgctggtcctgacaggaggccgctggggacactgtgctgttttgtttcgtttctgtgatctcccggcacgtttggagctgggaagaccacactggtggcagaatcctaaaattaaaggaggcaggctcctagttgctgaaagttaaggaatgtgtaaaacctccacgtgactgtttggtgcatcttgacctgggaagacgcctcatgggaacgaacttggacaggtgttgggttgaggcctcttctgcaggaagtccctgagctgagacgcaagttggctgggtggtccgcaccctggctctcctgcaggtccacacaccttccaggcctgtggcctgcctccaaagatgtgcaagggcaggctggctgcacggggagagggaagtattttgccgaaatatgagaactggggcctcctgctcccagggagctccagggcccctctctcctcccacctggacttggggggaactgagaaacactttcctggagctgctggcttttgcacttttttgatggcagaagtgtgacctgagagtcccaccttctcttcaggaacgtagatgttggggtgtcttgccctggggggcttggaacctctgaaggtggggagcggaacacctggcatccttccccagcacttgcattaccgtccctgctcttcccaggtggggacagtggcccaagcaaggcctcactcgcagccacttcttcaagagctgcctgcacactgtcttggagcatctgccttgtgcctggcactctgccggtgccttgggaaggtcggaagagtggactttgtcctggccttcccttcatggcgtctatgacacttttgtggtgatggaaagcatgggacctgtcgtctcagcctgttggtttctcctcattgcctcaaaccctggggtaggtgggacggggggtctcgtgcccagatgaaaccatttggaaactcggcagcagagtttgtccaaatgacccttttcaggatgtctcaaagcttgtgccaaaggtcacttttctttcctgccttctgctgtgagccctgagatcctcctcccagctcaagggacaggtcctgggtgagggtgggagatttagacacctgaaactgggcgtggagagaagagccgttgctgtttgttttttgggaagagcttttaaagaatgcatgtttttttcctggttggaattgagtaggaactgaggctgtgcttcaggtatggtacaatcaagtgggggattttcatgctgaaccattcaagccctccccgcccgttgcacccactttggctggcgtctgctggagaggatgtctctgtccgcattcccgtgcagctccaggctcgcgcagttttctctctctccctggatgttgagtctcatcagaatatgtgggtagggggtggacgtgcacgggtgcatgattgtgcttaacttggttgtatttttcgatttgacatggaaggcctgttgctttgctcttgagaatagtttctcgtgtccccctcgcaggcctcattctttgaacatcgactctgaagtttgatacagataggggcttgatagctgtggtcccctctcccctctgactacctaaaatcaatacctaaatacagaagccttggtctaacacgggacttttagtttgcgaagggcctagatagggagagaggtaacatgaatctggacagggagggagatactatagaaaggagaacactgcctactttgcaagccagtgacctgccttttgaggggacattggacgggggccgggggcgggggttgggtttgagctacagtcatgaacttttggcgtctactgattcctccaactctccaccccacaaaataacggggaccaatatttttaactttgcctatttgtttttgggtgagtttcccccctccttattctgtcctgagaccacgggcaaagctcttcattttgagagagaagaaaaactgtttggaaccacaccaatgatatttttctttgtaatacttgaaatttatttttttattattttgatagcagatgtgctatttatttatttaatatgtataaggagcctaaacaatagaaagctgtagagattgggtttcattgttaattggtttgggagcctcctatgtgtgacttatgacttctctgtgttctgtgtatttgtctgaattaatgacctgggatataaagctatgctagctttcaaacaggagatgcctttcagaaatttgtatattttgcagttgccagaccaataaaatacctggttgaaatac

SEQ ID NO: 385 - DNA, 1964 bp, Homo sapiens
  source 1..1964: mol_type = unassigned DNA
tctttaaaagccggcggtgcgcggggcatcccagccaagccggagaggaggcgagcagcagggcctggtggcgagagcgcggctgtcactgcgcccgagcatcccagagctttccgagcggacgagccggccgtgccgggcatccccagcctcgctaccctcgcagcacacgtcgagccccgcacaggcgagggtccggaacttagcccaaagcacgtttcccctggcagcgcaggaaacgcccggccgcgcgccggcgcacgcccccctctcctcctttgttccgggggtcggcggccgctctcctgccagcgtcgggatctcggccccgggaggcgggccgtcgggcgcagccgcgaagatgccgttggaactgacgcagagccgagtgcagaagatctgggtgcccgtggaccacaggccctcgttgcccagatcctgtgggccaaagctgaccaactcccccaccgtcatcgtcatggtgggcctccccgcccggggcaagacctacatctccaagaagctgactcgctacctcaactggattggcgtccccacaaaagtgttcaacgtcggggagtatcgccgggaggctgtgaagcagtacagctcctacaacttcttccgccccgacaatgaggaagccatgaaagtccggaagcaatgtgccttagctgccttgagagatgtcaaaagctacctggcgaaagaagggggacaaattgcggttttcgatgccaccaatactactagagagaggagacacatgatccttcattttgccaaagaaaatgactttaaggcgtttttcatcgagtcggtgtgcgacgaccctacagttgtggcctccaatatcatggaagttaaaatctccagcccggattacaaagactgcaactcggcagaagccatggacgacttcatgaagaggatcagttgctatgaagccagctaccagcccctcgaccccgacaaatgcgacagggacttgtcgctgatcaaggtgattgacgtgggccggaggttcctggtgaaccgggtgcaggaccacatccagagccgcatcgtgtactacctgatgaacatccacgtgcagccgcgtaccatctacctgtgccggcacggcgagaacgagcacaacctccagggccgcatcgggggcgactcaggcctgtccagccggggcaagaagtttgccagtgctctgagcaagttcgtggaggagcagaacctgaaggacctgcgcgtgtggaccagccagctgaagagcaccatccagacggccgaggcgctgcggctgccctacgagcagtggaaggcgctcaatgagatcgacgcgggcgtctgtgaggagctgacctacgaggagatcagggacacctaccctgaggagtatgcgctgcgggagcaggacaagtactattaccgctaccccaccggggagtcctaccaggacctggtccagcgcttggagccagtgatcatggagctggagcggcaggagaatgtgctggtcatctgccaccaggccgtcctgcgctgcctgcttgcctacttcctggataagagtgcagaggagatgccctacctgaaatgccctcttcacaccgtcctgaaactgacgcctgtcgcttatggctgccgtgtggaatccatctacctgaacgtggagtccgtctgcacacaccgggagaggtcagaggatgcaaagaagggacctaacccgctcatgagacgcaatagtgtcaccccgctagccagccccgaacccaccaaaaagcctcgcatcaacagctttgaggagcatgtggcctccacctcggccgccctgcccagctgcctgcccccggaggtgcccacgcagctgcctggacaacctttgctagggcaagcctgtctaacatgaaaggctcccggagcagcgctgactcctccaggaaacactgaggcagacgtgtcggttc

SEQ ID NO: 386 - DNA, 4483 bp, Homo sapiens
  source 1..4483: mol_type = unassigned DNA
cagccaagccggagaggaggcgagcagcagggcctggtggcgagagcgcggctgtcactgcgcccgagcatcccagagctttccgagcggacgagccggccgtgccgggcatccccagcctcgctaccctcgcagcacacgtcgagccccgcacaggcgagggtccggaacttagcccaaagcacgtttcccctggcagcgcaggaaacgcccggccgcgcgccggcgcacgcccccctctcctcctttgttccgggggtcggcggccgctctcctgccagcgtcgggatctcggccccgggaggcgggccgtcgggcgcagccgcgaagatgccgttggaactgacgcagagccgagtgcagaagatctgggtgcccgtggaccacaggccctcgttgcccagatcctgtgggccaaagctgaccaactcccccaccgtcatcgtcatggtgggcctccccgcccggggcaagacctacatctccaagaagctgactcgctacctcaactggattggcgtccccacaaaagtgttcaacgtcggggagtatcgccgggaggctgtgaagcagtacagctcctacaacttcttccgccccgacaatgaggaagccatgaaagtccggaagcaatgtgccttagctgccttgagagatgtcaaaagctacctggcgaaagaagggggacaaattgcggttttcgatgccaccaatactactagagagaggagacacatgatccttcattttgccaaagaaaatgactttaaggcgtttttcatcgagtcggtgtgcgacgaccctacagttgtggcctccaatatcatggaagttaaaatctccagcccggattacaaagactgcaactcggcagaagccatggacgacttcatgaagaggatcagttgctatgaagccagctaccagcccctcgaccccgacaaatgcgacagggacttgtcgctgatcaaggtgattgacgtgggccggaggttcctggtgaaccgggtgcaggaccacatccagagccgcatcgtgtactacctgatgaacatccacgtgcagccgcgtaccatctacctgtgccggcacggcgagaacgagcacaacctccagggccgcatcgggggcgactcaggcctgtccagccggggcaagaagtttgccagtgctctgagcaagttcgtggaggagcagaacctgaaggacctgcgcgtgtggaccagccagctgaagagcaccatccagacggccgaggcgctgcggctgccctacgagcagtggaaggcgctcaatgagatcgacgcgggcgtctgtgaggagctgacctacgaggagatcagggacacctaccctgaggagtatgcgctgcgggagcaggacaagtactattaccgctaccccaccggggagtcctaccaggacctggtccagcgcttggagccagtgatcatggagctggagcggcaggagaatgtgctggtcatctgccaccaggccgtcctgcgctgcctgcttgcctacttcctggataagagtgcagaggagatgccctacctgaaatgccctcttcacaccgtcctgaaactgacgcctgtcgcttatggctgccgtgtggaatccatctacctgaacgtggagtccgtctgcacacaccgggagaggtcagaggatgcaaagaagggacctaacccgctcatgagacgcaatagtgtcaccccgctagccagccccgaacccaccaaaaagcctcgcatcaacagctttgaggagcatgtggcctccacctcggccgccctgcccagctgcctgcccccggaggtgcccacgcagctgcctggacaaaacatgaaaggctcccggagcagcgctgactcctccaggaaacactgaggcagacgtgtcggttccattccatttccatttctgcagcttagcttgtgtcctgccctccgcccgaggcaaaacgtatcctgaggacttcttccggagagggtggggtggagcagcgggggagccttggccgaagagaaccatgcttggcaccgtctgtgtcccctcggccgctggacaccagaaagccacgtgggtccctggcgccctgcctttagccgtggggcccccacctccactctctgggtttcctaggaatgtccagcctcggagaccttcacaaagccttgggagggtgatgagtgctggtcctgacaggaggccgctggggacactgtgctgttttgtttcgtttctgtgatctcccggcacgtttggagctgggaagaccacactggtggcagaatcctaaaattaaaggaggcaggctcctagttgctgaaagttaaggaatgtgtaaaacctccacgtgactgtttggtgcatcttgacctgggaagacgcctcatgggaacgaacttggacaggtgttgggttgaggcctcttctgcaggaagtccctgagctgagacgcaagttggctgggtggtccgcaccctggctctcctgcaggtccacacaccttccaggcctgtggcctgcctccaaagatgtgcaagggcaggctggctgcacggggagagggaagtattttgccgaaatatgagaactggggcctcctgctcccagggagctccagggcccctctctcctcccacctggacttggggggaactgagaaacactttcctggagctgctggcttttgcacttttttgatggcagaagtgtgacctgagagtcccaccttctcttcaggaacgtagatgttggggtgtcttgccctggggggcttggaacctctgaaggtggggagcggaacacctggcatccttccccagcacttgcattaccgtccctgctcttcccaggtggggacagtggcccaagcaaggcctcactcgcagccacttcttcaagagctgcctgcacactgtcttggagcatctgccttgtgcctggcactctgccggtgccttgggaaggtcggaagagtggactttgtcctggccttcccttcatggcgtctatgacacttttgtggtgatggaaagcatgggacctgtcgtctcagcctgttggtttctcctcattgcctcaaaccctggggtaggtgggacggggggtctcgtgcccagatgaaaccatttggaaactcggcagcagagtttgtccaaatgacccttttcaggatgtctcaaagcttgtgccaaaggtcacttttctttcctgccttctgctgtgagccctgagatcctcctcccagctcaagggacaggtcctgggtgagggtgggagatttagacacctgaaactgggcgtggagagaagagccgttgctgtttgttttttgggaagagcttttaaagaatgcatgtttttttcctggttggaattgagtaggaactgaggctgtgcttcaggtatggtacaatcaagtgggggattttcatgctgaaccattcaagccctccccgcccgttgcacccactttggctggcgtctgctggagaggatgtctctgtccgcattcccgtgcagctccaggctcgcgcagttttctctctctccctggatgttgagtctcatcagaatatgtgggtagggggtggacgtgcacgggtgcatgattgtgcttaacttggttgtatttttcgatttgacatggaaggcctgttgctttgctcttgagaatagtttctcgtgtccccctcgcaggcctcattctttgaacatcgactctgaagtttgatacagataggggcttgatagctgtggtcccctctcccctctgactacctaaaatcaatacctaaatacagaagccttggtctaacacgggacttttagtttgcgaagggcctagatagggagagaggtaacatgaatctggacagggagggagatactatagaaaggagaacactgcctactttgcaagccagtgacctgccttttgaggggacattggacgggggccgggggcgggggttgggtttgagctacagtcatgaacttttggcgtctactgattcctccaactctccaccccacaaaataacggggaccaatatttttaactttgcctatttgtttttgggtgagtttcccccctccttattctgtcctgagaccacgggcaaagctcttcattttgagagagaagaaaaactgtttggaaccacaccaatgatatttttctttgtaatacttgaaatttatttttttattattttgatagcagatgtgctatttatttatttaatatgtataaggagcctaaacaatagaaagctgtagagattgggtttcattgttaattggtttgggagcctcctatgtgtgacttatgacttctctgtgttctgtgtatttgtctgaattaatgacctgggatataaagctatgctagctttcaaacaggagatgcctttcagaaatttgtatattttgcagttgccagaccaataaaatacctggttgaaataca

SEQ ID NO: 387 - DNA, 1677 bp, Homo sapiens
  source 1..1677: mol_type = unassigned DNA
agcgtgggctcctggcggtgaagggggtggctgctgactctcctgtcccgttggggtagagagatgggggagggtggccagaaggaaggtgacagccagcaagcaggggctctgccactcctctgtcagctggacacgtttagtcccaaggccactgtcttcggtgtctccattaatccagcctgtgggccaaagctgaccaactcccccaccgtcatcgtcatggtgggcctccccgcccggggcaagacctacatctccaagaagctgactcgctacctcaactggattggcgtccccacaaaagtgttcaacgtcggggagtatcgccgggaggctgtgaagcagtacagctcctacaacttcttccgccccgacaatgaggaagccatgaaagtccggaagcaatgtgccttagctgccttgagagatgtcaaaagctacctggcgaaagaagggggacaaattgcggttttcgatgccaccaatactactagagagaggagacacatgatccttcattttgccaaagaaaatgactttaaggcgtttttcatcgagtcggtgtgcgacgaccctacagttgtggcctccaatatcatggaagttaaaatctccagcccggattacaaagactgcaactcggcagaagccatggacgacttcatgaagaggatcagttgctatgaagccagctaccagcccctcgaccccgacaaatgcgacagggacttgtcgctgatcaaggtgattgacgtgggccggaggttcctggtgaaccgggtgcaggaccacatccagagccgcatcgtgtactacctgatgaacatccacgtgcagccgcgtaccatctacctgtgccggcacggcgagaacgagcacaacctccagggccgcatcgggggcgactcaggcctgtccagccggggcaagaagtttgccagtgctctgagcaagttcgtggaggagcagaacctgaaggacctgcgcgtgtggaccagccagctgaagagcaccatccagacggccgaggcgctgcggctgccctacgagcagtggaaggcgctcaatgagatcgacgcgggcgtctgtgaggagctgacctacgaggagatcagggacacctaccctgaggagtatgcgctgcgggagcaggacaagtactattaccgctaccccaccggggagtcctaccaggacctggtccagcgcttggagccagtgatcatggagctggagcggcaggagaatgtgctggtcatctgccaccaggccgtcctgcgctgcctgcttgcctacttcctggataagagtgcagaggagatgccctacctgaaatgccctcttcacaccgtcctgaaactgacgcctgtcgcttatggctgccgtgtggaatccatctacctgaacgtggagtccgtctgcacacaccgggagaggtcagaggatgcaaagaagggacctaacccgctcatgagacgcaatagtgtcaccccgctagccagccccgaacccaccaaaaagcctcgcatcaacagctttgaggagcatgtggcctccacctcggccgccctgcccagctgcctgcccccggaggtgcccacgcagctgcctggacaacctttgctagggcaagcctgtctaaactggaaaggtgtgatgaggaatgcagcctga

SEQ ID NO: 388 - DNA, 1965 bp, Homo sapiens
  source 1..1965: mol_type = unassigned DNA
acgcgtctgcggccagcccggactctttaaaagccggcggtgcgcggggcatcccagccaagccggagaggaggcgagcagcagggcctggtggcgagagcgcggctgtcactgcgcccgagcatcccagagctttccgagcggacgagccggccgtgccgggcatccccagcctcgctaccctcgcagcacacgtcgagccccgcacaggcgagggtccggaacttagcccaaagcacgtttcccctggcagcgcaggaaacgcccggccgcgcgccggcgcacgcccccctctcctcctttgttccgggggtcggcggccgctctcctgccagcgtcgggatctcggccccgggaggcgggccgtcgggcgcagccgcgaagatgccgttggaactgacgcagagccgagtgcagaagatctgggtgcccgtggaccacaggccctcgttgcccagatcctgtgggccaaagctgaccaactcccccaccgtcatcgtcatggtgggcctccccgcccggggcaagacctacatctccaagaagctgactcgctacctcaactggattggcgtccccacaaaagtgttcaacgtcggggagtatcgccgggaggctgtgaagcagtacagctcctacaacttcttccgccccgacaatgaggaagccatgaaagtccggaagcaatgtgccttagctgccttgagagatgtcaaaagctacctggcgaaagaagggggacaaattgcggttttcgatgccaccaatactactagagagaggagacacatgatccttcattttgccaaagaaaatgactttaaggcgtttttcatcgagtcggtgtgcgacgaccctacagttgtggcctccaatatcatggaagttaaaatctccagcccggattacaaagactgcaactcggcagaagccatggacgacttcatgaagaggatcagttgctatgaagccagctaccagcccctcgaccccgacaaatgcgacagggacttgtcgctgatcaaggtgattgacgtgggccggaggttcctggtgaaccgggtgcaggaccacatccagagccgcatcgtgtactacctgatgaacatccacgtgcagccgcgtaccatctacctgtgccggcacggcgagaacgagcacaacctccagggccgcatcgggggcgactcaggcctgtccagccggggcaagaagtttgccagtgctctgagcaagttcgtggaggagcagaacctgaaggacctgcgcgtgtggaccagccagctgaagagcaccatccagacggccgaggcgctgcggctgccctacgagcagtggaaggcgctcaatgagatcgacgcgggcgtctgtgaggagctgacctacgaggagatcagggacacctaccctgaggagtatgcgctgcgggagcaggacaagtactattaccgctaccccaccggggagtcctaccaggacctggtccagcgcttggagccagtgatcatggagctggagcggcaggagaatgtgctggtcatctgccaccaggccgtcctgcgctgcctgcttgcctacttcctggataagagtgcagaggagatgccctacctgaaatgccctcttcacaccgtcctgaaactgacgcctgtcgcttatggctgccgtgtggaatccatctacctgaacgtggagtccgtctgcacacaccgggagaggtcagaggatgcaaagaagggacctaacccgctcatgagacgcaatagtgtcaccccgctagccagccccgaacccaccaaaaagcctcgcatcaacagctttgaggagcatgtggcctccacctcggccgccctgcccagctgcctgcccccggaggtgcccacgcagctgcctggacaacctttgctagggcaagcctgtctacgaactgtctgtcacattttctcaaagttttctccttactaa

SEQ ID NO: 389 - DNA, 3856 bp, Homo sapiens
  source 1..3856: mol_type = unassigned DNA
gtctgggtgtcgcgggccggccccgcggggagcgcccccggcgcgatgcccttcaggaaagcctgtgggccaaagctgaccaactcccccaccgtcatcgtcatggtgggcctccccgcccggggcaagacctacatctccaagaagctgactcgctacctcaactggattggcgtccccacaaaagtgttcaacgtcggggagtatcgccgggaggctgtgaagcagtacagctcctacaacttcttccgccccgacaatgaggaagccatgaaagtccggaagcaatgtgccttagctgccttgagagatgtcaaaagctacctggcgaaagaagggggacaaattgcggttttcgatgccaccaatactactagagagaggagacacatgatccttcattttgccaaagaaaatgactttaaggcgtttttcatcgagtcggtgtgcgacgaccctacagttgtggcctccaatatcatggaagttaaaatctccagcccggattacaaagactgcaactcggcagaagccatggacgacttcatgaagaggatcagttgctatgaagccagctaccagcccctcgaccccgacaaatgcgacagggacttgtcgctgatcaaggtgattgacgtgggccggaggttcctggtgaaccgggtgcaggaccacatccagagccgcatcgtgtactacctgatgaacatccacgtgcagccgcgtaccatctacctgtgccggcacggcgagaacgagcacaacctccagggccgcatcgggggcgactcaggcctgtccagccggggcaagaagtttgccagtgctctgagcaagttcgtggaggagcagaacctgaaggacctgcgcgtgtggaccagccagctgaagagcaccatccagacggccgaggcgctgcggctgccctacgagcagtggaaggcgctcaatgagatcgacgcgtcctaccaggacctggtccagcgcttggagccagtgatcatggagctggagcggcaggagaatgtgctggtcatctgccaccaggccgtcctgcgctgcctgcttgcctacttcctggataagagtgcagaggagatgccctacctgaaatgccctcttcacaccgtcctgaaactgacgcctgtcgcttatggctgccgtgtggaatccatctacctgaacgtggagtccgtctgcacacaccgggagaggtcagagaacatgaaaggctcccggagcagcgctgactcctccaggaaacactgaggcagacgtgtcggttccattccatttccatttctgcagcttagcttgtgtcctgccctccgcccgaggcaaaacgtatcctgaggacttcttccggagagggtggggtggagcagcgggggagccttggccgaagagaaccatgcttggcaccgtctgtgtcccctcggccgctggacaccagaaagccacgtgggtccctggcgccctgcctttagccgtggggcccccacctccactctctgggtttcctaggaatgtccagcctcggagaccttcacaaagccttgggagggtgatgagtgctggtcctgacaggaggccgctggggacactgtgctgttttgtttcgtttctgtgatctcccggcacgtttggagctgggaagaccacactggtggcagaatcctaaaattaaaggaggcaggctcctagttgctgaaagttaaggaatgtgtaaaacctccacgtgactgtttggtgcatcttgacctgggaagacgcctcatgggaacgaacttggacaggtgttgggttgaggcctcttctgcaggaagtccctgagctgagacgcaagttggctgggtggtccgcaccctggctctcctgcaggtccacacaccttccaggcctgtggcctgcctccaaagatgtgcaagggcaggctggctgcacggggagagggaagtattttgccgaaatatgagaactggggcctcctgctcccagggagctccagggcccctctctcctcccacctggacttggggggaactgagaaacactttcctggagctgctggcttttgcacttttttgatggcagaagtgtgacctgagagtcccaccttctcttcaggaacgtagatgttggggtgtcttgccctggggggcttggaacctctgaaggtggggagcggaacacctggcatccttccccagcacttgcattaccgtccctgctcttcccaggtggggacagtggcccaagcaaggcctcactcgcagccacttcttcaagagctgcctgcacactgtcttggagcatctgccttgtgcctggcactctgccggtgccttgggaaggtcggaagagtggactttgtcctggccttcccttcatggcgtctatgacacttttgtggtgatggaaagcatgggacctgtcgtctcagcctgttggtttctcctcattgcctcaaaccctggggtaggtgggacggggggtctcgtgcccagatgaaaccatttggaaactcggcagcagagtttgtccaaatgacccttttcaggatgtctcaaagcttgtgccaaaggtcacttttctttcctgccttctgctgtgagccctgagatcctcctcccagctcaagggacaggtcctgggtgagggtgggagatttagacacctgaaactgggcgtggagagaagagccgttgctgtttgttttttgggaagagcttttaaagaatgcatgtttttttcctggttggaattgagtaggaactgaggctgtgcttcaggtatggtacaatcaagtgggggattttcatgctgaaccattcaagccctccccgcccgttgcacccactttggctggcgtctgctggagaggatgtctctgtccgcattcccgtgcagctccaggctcgcgcagttttctctctctccctggatgttgagtctcatcagaatatgtgggtagggggtggacgtgcacgggtgcatgattgtgcttaacttggttgtatttttcgatttgacatggaaggcctgttgctttgctcttgagaatagtttctcgtgtccccctcgcaggcctcattctttgaacatcgactctgaagtttgatacagataggggcttgatagctgtggtcccctctcccctctgactacctaaaatcaatacctaaatacagaagccttggtctaacacgggacttttagtttgcgaagggcctagatagggagagaggtaacatgaatctggacagggagggagatactatagaaaggagaacactgcctactttgcaagccagtgacctgccttttgaggggacattggacgggggccgggggcgggggttgggtttgagctacagtcatgaacttttggcgtctactgattcctccaactctccaccccacaaaataacggggaccaatatttttaactttgcctatttgtttttgggtgagtttcccccctccttattctgtcctgagaccacgggcaaagctcttcattttgagagagaagaaaaactgtttggaaccacaccaatgatatttttctttgtaatacttgaaatttatttttttattattttgatagcagatgtgctatttatttatttaatatgtataaggagcctaaacaatagaaagctgtagagattgggtttcattgttaattggtttgggagcctcctatgtgtgacttatgacttctctgtgttctgtgtatttgtctgaattaatgacctgggatataaagctatgctagctttcaaacaggagatgcctttcagaaatttgtatattttgcagttgccagaccaataaaatacctggttgaaat

SEQ ID NO: 390 - DNA, 2181 bp, Homo sapiens
  source 1..2181: mol_type = unassigned DNA
gaggctgacgtacgcgtctgcggccagcccggactctttaaaagccggcggtgcgcggggcatcccagccaagccggagaggaggcgagcagcagggcctggtggcgagagcgcggctgtcactgcgcccgagcatcccagagctttccgagcggacgagccggccgtgccgggcatccccagcctcgctaccctcgcagcacacgtcgagccccgcacaggcgagggtccggaacttagcccaaagcacgtttcccctggcagcgcaggaaacgcccggccgcgcgccggcgcacgcccccctctcctcctttgttccgggggtcggcggccgctctcctgccagcgtcgggatctcggccccgggaggcgggccgtcgggcgcagccgcgaagatgccgttggaactgacgcagagccgagtgcagaagatctgggtgcccgtggaccacaggccctcgttgcccagatcctgtgggccaaagctgaccaactcccccaccgtcatcgtcatggtgggcctccccgcccggggcaagacctacatctccaagaagctgactcgctacctcaactggattggcgtccccacaaaagtgttcaacgtcggggagtatcgccgggaggctgtgaagcagtacagctcctacaacttcttccgccccgacaatgaggaagccatgaaagtccggaagcaatgtgccttagctgccttgagagatgtcaaaagctacctggcgaaagaagggggacaaattgcggttttcgatgccaccaatactactagagagaggagacacatgatccttcattttgccaaagaaaatgactttaaggcgtttttcatcgagtcggtgtgcgacgaccctacagttgtggcctccaatatcatggaagttaaaatctccagcccggattacaaagactgcaactcggcagaagccatggacgacttcatgaagaggatcagttgctatgaagccagctaccagcccctcgaccccgacaaatgcgacagggacttgtcgctgatcaaggtgattgacgtgggccggaggttcctggtgaaccgggtgcaggaccacatccagagccgcatcgtgtactacctgatgaacatccacgtgcagccgcgtaccatctacctgtgccggcacggcgagaacgagcacaacctccagggccgcatcgggggcgactcaggcctgtccagccggggcaagaagtttgccagtgctctgagcaagttcgtggaggagcagaacctgaaggacctgcgcgtgtggaccagccagctgaagagcaccatccagacggccgaggcgctgcggctgccctacgagcagtggaaggcgctcaatgagatcgacgcgggcgtctgtgaggagctgacctacgaggagatcagggacacctaccctgaggagtatgcgctgcgggagcaggacaagtactattaccgctaccccaccggggagtcctaccaggacctggtccagcgcttggagccagtgatcatggagctggagcggcaggagaatgtgctggtcatctgccaccaggccgtcctgcgctgcctgcttgcctacttcctggataagagtgcagaggagatgccctacctgaaatgccctcttcacaccgtcctgaaactgacgcctgtcgcttatggctgccgtgtggaatccatctacctgaacgtggagtccgtctgcacacaccgggagaggtcagaggatgcaaagaagggacctaacccgctcatgagacgcaatagtgtcaccccgctagccagccccgaacccaccaaaaagcctcgcatcaacagctttgaggagcatgtggcctccacctcggccgccctgcccagctgcctgcccccggaggtgcccacgcagctgcctggacaacctttgctagggcaagcctgtctacgaactgtctgtcacattttctcaaagttttctccttactaactgtggaagaacatgaaaggctcccggagcagcgctgactcctccaggaaacactgaggcagacgtgtcggttccattccatttccatttctgcagcttagcttgtgtcctgccctccgcccgaggcaaaacgtatcctgaggacttcttccggagagggtggggtggagcagcgggggagccttggccgaagagaaccatgctt

SEQ ID NO: 391 - DNA, 4157 bp, Homo sapiens
  source 1..4157: mol_type = unassigned DNA
gccgcttggacgtcgtcctgtctgggtgtcgcgggccggccccgcggggagcgcccccggcgcgatgcccttcaggaaagcctgtgggccaaagctgaccaactcccccaccgtcatcgtcatggtgggcctccccgcccggggcaagacctacatctccaagaagctgactcgctacctcaactggattggcgtccccacaaaagtgttcaacgtcggggagtatcgccgggaggctgtgaagcagtacagctcctacaacttcttccgccccgacaatgaggaagccatgaaagtccggaagcaatgtgccttagctgccttgagagatgtcaaaagctacctggcgaaagaagggggacaaattgcggttttcgatgccaccaatactactagagagaggagacacatgatccttcattttgccaaagaaaatgactttaaggcgtttttcatcgagtcggtgtgcgacgaccctacagttgtggcctccaatatcatggaagttaaaatctccagcccggattacaaagactgcaactcggcagaagccatggacgacttcatgaagaggatcagttgctatgaagccagctaccagcccctcgaccccgacaaatgcgacagggacttgtcgctgatcaaggtgattgacgtgggccggaggttcctggtgaaccgggtgcaggaccacatccagagccgcatcgtgtactacctgatgaacatccacgtgcagccgcgtaccatctacctgtgccggcacggcgagaacgagcacaacctccagggccgcatcgggggcgactcaggcctgtccagccggggcaagaagtttgccagtgctctgagcaagttcgtggaggagcagaacctgaaggacctgcgcgtgtggaccagccagctgaagagcaccatccagacggccgaggcgctgcggctgccctacgagcagtggaaggcgctcaatgagatcgacgcgggcgtctgtgaggagctgacctacgaggagatcagggacacctaccctgaggagtatgcgctgcgggagcaggacaagtactattaccgctaccccaccggggagtcctaccaggacctggtccagcgcttggagccagtgatcatggagctggagcggcaggagaatgtgctggtcatctgccaccaggccgtcctgcgctgcctgcttgcctacttcctggataagagtgcagaggagatgccctacctgaaatgccctcttcacaccgtcctgaaactgacgcctgtcgcttatggctgccgtgtggaatccatctacctgaacgtggagtccgtctgcacacaccgggagaggtcagaggatgcaaagaagggacctaacccgctcatgagacgcaatagtgtcaccccgctagccagccccgaacccaccaaaaagcctcgcatcaacagctttgaggagcatgtggcctccacctcggccgccctgcccagctgcctgcccccggaggtgcccacgcagctgcctggacaaaacatgaaaggctcccggagcagcgctgactcctccaggaaacactgaggcagacgtgtcggttccattccatttccatttctgcagcttagcttgtgtcctgccctccgcccgaggcaaaacgtatcctgaggacttcttccggagagggtggggtggagcagcgggggagccttggccgaagagaaccatgcttggcaccgtctgtgtcccctcggccgctggacaccagaaagccacgtgggtccctggcgccctgcctttagccgtggggcccccacctccactctctgggtttcctaggaatgtccagcctcggagaccttcacaaagccttgggagggtgatgagtgctggtcctgacaggaggccgctggggacactgtgctgttttgtttcgtttctgtgatctcccggcacgtttggagctgggaagaccacactggtggcagaatcctaaaattaaaggaggcaggctcctagttgctgaaagttaaggaatgtgtaaaacctccacgtgactgtttggtgcatcttgacctgggaagacgcctcatgggaacgaacttggacaggtgttgggttgaggcctcttctgcaggaagtccctgagctgagacgcaagttggctgggtggtccgcaccctggctctcctgcaggtccacacaccttccaggcctgtggcctgcctccaaagatgtgcaagggcaggctggctgcacggggagagggaagtattttgccgaaatatgagaactggggcctcctgctcccagggagctccagggcccctctctcctcccacctggacttggggggaactgagaaacactttcctggagctgctggcttttgcacttttttgatggcagaagtgtgacctgagagtcccaccttctcttcaggaacgtagatgttggggtgtcttgccctggggggcttggaacctctgaaggtggggagcggaacacctggcatccttccccagcacttgcattaccgtccctgctcttcccaggtggggacagtggcccaagcaaggcctcactcgcagccacttcttcaagagctgcctgcacactgtcttggagcatctgccttgtgcctggcactctgccggtgccttgggaaggtcggaagagtggactttgtcctggccttcccttcatggcgtctatgacacttttgtggtgatggaaagcatgggacctgtcgtctcagcctgttggtttctcctcattgcctcaaaccctggggtaggtgggacggggggtctcgtgcccagatgaaaccatttggaaactcggcagcagagtttgtccaaatgacccttttcaggatgtctcaaagcttgtgccaaaggtcacttttctttcctgccttctgctgtgagccctgagatcctcctcccagctcaagggacaggtcctgggtgagggtgggagatttagacacctgaaactgggcgtggagagaagagccgttgctgtttgttttttgggaagagcttttaaagaatgcatgtttttttcctggttggaattgagtaggaactgaggctgtgcttcaggtatggtacaatcaagtgggggattttcatgctgaaccattcaagccctccccgcccgttgcacccactttggctggcgtctgctggagaggatgtctctgtccgcattcccgtgcagctccaggctcgcgcagttttctctctctccctggatgttgagtctcatcagaatatgtgggtagggggtggacgtgcacgggtgcatgattgtgcttaacttggttgtatttttcgatttgacatggaaggcctgttgctttgctcttgagaatagtttctcgtgtccccctcgcaggcctcattctttgaacatcgactctgaagtttgatacagataggggcttgatagctgtggtcccctctcccctctgactacctaaaatcaatacctaaatacagaagccttggtctaacacgggacttttagtttgcgaagggcctagatagggagagaggtaacatgaatctggacagggagggagatactatagaaaggagaacactgcctactttgcaagccagtgacctgccttttgaggggacattggacgggggccgggggcgggggttgggtttgagctacagtcatgaacttttggcgtctactgattcctccaactctccaccccacaaaataacggggaccaatatttttaactttgcctatttgtttttgggtgagtttcccccctccttattctgtcctgagaccacgggcaaagctcttcattttgagagagaagaaaaactgtttggaaccacaccaatgatatttttctttgtaatacttgaaatttatttttttattattttgatagcagatgtgctatttatttatttaatatgtataaggagcctaaacaatagaaagctgtagagattgggtttcattgttaattggtttgggagcctcctatgtgtgacttatgacttctctgtgttctgtgtatttgtctgaattaatgacctgggatataaagctatgctagctttcaaacaggagatgcctttcagaaatttgtatattttgcagttgccagaccaataaaatacctggttgaaataca

SEQ ID NO: 392 - DNA, 513 bp, Homo sapiens
  source 1..513: mol_type = unassigned DNA
atctacctgaacgtggagtccgtctgcacacaccgggagaggtcagaggatgcaaagaagggacctaacccgctcatgagacgcaatagtgtcaccccgctagccagccccgaacccaccaaaaagcctcgcatcaacagctttgaggagcatgtggcctccacctcggccgccctgcccagctgcctgcccccggaggtgcccacgcagctgcctggacaacctttgctagggcaagcctgtctaaactggaaaggtgtgatgaggaatgcagcctgagatgctgaaaagaatgactggctttggaaatgggagagaacatgaaaggctcccggagcagcgctgactcctccaggaaacactgaggcagacgtgtcggttccattccatttccatttctgcagcttagcttgtgtcctgccctccgcccgaggcaaaacgtatcctgaggacttcttccggagagggtggggtggagcagcgggggagccttggccgaagagaaccatgctt

SEQ ID NO: 393 - DNA, 244 bp, Homo sapiens
  source 1..244: mol_type = unassigned DNA
atctacctgaacgtggagtccgtctgcacacaccgggagaggtcagagaacatgaaaggctcccggagcagcgctgactcctccaggaaacactgaggcagacgtgtcggttccattccatttccatttctgcagcttagcttgtgtcctgccctccgcccgaggcaaaacgtatcctgaggacttcttccggagagggtggggtggagcagcgggggagccttggccgaagagaaccatgctt

SEQ ID NO: 394 - DNA, 1874 bp, Homo sapiens
  source 1..1874: mol_type = unassigned DNA
tcgggcgcagccgcgaagatgccgttggaactgacgcagagccgagtgcagaagatctgggtgcccgtggaccacaggccctcgttgcccagatcctgtgggccaaagctgaccaactcccccaccgtcatcgtcatggtgggcctccccgcccggggcaagacctacatctccaagaagctgactcgctacctcaactggattggcgtccccacaaaagtgttcaacgtcggggagtatcgccgggaggctgtgaagcagtacagctcctacaacttcttccgccccgacaatgaggaagccatgaaagtccggaagcaatgtgccttagctgccttgagagatgtcaaaagctacctggcgaaagaagggggacaaattgcggttttcgatgccaccaatactactagagagaggagacacatgatccttcattttgccaaagaaaatgactttaaggcgtttttcatcgagtcggtgtgcgacgaccctacagttgtggcctccaatatcatggaagttaaaatctccagcccggattacaaagactgcaactcggcagaagccatggacgacttcatgaagaggatcagttgctatgaagccagctaccagcccctcgaccccgacaaatgcgacagggacttgtcgctgatcaaggtgattgacgtgggccggaggttcctggtgaaccgggtgcaggaccacatccagagccgcatcgtgtactacctgatgaacatccacgtgcagccgcgtaccatctacctgtgccggcacggcgagaacgagcacaacctccagggccgcatcgggggcgactcaggcctgtccagccggggcaagaagtttgccagtgctctgagcaagttcgtggaggagcagaacctgaaggacctgcgcgtgtggaccagccagctgaagagcaccatccagacggccgaggcgctgcggctgccctacgagcagtggaaggcgctcaatgagatcgacgcgggcgtctgtgaggagctgacctacgaggagatcagggacacctaccctgaggagtatgcgctgcgggagcaggacaagtactattaccgctaccccaccggggagtcctaccaggacctggtccagcgcttggagccagtgatcatggagctggagcggcaggagaatgtgctggtcatctgccaccaggccgtcctgcgctgcctgcttgcctacttcctggataagagtgcagaggagatgccctacctgaaatgccctcttcacaccgtcctgaaactgacgcctgtcgcttatggctgccgtgtggaatccatctacctgaacgtggagtccgtctgcacacaccgggagaggtcagagggtctcagtctgttccccaggctggagtgcggtggcgcagtcacggctcactgcagcctcaacctcctgggttcaagtgatcctcccgcctcagcctcccgcgtagctgagactacaggatgcaaagaagggacctaacccgctcatgagacgcaatagtgtcaccccgctagccagccccgaacccaccaaaaagcctcgcatcaacagctttgaggagcatgtggcctccacctcggccgccctgcccagctgcctgcccccggaggtgcccacgcagctgcctggacaaaacatgaaaggctcccggagcagcgctgactcctccaggaaacactgaggcagacgtgtcggttccattccatttccatttctgcagcttagcttgtgtcctgccctccgcccgaggcaaaacgtatcctgaggacttcttccggagagggtggggtggagcagcgggggagccttggccgaagagaaccatgcttggcaccgtctgtgtcccctcggccgct

SEQ ID NO: 395 - DNA, 595 bp, Homo sapiens
  source 1..595: mol_type = unassigned DNA
cgtggaggagcagaacctgaaggacctgcgcgtgtggaccagccagctgaagagcaccatccagacggccgaggcgctgcggctgccctacgagcagtggaaggcgctcaatgagatcgacgcgtcctaccaggacctggtccagcgcttggagccagtgatcatggagctggagcggcaggagaatgtgctggtcatctgccaccaggccgtcctgcgctgcctgcttgcctacttcctggataagagtgcagaggagatgccctacctgaaatgccctcttcacaccgtcctgaaactgacgcctgtcgcttatggctgccgtgtggaatccatctacctgaacgtggagtccgtctgcacacaccgggagaggtcagagaacatgaaaggctcccggagcagcgctgactcctccaggaaacactgaggcagacgtgtcggttccattccatttccatttctgcagcttagcttgtgtcctgccctccgcccgaggcaaaacgtatcctgaggacttcttccggagagggtggggtggagcagcgggggagccttggccgaagagaaccatgcttggcaccgtctgtgtccc

SEQ ID NO: 396 - DNA, 3922 bp, Homo sapiens
  source 1..3922: mol_type = unassigned DNA
cccgagtcgcggggctgccgcttggacgtcgtcctgtctgggtgtcgcgggccggccccgcggggagcgcccccggcgcgatgcccttcaggaaagcctgtgggccaaagctgaccaactcccccaccgtcatcgtcatggtgggcctccccgcccggggcaagacctacatctccaagaagctgactcgctacctcaactggattggcgtccccacaaaagtgttcaacgtcggggagtatcgccgggaggctgtgaagcagtacagctcctacaacttcttccgccccgacaatgaggaagccatgaaagtccggaagcaatgtgccttagctgccttgagagatgtcaaaagctacctggcgaaagaagggggacaaattgcggttttcgatgccaccaatactactagagagaggagacacatgatccttcattttgccaaagaaaatgactttaaggcgtttttcatcgagtcggtgtgcgacgaccctacagttgtggcctccaatatcatgcagaaagccttccagcgtgatttatcagccacccctttgtggtgttgcaggaagttaaaatctccagcccggattacaaagactgcaactcggcagaagccatggacgacttcatgaagaggatcagttgctatgaagccagctaccagcccctcgaccccgacaaatgcgacagggacttgtcgctgatcaaggtgattgacgtgggccggaggttcctggtgaaccgggtgcaggaccacatccagagccgcatcgtgtactacctgatgaacatccacgtgcagccgcgtaccatctacctgtgccggcacggcgagaacgagcacaacctccagggccgcatcgggggcgactcaggcctgtccagccggggcaagaagtttgccagtgctctgagcaagttcgtggaggagcagaacctgaaggacctgcgcgtgtggaccagccagctgaagagcaccatccagacggccgaggcgctgcggctgccctacgagcagtggaaggcgctcaatgagatcgacgcgaggagatgccctacctgaaatgccctcttcacaccgtcctgaaactgacgcctgtcgcttatggatgcaaagaagggacctaacccgctcatgagacgcaatagtgtcaccccgctagccagccccgaacccaccaaaaagcctcgcatcaacagctttgaggagcatgtggcctccacctcggccgccctgcccagctgcctgcccccggaggtgcccacgcagctgcctggacaaaacatgaaaggctcccggagcagcgctgactcctccaggaaacactgaggcagacgtgtcggttccattccatttccatttctgcagcttagcttgtgtcctgccctccgcccgaggcaaaacgtatcctgaggacttcttccggagagggtggggtggagcagcgggggagccttggccgaagagaaccatgcttggcaccgtctgtgtcccctcggccgctggacaccagaaagccacgtgggtccctggcgccctgcctttagccgtggggcccccacctccactctctgggtttcctaggaatgtccagcctcggagaccttcacaaagccttgggagggtgatgagtgctggtcctgacaggaggccgctggggacactgtgctgttttgtttcgtttctgtgatctcccggcacgtttggagctgggaagaccacactggtggcagaatcctaaaattaaaggaggcaggctcctagttgctgaaagttaaggaatgtgtaaaacctccacgtgactgtttggtgcatcttgacctgggaagacgcctcatgggaacgaacttggacaggtgttgggttgaggcctcttctgcaggaagtccctgagctgagacgcaagttggctgggtggtccgcaccctggctctcctgcaggtccacacaccttccaggcctgtggcctgcctccaaagatgtgcaagggcaggctggctgcacggggagagggaagtattttgccgaaatatgagaactggggcctcctgctcccagggagctccagggcccctctctcctcccacctggacttggggggaactgagaaacactttcctggagctgctggcttttgcacttttttgatggcagaagtgtgacctgagagtcccaccttctcttcaggaacgtagatgttggggtgtcttgccctggggggcttggaacctctgaaggtggggagcggaacacctggcatccttccccagcacttgcattaccgtccctgctcttcccaggtggggacagtggcccaagcaaggcctcactcgcagccacttcttcaagagctgcctgcacactgtcttggagcatctgccttgtgcctggcactctgccggtgccttgggaaggtcggaagagtggactttgtcctggccttcccttcatggcgtctatgacacttttgtggtgatggaaagcatgggacctgtcgtctcagcctgttggtttctcctcattgcctcaaaccctggggtaggtgggacggggggtctcgtgcccagatgaaaccatttggaaactcggcagcagagtttgtccaaatgacccttttcaggatgtctcaaagcttgtgccaaaggtcacttttctttcctgccttctgctgtgagccctgagatcctcctcccagctcaagggacaggtcctgggtgagggtgggagatttagacacctgaaactgggcgtggagagaagagccgttgctgtttgttttttgggaagagcttttaaagaatgcatgtttttttcctggttggaattgagtaggaactgaggctgtgcttcaggtatggtacaatcaagtgggggattttcatgctgaaccattcaagccctccccgcccgttgcacccactttggctggcgtctgctggagaggatgtctctgtccgcattcccgtgcagctccaggctcgcgcagttttctctctctccctggatgttgagtctcatcagaatatgtgggtagggggtggacgtgcacgggtgcatgattgtgcttaacttggttgtatttttcgatttgacatggaaggcctgttgctttgctcttgagaatagtttctcgtgtccccctcgcaggcctcattctttgaacatcgactctgaagtttgatacagataggggcttgatagctgtggtcccctctcccctctgactacctaaaatcaatacctaaatacagaagccttggtctaacacgggacttttagtttgcgaagggcctagatagggagagaggtaacatgaatctggacagggagggagatactatagaaaggagaacactgcctactttgcaagccagtgacctgccttttgaggggacattggacgggggccgggggcgggggttgggtttgagctacagtcatgaacttttggcgtctactgattcctccaactctccaccccacaaaataacggggaccaatatttttaactttgcctatttgtttttgggtgagtttcccccctccttattctgtcctgagaccacgggcaaagctcttcattttgagagagaagaaaaactgtttggaaccacaccaatgatatttttctttgtaatacttgaaatttatttttttattattttgatagcagatgtgctatttatttatttaatatgtataaggagcctaaacaatagaaagctgtagagattgggtttcattgttaattggtttgggagcctcctatgtgtgacttatgacttctctgtgttctgtgtatttgtctgaattaatgacctgggatataaagctatgctagctttcaaacaggagatgcctttcagaaatttgtatattttgcagttgccagaccaataaaatacctggttgaaatac

SEQ ID NO: 397 - DNA, 2094 bp, Homo sapiens
  source 1..2094: mol_type = unassigned DNA
agcgtgggctcctggcggtgaagggggtggctgctgactctcctgtcccgttggggtagagagatgggggagggtggccagaaggaaggtgacagccagcaagcaggggctctgccactcctctgtcagctggacacgtttagtcccaaggccactgtcttcggtgtctccattaatccagcctgtgggccaaagctgaccaactcccccaccgtcatcgtcatggtgggcctccccgcccggggcaagacctacatctccaagaagctgactcgctacctcaactggattggcgtccccacaaaagtgttcaacgtcggggagtatcgccgggaggctgtgaagcagtacagctcctacaacttcttccgccccgacaatgaggaagccatgaaagtccggaagcaatgtgccttagctgccttgagagatgtcaaaagctacctggcgaaagaagggggacaaattgcggttttcgatgccaccaatactactagagagaggagacacatgatccttcattttgccaaagaaaatgactttaaggcgtttttcatcgagtcggtgtgcgacgaccctacagttgtggcctccaatatcatggaagttaaaatctccagcccggattacaaagactgcaactcggcagaagccatggacgacttcatgaagaggatcagttgctatgaagccagctaccagcccctcgaccccgacaaatgcgacagggacttgtcgctgatcaaggtgattgacgtgggccggaggttcctggtgaaccgggtgcaggaccacatccagagccgcatcgtgtactacctgatgaacatccacgtgcagccgcgtaccatctacctgtgccggcacggcgagaacgagcacaacctccagggccgcatcgggggcgactcaggcctgtccagccggggcaagaagtttgccagtgctctgagcaagttcgtggaggagcagaacctgaaggacctgcgcgtgtggaccagccagctgaagagcaccatccagacggccgaggcgctgcggctgccctacgagcagtggaaggcgctcaatgagatcgacgcgggcgtctgtgaggagctgacctacgaggagatcagggacacctaccctgaggagtatgcgctgcgggagcaggacaagtactattaccgctaccccaccggggagtcctaccaggacctggtccagcgcttggagccagtgatcatggagctggagcggcaggagaatgtgctggtcatctgccaccaggccgtcctgcgctgcctgcttgcctacttcctggataagagtgcagaggagatgccctacctgaaatgccctcttcacaccgtcctgaaactgacgcctgtcgcttatggctgccgtgtggaatccatctacctgaacgtggagtccgtctgcacacaccgggagaggtcagaggatgcaaagaagggacctaacccgctcatgagacgcaatagtgtcaccccgctagccagccccgaacccaccaaaaagcctcgcatcaacagctttgaggagcatgtggcctccacctcggccgccctgcccagctgcctgcccccggaggtgcccacgcagctgcctggacaaaacatgaaaggctcccggagcagcgctgactcctccaggaaacactgaggcagacgtgtcggttccattccatttccatttctgcagcttagcttgtgtcctgccctccgcccgaggcaaaacgtatcctgaggacttcttccggagagggtggggtggagcagcgggggagccttggccgaagagaaccatgcttggcaccgtctgtgtcccctcggccgctggacaccagaaagccacgtgggtccctggcgccctgcctttagccgtggggcccccacctccactctctgggtttcctaggaatgtccagcctcggagaccttcacaaagccttgggagggtgatgagtgctggtcctgacaggaggccgctggggacactgtgctgttttgtttcgtttctgtgatctcccggcacgtttggagctgggaagaccacactggtggcagaatcctaaaattaaaggaggca

SEQ ID NO: 398 - DNA, 3586 bp, Homo sapiens
  source 1..3586: mol_type = unassigned DNA
gggctgtcgcggcttgaggaggggcggggcccaaggggcgggacctcgggtggcccgaggtggcccggctgctgggttggaagcggcgcagtccgactcatcccggccccgggatggcgtccccacgggaattgacacagaaccccctgaagaagatctggatgccatacagcaatgggcggcccgctctgcacgcttgccagcgcggtgtgtgcatgaccaactgcccaactctcattgtcatggtgggcctgcccgccaggggcaagacctacatctccaagaagctgactcgatacctgaactggattggtgtgcccactcgggagttcaatgttggccagtatcgccgggacgtggtcaagacctacaaatcttttgaattttttctccccgacaatgaagagggcctgaaaatcaggaagcagtgtgccctggcagccctccgtgacgtccggcggttccttagtgaggaggggggacatgtggcggtttttgatgccacaaacaccacccgagaacggagagcgaccatctttaattttggagaacagaatggctacaagaccttttttgtcgagtccatctgtgtggatcctgaggtcatagctgccaacatcgtgcaagtgaaactgggcagccctgactatgtcaaccgcgacagtgatgaggctacggaggacttcatgaggcgcattgagtgctatgagaactcctacgagtcgctagatgaggacctggatagggacctgtcctatatcaagatcatggatgtgggccagagctacgtggtgaaccgtgtggctgaccacatccagagccgcatcgtatattacctcatgaacatccacgtgaccccccgctccatctacctctgccggcacggggagagcgagctcaacctcaagggccggattggcggggacccaggactgtcccctcggggcagggagtttgccaagagtctagcccagttcatcagtgaccaaaatatcaaggatctgaaggtctggacaagccagatgaagaggacaatccagacggctgaggcactgggtgtgccctatgaacagtggaaggtcctcaacgagatcgatgcgggcgtctgtgaggaaatgacctacgaggaaattcaggataattatccactggagttcgccctgcgggaccaggacaagtaccggtaccggtaccctaaaggggagtcctacgaggacctggtccagagactggagcctgtcatcatggagctggagaggcaagagaatgtgctggtcatctgccaccaggctgtgatgcgctgcctgctggcctacttcctcgacaaggcagcagaacagctgccctacctcaagtgtccgctgcacacagtcctgaagctgactcctgtggcatatggttgtaaagtggagtccatattcctgaacgtggctgctgtgaacacgcaccgggacaggcctcagaacgtggacatctcaagacctccagaggaagcccttgtcacggtgcctgctcaccagtgaccatgttcatccactgtgaccactaggcaggcactgctctctgcagagggggtcattccaggccctccagtgtgtgtgatagtcaccatgccatgcagggatattcttgaagccacacatggctggcggaacccagagcccccaccccagcccacctggctctttgttgacagtcggcgacaaggttgtgcgtggctcctgacctgctgctaagagtcacttgaccagactgcatctgcatgggctgcgcggaggttgcccagccccagtttcttccggcgcagctcttaggtgttcactctcgccagctcagttggctttgtgaagtgtgaaaccctacaatgtgaaaggaaagtgcttgctgtgatgttcctactgtggcccagctgcccagcatggacctggtgactctccacagggcctctaccatcctctctgtggccacttcctgagccagaggccaggtcttcatggggccctgagcttctgctgcctctggtgagagggagagcccttcccatccttacccaccaggaactagagccccaaccacagcagatgcttcctgggcagccactggccaggccgttgtatccatgtcacccttagttgtgggcattcatgaaagcaatgcgcttgcttcagcacattgggatgcacagaaacgtgagggcaggggggcagttgtggtcgcccctccccagttgtgcatgtacccggctacttaggtatgcttaggggagctggtggccaggggtgccccttcaggcctgctctcacagtgaaaccacttcaagacagggcaggaagttaccttcctggtgcacacaccgaagtgctcgagggagaggctgccgccccctctccccttccctggctgtggacactggcagccaatggggaggcggcctctcccctgttgctgcccgtgtccacacaggaatgtacactggtggcagaaacatgcatttgccataaataattcagaaacacttgtatggtcctgtaaaacttctctggtgtttgttgacttctgcctgtgggtctgaggaagggagaaggcagaacccataggcagtccctgggcaagggaggattttcccggccgcagcacagccttccattcatgtgcacgtgagtctggtgaaaatggccttgtgaagtccagtgtctgtcatgcccctgagttcttttggtcccagagaggcagcctgggcagtctgtttacagctggcaaacagactggctggcaagttgtggggctgggtcagaaagtgtctggacttgtaatcgggtgccctgctgtccacaggtggactctggggaagccaggcccctggatcccaagtcctttgtgtccggagcctttcctggcctgtgcctggagggtagcacatctttccagcctcccagggctttgcagcctgcagatgccacctgtccctgagagaagttagcgtccctggccctggccggtggtctctcatccttgtgtgctgctctgctaagagatgtccaaggcggagccggggcaagatccttccagactcatctgtcagagccccaagccctttagacccagagcccaaggaccatgcctttgggacattaggactgcagcctttgcttctgtgtattttggagttttggtgacttttgtcacctggacacactcatttgttagccatagtgggttcccttggtcagcaacagtgcatgtacctctggatgtcatctgaggtgagaccaccgaggccttttctctctgtgtacagaggggagttaggagttgctggactggatgcattacgaggactggggacagggtagagggacatccagggatcagggcatgagtgggggcaaccccccggcctctgccctggcatggtctccgcatgggctgaggtgtagctgattggctgccacatttcggccatgctggctggcgtgcccatgttgcagatattttcccgagttccccagaatggatggtattgaatctcagccacatgcaacactgtgtccagcattctttgcaataaatactttttaaaaaataa

SEQ ID NO: 399 - DNA, 567 bp, Homo sapiens
  source 1..567: mol_type = unassigned DNA
gaactgggcccacttgttccaaaacgggcgggtagtgtgcatgaccaactgcccaactctcattgtcatggtgggcctgcccgccaggggcaagacctacatctccaagaagctgactcgatacctgaactggattggtgtgcccactcgggagttcaatgttggccagtatcgccgggacgtggtcaagacctacaaatcttttgaattttttctccccgacaatgaagagggcctgaaaatcaggaagcagtgtgccctggcagccctccgtgacgtccggcggttccttagtgaggaggggggacatgtggcggtttttgatgccacaaacaccacccgagaacggagagcgaccatctttaattttggagaacagaatggctacaagaccttttttgtcgagtccatctgtgtggatcctgaggtcatagctgccaacatcgtgcaagtgaaactgggcagccctgactatgtcaaccgcgacagtgatgaggctacggaggacttcatgaggcgcattgagtgctatgagaactcctacgagtcgctagatgaggacctgga

SEQ ID NO: 400 - DNA, 1643 bp, Homo sapiens
  source 1..1643: mol_type = unassigned DNA
agtttggttgcaggatggacagaggctcgttaggaggcagctccctgaccgacctggggccggggagcagcaggcgggtgtgcatgaccaactgcccaactctcattgtcatggtgggcctgcccgccaggggcaagacctacatctccaagaagctgactcgatacctgaactggattggtgtgcccactcgggagttcaatgttggccagtatcgccgggacgtggtcaagacctacaaatcttttgaattttttctccccgacaatgaagagggcctgaaaatcaggaagcagtgtgccctggcagccctccgtgacgtccggcggttccttagtgaggaggggggacatgtggcggtttttgatgccacaaacaccacccgagaacggagagcgaccatctttaattttggagaacagaatggctacaagaccttttttgtcgagtccatctgtgtggatcctgaggtcatagctgccaacatcgtgcaagtgaaactgggcagccctgactatgtcaaccgcgacagtgatgaggctacggaggacttcatgaggcgcattgagtgctatgagaactcctacgagtcgctagatgaggacctggatagggacctgtcctatatcaagatcatggatgtgggccagagctacgtggtgaaccgtgtggctgaccacatccagagccgcatcgtatattacctcatgaacatccacgtgaccccccgctccatctacctctgccggcacggggagagcgagctcaacctcaagggccggattggcggggacccaggactgtcccctcggggcagggagtttgccaagagtctagcccagttcatcagtgaccaaaatatcaaggatctgaaggtctggacaagccagatgaagaggacaatccagacggctgaggcactgggtgtgccctatgaacagtggaaggtcctcaacgagatcgatgcgggcgtctgtgaggaaatgacctacgaggaaattcaggataattatccactggagttcgccctgcgggaccaggacaagtaccggtaccggtaccctaaaggggagtcctacgaggacctggtccagagactggagcctgtcatcatggagctggagaggcaagagaatgtgctggtcatctgccaccaggctgtgatgcgctgcctgctggcctacttcctcgacaaggcagcagaacagctgccctacctcaagtgtccgctgcacacagtcctgaagctgactcctgtggcatatggttgtaaagtggagtccatattcctgaacgtggctgctgtgaacacgcaccgggacaggcctcagaacgtggacatctcaagacctccagaggaagcccttgtcacggtgcctgctcaccagtgaccatgttcatccactgtgaccactaggcaggcactgctctctgcagagggggtcattccaggccctccagtgtgtgtgatagtcaccatgccatgcagggatattcttgaagccacacatggctggcggaacccagagcccccaccccagcccacctggctctttgttgacagtcggcgacaaggttgtgcgtggctcctgacctgctgctaagagtcacttgaccagactgcatctgcatgggctgcgcgg

SEQ ID NO: 401 - DNA, 1744 bp, Homo sapiens
  source 1..1744: mol_type = unassigned DNA
gggctgtcgcggcttgaggaggggcggggcccaaggggcgggacctcgggtggcccgaggtggcccggctgctgggttggaagcggcgcagtccgactcatcccggccccgggatggcgtccccacgggaattgacacagaaccccctgaagaagatctggatgccatacagcaatgggcggcccgctctgcacgcttgccagcgcggtgaactttcaaaggtgggctagttttccaacaggaggaagggtgcctcttggccttaaagctgagcttgggcaggaacttcagcagagatgtgctcaggatagagacagaaaagtatgccgtgtgggcctgtgtctgtgtcccgggacattgtgcatgaccaactgcccaactctcattgtcatggtgggcctgcccgccaggggcaagacctacatctccaagaagctgactcgatacctgaactggattggtgtgcccactcgggagttcaatgttggccagtatcgccgggacgtggtcaagacctacaaatcttttgaattttttctccccgacaatgaagagggcctgaaaatcaggaagcagtgtgccctggcagccctccgtgacgtccggcggttccttagtgaggaggggggacatgtggcggtttttgatgccacaaacaccacccgagaacggagagcgaccatctttaattttggagaacagaatggctacaagaccttttttgtcgagtccatctgtgtggatcctgaggtcatagctgccaacatcgtgcaagtgaaactgggcagccctgactatgtcaaccgcgacagtgatgaggctacggaggacttcatgaggcgcattgagtgctatgagaactcctacgagtcgctagatgaggacctggatagggacctgtcctatatcaagatcatggatgtgggccagagctacgtggtgaaccgtgtggctgaccacatccagagccgcatcgtatattacctcatgaacatccacgtgaccccccgctccatctacctctgccggcacggggagagcgagctcaacctcaagggccggattggcggggacccaggactgtcccctcggggcagggagtttgccaagagtctagcccagttcatcagtgaccaaaatatcaaggatctgaaggtctggacaagccagatgaagaggacaatccagacggctgaggcactgggtgtgccctatgaacagtggaaggtcctcaacgagatcgatgcgggcgtctgtgaggaaatgacctacgaggaaattcaggataattatccactggagttcgccctgcgggaccaggacaagtaccggtaccggtaccctaaaggggagtcctacgaggacctggtccagagactggagcctgtcatcatggagctggagaggcaagagaatgtgctggtcatctgccaccaggctgtgatgcgctgcctgctggcctacttcctcgacaaggcagcagaacagctgccctacctcaagtgtccgctgcacacagtcctgaagctgactcctgtggcatatggttgtaaagtggagtccatattcctgaacgtggctgctgtgaacacgcaccgggacaggcctcagaacgtggacatctcaagacctccagaggaagcccttgtcacggtgcctgctcaccagtgaccatgttcatccactgtgaccactaggcaggcactgctctctgcagagggggtcattccaggccctccagtgt

SEQ ID NO: 402 - DNA, 970 bp, Homo sapiens
  source 1..970: mol_type = unassigned DNA
gctgctgggttggaagcggcgcagtccgactcatcccggccccgggatggcgtccccacgggaattgacacagaaccccctgaagaagatctggatgccatacagcaatgggcggcccgctctgcacgcttgccagcgcggtgtgtgcatgaccaactgcccaactctcattgtcatggtgggcctgcccgccaggggcaagacctacatctccaagaagctgactcgatacctgaactggattggtgtgcccactcgggagttcaatgttggccagtatcgccgggacgtggtcaagacctacaaatcttttgaattttttctccccgacaatgaagagggcctgaaaatcaggaagtttttgatgccacaaacaccacccgagaacggagagcgaccatctttaattttggagaacagaatggctacaagaccttttttgtcgagtccatctgtgtggatcctgaggtcatagctgccaacatcgtgcaagtgaaactgggcagccctgactatgtcaaccgcgacagtgatgaggctacggaggacttcatgaggcgcattgagtgctatgagaactcctacgagtcgctagatgaggacctggatagggacctgtcctatatcaagatcatggatgtgggccagagctacgtggtgaaccgtgtggctgaccacatccagagccgcatcgtatattacctcatgaacatccacgtgaccccccgctccatctacctctgccggcacggggagagcgagctcaacctcaagggccggattggcggggacccaggactgtcccctcggggcagggagggcgtctgtgaggaaatgacctacgaggaaattcaggataattatccactggagttcgccctgcgggaccaggacaagtaccggtaccggtaccctaaaggggaggctgagcccatcctgtccttcctgtggctccaggcaccacccccag

SEQ ID NO: 403 - DNA, 1032 bp, Homo sapiens
  source 1..1032: mol_type = unassigned DNA
ctagcgacggccgtagggagcgcttcctcctccccgccgccgccctcgccatggccgcgccggccccgggcctcatctcggtgttctcgagttcccaggagctgggtgcggcgctagcgcagctggtggcccagcgcgcagcatgctgcctggcaggggcccgcgcccgtttcgcgctcggcctgtcgggcgggagcctcgtctcgatgctagcccgcgagctacccgccgccgtcgcccctgccgggccagctagcttagcgcgctggacgctgggcttctgcgacgagcgcctcgtgcccttcgatcacgccgagagcacgtacggcctctaccggacgcatcttctctccagactgccgatcccagaaagccaggtgatcaccattaaccccgagctgcctgtggaggaggcggctgaggactacgccaagaagctgagacaggcattccaaggggactccatcccggttttcgacctgctgatcctgggggtgggccccgatggtcacacctgctcactcttcccagaccaccccctcctacaggagcgggagaagattgtggctcccatcagtgactccccgaagccaccgccacagcgtgtgaccctcacactacctgtcctgaatgcagcacgaactgtcatctttgtggcaactggagaaggcaaggcagctgttctgaagcgcattttggaggaccaggaggaaaacccgctgcccgccgccctggtccagccccacaccgggaaactgtgctggttcttggacgaggcggccgcccgcctcctgaccgtgcccttcgagaagcattccactttgtagctggccagagggacgccgcagctgggaccaggcacgcggcccatggggctgggcccctgctggccgccactctccgggctctcctttcaaaaagccacgtcgtgctgctgctggaagccaacagcctccggccagcagccctacccggggctcaacacacaggctgtggctctggacatccggatattaaaaggagcgttgctgg

SEQ ID NO: 404 - DNA, 2666 bp, Homo sapiens
  source 1..2666: mol_type = unassigned DNA
aggcaatcgctgacatcatccgggggcgggcgcccctgccctgcgggtgactccgacccctggctagagggtaggcggcgtggagcagcgcgcgcaagcgaggccaggggaaggtgggcgcaggtgaggggccgaggtgtgcgcaggactttagccggttgagaaggatcaagcaggcatttggagcacaggtgtctagaaacttttaaggggccggttcaagaaggaaaagttcccttctgctgtgaaactatttggcaagaggctggagggcccaatggctgcaaaatcgcaacccaacattcccaaagccaagagtctagatggcgtcaccaatgacagaaccgcatctcaagggcagtggggccgtgcctgggaggtggactggttttcactggcgagcgtcatcttcctactgctgttcgcccccttcatcgtctactacttcatcatggcttgtgaccagtacagctgcgccctgactggccctgtggtggacatcgtcaccggacatgctcggctctcggacatctgggccaagactccacctataacgaggaaagccgcccagctctataccttgtgggtcaccttccaggtgcttctgtacacgtctctccctgacttctgccataagtttctacccggctacgtaggaggcatccaggagggggccgtgactcctgcaggggttgtgaacaagtatcagatcaatggcctgcaagcctggctcctcacgcacctgctctggtttgcaaacgctcatctcctgtcctggttctcgcccaccatcatcttcgacaactggatcccactgctgtggtgcgccaacatccttggctatgccgtctccaccttcgccatggtcaagggctacttcttccccaccagcgccagagactgcaaattcacaggcaatttcttttacaactacatgatgggcatcgagtttaaccctcggatcgggaagtggtttgacttcaagctgttcttcaatgggcgccccgggatcgtcgcctggaccctcatcaacctgtccttcgcagcgaagcagcgggagctccacagccatgtgaccaatgccatggtcctggtcaacgtcctgcaggccatctacgtgattgacttcttctggaacgaaacctggtacctgaagaccattgacatctgccatgaccacttcgggtggtacctgggctggggcgactgtgtctggctgccttatctttacacgctgcagggtctgtacttggtgtaccaccccgtgcagctgtccaccccgcacgccgtgggcgtcctgctgctgggcctggtgggctactacatcttccgggtggccaaccaccagaaggacctgttccgccgcacggatgggcgctgcctcatctggggcaggaagcccaaggtcatcgagtgctcctacacatccgccgatgggcagaggcaccacagcaagctgctggtgtcgggcttctggggcgtggcccgccacttcaactacgtcggcgacctgatgggcagcctggcctactgcctggcctgtggcggcggccacctgctgccctacttctacatcatctacatggccatcctgctgacccaccgctgcctccgggacgagcaccgctgcgccagcaagtacggccgggactgggagcgctacaccgccgcagtgccttaccgcctgctgcctggaatcttctaagggcacgccctagggagaagccctgtggggctgtcaagagcgtgttctgccaggtccatgggggctggcatcccagctccaactcgaggagcctcagtttcctcatctgtaaactggagagagcccagcacttggcaggtgtccagtacctaatcacgctctgttccttgcttttgccttcaagggaattccgagtgtccagcactgccgtattgccagcacagacggattttctctaatcagtgtccctggggcaggaggatgacccagtcacctttactagtcctttggagacaatttacctgtattaggagcccaggccacgctacactctgcccacactggtgagcaggaggtcttcccacgccctgtcattaggctgcatttactcttgctaaataaaagtgggagtggggcgtgcgcgttatccatgtattgcctttcagctctagatccccctcccctgcctgctctgcagtcgtgggtggggcccgtgcgccgtttctccttggtagcgtgcacggtgttgaactgggacactggggagaaaggggctttcatgtcgtttccttcctgctcctgctgcacagctgccaggagtgctctgcctggagtctgcagacctcagagaggtcccagcaccggctgtggcctttcaggtgtaggcaggtgggctctgcttcccgattccctgtgagcgcccaccctctcgaaagaattttctgcttgccctatgactgtgcagactctggctcgagcaacccggggaacttcaccctcaggggcctcccacaccttctccagcgaggaggtctcagtcccagcctcgggagggcacctccttttctgtgctttcttccctgaggcattcttcctcatccctagggtgttgtgtagaactctttttaaactctatgctccgagtagagttcatctttatattaaacttcccctgttcaaa

SEQ ID NO: 405 - DNA, 2601 bp, Homo sapiens
  source 1..2601: mol_type = unassigned DNA
gcgggtgactccgacccctggctagagggtaggcggcgtggagcagcgcgcgcaagcgaggccaggggaaggtgggcgcaggactttagccggttgagaaggatcaagcaggcatttggagcacaggtgtctagaaacttttaaggggccggttcaagaaggaaaagttcccttctgctgtgaaactatttggcaagaggctggagggcccaatggctgcaaaatcgcaacccaacattcccaaagccaagagtctagatggcgtcaccaatgacagaaccgcatctcaagggcagtggggccgtgcctgggaggtggactggttttcactggcgagcgtcatcttcctactgctgttcgcccccttcatcgtctactacttcatcatggcttgtgaccagtacagctgcgccctgactggccctgtggtggacatcgtcaccggacatgctcggctctcggacatctgggccaagactccacctataacgaggaaagccgcccagctctataccttgtgggtcaccttccaggtgcttctgtacacgtctctccctgacttctgccataagtttctacccggctacgtaggaggcatccaggagggggccgtgactcctgcaggggttgtgaacaagtatcagatcaatggcctgcaagcctggctcctcacgcacctgctctggtttgcaaacgctcatctcctgtcctggttctcgcccaccatcatcttcgacaactggatcccactgctgtggtgcgccaacatccttggctatgccgtctccaccttcgccatggtcaagggctacttcttccccaccagcgccagagactgcaaattcacaggcaatttcttttacaactacatgatgggcatcgagtttaaccctcggatcgggaagtggtttgacttcaagctgttcttcaatgggcgccccgggatcgtcgcctggaccctcatcaacctgtccttcgcagcgaagcagcgggagctccacagccatgtgaccaatgccatggtcctggtcaacgtcctgcaggccatctacgtgattgacttcttctggaacgaaacctggtacctgaagaccattgacatctgccatgaccacttcgggtggtacctgggctggggcgactgtgtctggctgccttatctttacacgctgcagggtctgtacttggtgtaccaccccgtgcagctgtccaccccgcacgccgtgggcgtcctgctgctgggcctggtgggctactacatcttccgggtggccaaccaccagaaggacctgttccgccgcacggatgggcgctgcctcatctggggcaggaagcccaaggtcatcgagtgctcctacacatccgccgatgggcagaggcaccacagcaagctgctggtgtcgggcttctggggcgtggcccgccacttcaactacgtcggcgacctgatgggcagcctggcctactgcctggcctgtggcggcggccacctgctgccctacttctacatcatctacatggccatcctgctgacccaccgctgcctccgggacgagcaccgctgcgccagcaagtacggccgggactgggagcgctacaccgccgcagtgccttaccgcctgctgcctggaatcttctaagggcacgccctagggagaagccctgtggggctgtcaagagcgtgttctgccaggtccatgggggctggcatcccagctccaactcgaggagcctcagtttcctcatctgtaaactggagagagcccagcacttggcaggtgtccagtacctaatcacgctctgttccttgcttttgccttcaagggaattccgagtgtccagcactgccgtattgccagcacagacggattttctctaatcagtgtccctggggcaggaggatgacccagtcacctttactagtcctttggagacaatttacctgtattaggagcccaggccacgctacactctgcccacactggtgagcaggaggtcttcccacgccctgtcattaggctgcatttactcttgctaaataaaagtgggagtggggcgtgcgcgttatccatgtattgcctttcagctctagatccccctcccctgcctgctctgcagtcgtgggtggggcccgtgcgccgtttctccttggtagcgtgcacggtgttgaactgggacactggggagaaaggggctttcatgtcgtttccttcctgctcctgctgcacagctgccaggagtgctctgcctggagtctgcagacctcagagaggtcccagcaccggctgtggcctttcaggtgtaggcaggtgggctctgcttcccgattccctgtgagcgcccaccctctcgaaagaattttctgcttgccctatgactgtgcagactctggctcgagcaacccggggaacttcaccctcaggggcctcccacaccttctccagcgaggaggtctcagtcccagcctcgggagggcacctccttttctgtgctttcttccctgaggcattcttcctcatccctagggtgttgtgtagaactctttttaaactctatgctccgagtagagttcatctttatattaaacttcccctgttcaaa

SEQ ID NO: 406 - DNA, 523 bp, Homo sapiens
  source 1..523: mol_type = unassigned DNA
gcgcaagcgaggccaggggaaggtgggcgcaggtgaggggccgaggtgtgcgcaggtgagtggccaaggactttagccggttgagaaggatcaagcaggcatttggagcacaggtgtctagaaacttttaaggggccggttcaagaaggaaaagttcccttctgctgtgaaactatttggcaagaggctggagggcccaatggctgcaaaatcgcaacccaacattcccaaagccaagagtctagatggcgtcaccaatgacagaaccgcatctcaagggcagtggggccgtgcctgggaggtggactggttttcactggcgagcgtcatcttcctactgctgttcgcccccttcatcgtctactacttcatcatggcttgtgaccagtacagctgcgccctgactggccctgtggtggacatcgtcaccggacatgctcggctctcggacatctgggccaagactccacctataacgaggaaagccgcccagctctataccttgtgggtcaccttccaggtg

SEQ ID NO: 407 - DNA, 968 bp, Homo sapiens
  source 1..968: mol_type = unassigned DNA
acgagccggcgtctgagggatgctctgtccccgcgctgtctggagcttccccgggcgaaggctgcctggctccggggtcggctcctggccccatgccgcgctccgcggcggctctttctcctgccccacctgttgttcgcctccctctttgtcagtgctgagccaggcacagcagctttgcgatgggactggcttgtccgccgtcctccctgacatgcggctgttgaagccctgagcactggaccttctgcctcttgcttgactcctactgtgggccttgagcttctgccctctcctgaaatgtcagctgcctgcggtcttattcatttttgtgttccttgcaggactttagccggttgagaaggatcaagcaggcatttggagcacaggtgtctagaaacttttaaggggccggttcaagaaggaaaagttcccttctgctgtgaaactatttggcaagaggctggagggcccaatggctgcaaaatcgcaacccaacattcccaaagccaagagtctagatggcgtcaccaatgacagaaccgcatctcaagggcagtggggccgtgcctgggaggtggactggttttcactggcgagcgtcatcttcctactgctgttcgcccccttcatcgtctactacttcatcatggcttgtgaccagtacagctgcgccctgactggccctgtggtggacatcgtcaccggacatgctcggctctcggacatctgggccaagactccacctataacgaggaaagccgcccagctctataccttgtgggtcaccttccaggtgcttctgtacacgtctctccctgacttctgccataagtttctacccggctacgtaggaggcatccaggagggggccgtgactcctgcaggggttgtgaacaagtatcagatcaatggcctgcaagcctggctcctcacgcacctgctctggtttgcaaacgctcatctcc

SEQ ID NO: 408 - DNA, 579 bp, Homo sapiens
  source 1..579: mol_type = unassigned DNA
atgaaacgttccaaatacaccaaaagtggagagtacggtaggagcgctccatcgtgcccgcgggacagcagacgatagcaatcgattctccgtgctgggaatcccgccaccctgggcggatggcgctgaattcttgggaaccctctcctgcccctttcactcctgtaccacgtgtgactttagccggttgagaaggatcaagcaggcatttggagcacaggtgtctagaaacttttaaggggccggttcaagaaggaaaagttcccttctgctgtgaaactatttggcaagaggctggagggcccaatggctgcaaaatcgcaacccaacattcccaaagccaagagtctagatggcgtcaccaatgacagaaccgcatctcaagggcagtggggccgtgcctgggaggtggactggttttcactggcgagcgtcatcttcctactgctgttcgcccccttcatcgtctactacttcatcatggcttgtgaccagtacagctgcgccctgactggccctgtggtggacatcgtcaccggacatgctcggctctcggacatctgggccaagactccacct

SEQ ID NO: 409 - DNA, 507 bp, Homo sapiens
  source 1..507: mol_type = unassigned DNA
gtggagcagcgcgcgcaagcgaggccaggggaaggtgggcgcaggtgaggggccgaggtgtgcgcagccggttgagaaggatcaagcaggcatttggagcacaggtgtctagaaacttttaaggggccggttcaagaaggaaaagttcccttctgctgtgaaactatttggcaagaggctggagggcccaatggctgcaaaatcgcaacccaacattcccaaagccaagagtctagatggcgtcaccaatgacagaaccgcatctcaagggcagtggggccgtgcctgggaggtggactggttttcactggcgagcgtcatcttcctactgctgttcgcccccttcatcgtctactacttcatcatggcttgtgaccagtacagctgcgccctgactggccctgtggtggacatcgtcaccggacatgctcggctctcggacatctgggccaagactccacctataacgaggaaagccgcccagctctataccttgtgggtcacctt

SEQ ID NO: 410 - DNA, 2622 bp, Homo sapiens
  source 1..2622: mol_type = unassigned DNA
atggattcttatagcacctatttggcaactgtcaaagtcagtggctcgtggttagaagagcaagatgaagacatttatgaggttgaatctcgcgtgcctttaccacatccttttcctctttgtgaacatttggatgaaaataactcagtaattgttaatacttctattttccattttattcataaaagaaacgggcatatattaaagcttatttctaaaatttcactgcctacccctccttattcacttgaacatgcgaaagtgacacagacagagttgatgcgtgagtcatttagacagaaacaagaagcaacagagtcccttaagtgccaagaggaacttcgagagcgccttcatgaggagtccagggccagagaacagctagctgtggagctcagtaaggctgagggcgtcattgatggctatgcagatgaaaaaactctttttgaaaggcaaattcaggaaaaaactgatataatagatcgtcttgagcaggagttgttatgtgcaagtaacaggttgcaagaattggaggcagagcaacagcagatccaagaagaaagagaattactgtccagacaaaaggaagctatgaaagcagaggcaggcccagttgaacaacaattactacaggagacagaaaaattaatgaaggaaaaactagaagtacaatgtcaagctgaaaaagtacgtgatgaccttcaaaaacaagtgaaagctctagaaatagatgtggaagaacaagtcagtaggtttatagagctggaacaagaaaaaaatactgaactaatggatttaagacagcaaaaccaagcattggaaaagcagttagaaaaaatgagaaaatttttagatgagcaagccattgacagagaacatgagagagatgtattccaacaggaaatacagaaactagaacagcaacttaaggttgttcctcgattccagcctatcagtgaacatcaaactagagaggttgaacagttagcaaatcatctgaaagaaaaaacagacaaatgcagtgagcttttgctctctaaagagcagcttcaaagggatatacaagaaaggaatgaagaaatagagaaactggagttcagagtaagagaactggagcaggcgcttcttgtgagtgcagatacttttcaaaaggtagaggaccgaaaacactttggagctgtagaagctaaaccagaattgtccctagaagtacaattgcaggctgaacgagatgccatagacagaaaggaaaaagagattacaaacttagaagagcaattagaacagtttagagaagaactggaaaataagaatgaagaagttcaacaattacatatgcaattagaaatacagaaaaaggaatctactacccgcctacaagaacttgaacaggaaaacaaattatttaaggatgacatggagaaactgggacttgccataaaggaatctgatgccatgtctactcaagaccaacatgtgctatttgggaaatttgctcaaataatacaggaaaaagaggtagaaattgaccaattaaatgaacaagttacgaaactccagcagcaacttaaaattacaacagataacaaggttattgaagaaaaaaatgaactgataagggatcttgaaacccaaatagaatgtttgatgagtgatcaagaatgtgtgaagagaaatagagaagaagaaatagagcagctcaatgaagtgattgaaaaacttcaacaggaattggcaaatattggacagaagacatcaatgaatgctcattccctctcagaagaagcagacagtttaaaacatcaattggatgtggttatagctgaaaagctggccttggaacagcaagtagaaaccgctaatgaagaaatgaccttcatgaaaaatgtacttaaagaaaccaattttaaaatgaatcagctaacacaggaattattcagcttaaagagagaacgtgaaagtgtggaaaagattcaaagcataccagagaatagtgttaacgtggctatagatcatctgagcaaagacaaacctgaactagaagtagtccttacagaggatgctcttaaatccctagaaaatcagacatacttcaaatcttttgaagaaaatggcaaaggttccataattaatttggaaacaaggttgctacaacttgagagcactgttagtgcaaaggacttagaacttacccagtgttataaacaaataaaagacatgcaagaacaaggccagtttgaaacagaaatgcttcaaaagaagattgtaaacctacagaaaatagttgaagaaaaagtggctgctgctcttgtcagtcaaatccaacttgaggcagttcaggaatatgcaaaattctgtcaagataatcaaacaatttcatcagaacctgaaagaacaaatattcagaatttaaatcaactaagagaagatgagttggggtcagatatatcagcattaaccttgagaatatcagaattagaaagccaggttgttgaaatgcatactagtttgattttagaaaaagaacaagtagaaattgcagaaaaaaatgttttagaaaaagaaaagaagctgctagaactacagaagctattggagggcaatgagaaaaaacagagagag

SEQ ID NO: 411 - DNA, 12471 bp, Homo sapiens
  source 1..12471: mol_type = unassigned DNA
tacgtggagacgaagatggcggcggcggcggcggtgacggcgcttcccgtgcggctgaggacgatccgccagtgagcgcggagactgcttccacttcgggcgggggagcgccggaccgaatcggctctctaggccgtggagcttgccgtcccacctccgtccaaatcgacctttcctttctatccccaaccacccctcaacccctgttttcccctgccttccttgcagaggccatggaggacgaggagagacagaagaagctggaggccggcaaagccaagcttgcccagtttcgacaaagaaaagctcagtcggatgggcagagtccttccaagaagcagaaaaaaaagagaaaaacgtcaagcagtaaacatgatgtgtcagcacaccatgatttgaatattgatcaatcacagtgtaatgaaatgtacataaatagttctcagagagtagaatcaactgtgattcctgaatctacaataatgagaactctacatagtggagaaataaccagtcatgagcagggcttctctgtggaactggaaagtgaaatttcaaccacagcagatgactgcagttcagaggtaaatggttgcagttttgtgatgagaacaggaaagcctacaaatttattaagggaagaagaatttggtgttgatgattcttattctgaacaaggagcacaagacagtccgactcatctagagatgatggaaagtgagttggctgggaagcagcatgagattgaagagctaaacagagagctggaagaaatgagggttacctatgggactgaaggactgcagcagttacaagaatttgaagctgccattaaacaaagagatggcattataacccagctcactgctaatttacaacaagcaagaagagaaaaggatgagacaatgagagaatttttagagttgacagaacagagtcaaaaattacagattcaatttcagcaattacaggctagtgaaactctgagaaacagcactcatagtagcacagctgcagacttactacaagccaaacaacagatcctcactcatcaacagcagcttgaagaacaagaccacttattagaagattatcagaaaaagaaagaagacttcacaatgcaaattagtttcttgcaagagaaaattaaagtatatgaaatggaacaagataaaaaagtagaaaactcaaataaagaagaaatacaggaaaaggagacaatcattgaagaattaaacacaaaaataatagaagaagaaaagaaaactcttgagctaaaggataaattaacaactgctgataaattactaggagaattacaagaacagattgtgcaaaagaaccaagaaataaaaaacatgaaattagagctgactaattctaagcaaaaagaaagacagtcttctgaagaaataaaacagttaatggggacagtcgaagaacttcagaagagaaatcataaagacagccagttcgaaactgatatagtacaacgaatggaacaagaaacacaaagaaagttagaacaactccgggcagagctggatgagatgtatgggcagcagatagtgcaaatgaaacaagaattaataagacaacacatggcacagatggaggaaatgaaaacacggcataagggagaaatggagaatgctttaaggtcatattcaaatattacagttaatgaagatcagataaagttaatgaatgtggcaataaatgaactgaatataaaattgcaagatactaactctcaaaaggaaaaactcaaggaagaactaggactaattttagaagaaaagtgtgctctacagagacagcttgaagaccttgttgaagaattgagcttttcaagggaacagattcagagagctagacagacaatagctgaacaagaaagtaaacttaatgaagcacataagtcccttagtacagtggaagatttgaaagctgagattgtttctgcatctgaatccagaaaggaactagaattaaaacatgaagcagaagttacaaattacaagataaaacttgaaatgttagaaaaagaaaagaatgctgtgttagacagaatggctgaatcacaagaagctgaattagagaggctgagaacacagcttctatttagtcacgaagaagagctttccaaactgaaggaagatttagaaattgaacatcgaataaatattgaaaaacttaaagataatttaggcattcactataaacagcagatagatggtttacagaatgaaatgagtcaaaagatagaaaccatgcagtttgaaaaggacaatttgataactaagcagaatcaattaattttggaaatttcaaagctaaaagatttacagcagtctcttgtaaattcaaagtcagaagaaatgactcttcaaatcaatgaacttcaaaaagaaattgaaatactcagacaagaagaaaaagaaaagggtacacttgaacaagaagttcaagaattacaacttaaaacagaattgttagaaaaacagatgaaggaaaaagagaatgatcttcaagaaaaatttgcacaacttgaagcagagaatagcattcttaaagatgaaaagaaaacccttgaagacatgttgaaaatacatactcctgttagccaagaagaaagattgattttcttagactccattaagtccaaatccaaagactctgtgtgggaaaaagaaatagaaatacttatagaggaaaatgaggacctcaaacaacaatgtattcagctaaatgaagagattgaaaagcaaaggaacactttttcatttgctgaaaaaaactttgaagttaactatcaagagttacaagaggagtatgcttgccttctcaaagtaaaagatgatttagaagacagtaaaaataaacaggaattagagtataaaagtaaacttaaagcacttaatgaagagcttcatttgcaaagaataaatccaactacagtgaaaatgaaaagttctgtctttgatgaagacaaaacttttgtagcagaaacattggaaatgggtgaggttgttgaaaaggatacaacagaactcatggaaaaacttgaggtaaccaagcgagagaaattagagctgtcacagagactgtctgatctttctgaacaattgaaacagaaacatggtgagattagttttctaaatgaagaagttaaatctttaaagcaagagaaagaacaagtttcattgagatgtagagagctagaaatcattattaaccacaacagggcagaaaatgtacagtcatgtgatactcaagtaagctctttattagatggagttgtgaccatgacaagcaggggtgctgaaggatcagtttctaaagtaaataaaagttttggtgaagaatcaaaaataatggtggaagataaagtttcttttgaaaatatgactgttggagaagaaagtaagcaagaacagttgattttggatcacttaccatctgtaacaaaggaatcatcacttagagcaactcaaccaagtgaaaatgataaacttcagaaagaactcaatgtacttaaatcagaacagaatgatttaaggctacagatggaagcccaacgcatttgcctctctctggtttattcaactcatgtggatcaggttcgtgaatatatggaaaatgaaaaagataaagctctttgcagtcttaaagaagagcttatttttgctcaagaggaaaagatcaaggaacttcagaaaatacaccagttagaactacagactatgaaaacacaagaaacaggtgatgaaggaaagcctttacatctgctcattggaaaacttcaaaaggcagtgtctgaagaatgttcttattttttacagactttatgcagtgtccttggtgaatattatactcctgctttaaaatgtgaagtaaatgcagaagacaaagagaattctggtgattacatttctgaaaatgaagatccagaattacaagattatagatatgaagttcaagactttcaagaaaatatgcacactcttctcaacaaagtaacagaagaatacaacaaactcttggtacttcaaacacgactaagcaagatctggggacagcagacagatggtatgaaacttgaatttggagaagaaaaccttccaaaagaggaaacagagtttttatcaatccattctcagatgaccaatttggaagacattgatgtcaatcataaaagcaagttatcttctctgcaagatcttgaaaaaactaaacttgaagaacaagttcaagaattagaaagcctcatatcctctttgcagcaacagttgaaagaaactgaacaaaactatgaggcagagatccactgtttacagaagaggcttcaagctgttagtgagtccacggttccgccaagcttacctgttgattcggtggtaattacagaatctgatgcacagagaacaatgtaccctggaagttgtgtgaaaaagaatattgatggtacaatagagttttctggtgaatttggagtgaaagaggaaacaaatatcgttaagttgcttgaaaaacaataccaagaacaattagaagaagaagtagctaaggttattgtgtcaatgagtatagcatttgctcaacaaactgaactgtctagaatatctgggggaaaagaaaatactgcatcatcaaagcaagcacatgctgtgtgtcagcaagaacaacattattttaatgaaatgaaattatcacaggatcaaattggttttcagacttttgagacagtggatgtgaaatttaaagaagaatttaaaccacttagtaaagagttaggagaacatggaaaggaaattttattatcaaatagtgatccccatgatataccagaatcaaaggactgtgtgctgactatttcagaagaaatgttctccaaagataaaacatttatagttagacagtctattcatgatgagatttcagtgtcaagcatggatgcttctagacaactaatgttgaatgaagaacagttggaagatatgagacaggaacttgtacgacaataccaagaacatcaacaggcaacggaattgttaaggcaagcacatatgcggcaaatggagagacagcgagaagaccaggaacagctacaagaagagattaagagacttaatagacaattagcccagagatcctccatagataatgaaaacctggtttcagagagagagagggtgcttttagaggagctggaagcactaaagcagctgtctttagctggaagagagaagctgtgttgtgagctgcgcaacagcagtacgcaaacacagaatggaaatgaaaaccaaggagaagttgaagaacaaacatttaaagaaaaggaattagacagaaaacctgaagatgtgcctcctgagattttgtctaatgaaaggtatgcactccagaaagctaataatagacttttgaagatcctcttagaagttgtaaagacaacagcagctgttgaagaaacaattggtcgccatgtccttgggattctagatagatctagtaaaagccagtcatctgccagcctaatttggaggtcagaagcagaggcatctgtaaagtcatgtgtccatgaggaacatacaagagttacagatgaatccattccctcttattctggaagtgatatgccaagaaatgacattaacatgtggtcaaaagtaactgaggaaggaacagagctgtcacaacgacttgtgaggagtggttttgctggaactgaaatagaccctgaaaatgaagaacttatgctgaacattagctctcgactacaagcagcagttgaaaaactcctagaagccataagtgaaactagcagtcagcttgaacatgcgaaagtgacacagacagagttgatgcgtgagtcatttagacagaaacaagaagcaacagagtcccttaagtgccaagaggaacttcgagagcgccttcatgaggagtccagggccagagaacagctagctgtggagctcagtaaggctgagggcgtcattgatggctatgcagatgaaaaaactctttttgaaaggcaaattcaggaaaaaactgatataatagatcgtcttgagcaggagttgttatgtgcaagtaacaggttgcaagaattggaggcagagcaacagcagatccaagaagaaagagaattactgtccagacaaaaggaagctatgaaagcagaggcaggcccagttgaacaacaattactacaggagacagaaaaattaatgaaggaaaaactagaagtacaatgtcaagctgaaaaagtacgtgatgaccttcaaaaacaagtgaaagctctagaaatagatgtggaagaacaagtcagtaggtttatagagctggaacaagaaaaaaatactgaactaatggatttaagacagcaaaaccaagcattggaaaagcagttagaaaaaatgagaaaatttttagatgagcaagccattgacagagaacatgagagagatgtattccaacaggaaatacagaaactagaacagcaacttaaggttgttcctcgattccagcctatcagtgaacatcaaactagagaggttgaacagttagcaaatcatctgaaagaaaaaacagacaaatgcagtgagcttttgctctctaaagagcagcttcaaagggatatacaagaaaggaatgaagaaatagagaaactggagttcagagtaagagaactggagcaggcgcttcttgtgagtgcagatacttttcaaaaggtagaggaccgaaaacactttggagctgtagaagctaaaccagaattgtccctagaagtacaattgcaggctgaacgagatgccatagacagaaaggaaaaagagattacaaacttagaagagcaattagaacagtttagagaagaactggaaaataagaatgaagaagttcaacaattacatatgcaattagaaatacagaaaaaggaatctactacccgcctacaagaacttgaacaggaaaacaaattatttaaggatgacatggagaaactgggacttgccataaaggaatctgatgccatgtctactcaagaccaacatgtgctatttgggaaatttgctcaaataatacaggaaaaagaggtagaaattgaccaattaaatgaacaagttacgaaactccagcagcaacttaaaattacaacagataacaaggttattgaagaaaaaaatgaactgataagggatcttgaaacccaaatagaatgtttgatgagtgatcaagaatgtgtgaagagaaatagagaagaagaaatagagcagctcaatgaagtgattgaaaaacttcaacaggaattggcaaatattggacagaagacatcaatgaatgctcattccctctcagaagaagcagacagtttaaaacatcaattggatgtggttatagctgaaaagctggccttggaacagcaagtagaaaccgctaatgaagaaatgaccttcatgaaaaatgtacttaaagaaaccaattttaaaatgaatcagctaacacaggaattattcagcttaaagagagaacgtgaaagtgtggaaaagattcaaagcataccagagaatagtgttaacgtggctatagatcatctgagcaaagacaaacctgaactagaagtagtccttacagaggatgctcttaaatccctagaaaatcagacatacttcaaatcttttgaagaaaatggcaaaggttccataattaatttggaaacaaggttgctacaacttgagagcactgttagtgcaaaggacttagaacttacccagtgttataaacaaataaaagacatgcaagaacaaggccagtttgaaacagaaatgcttcaaaagaagattgtaaacctacagaaaatagttgaagaaaaagtggctgctgctcttgtcagtcaaatccaacttgaggcagttcaggaatatgcaaaattctgtcaagataatcaaacaatttcatcagaacctgaaagaacaaatattcagaatttaaatcaactaagagaagatgagttggggtcagatatatcagcattaaccttgagaatatcagaattagaaagccaggttgttgaaatgcatactagtttgattttagaaaaagaacaagtagaaattgcagaaaaaaatgttttagaaaaagaaaagaagctgctagaactacagaagctattggagggcaatgagaaaaaacagagagagaaagaaaagaaaagaagccctcaagatgttgaagttctcaagacaactactgagctatttcatagcaatgaagaaagtggattttttaatgaactcgaggctcttagagctgaatcagtggctaccaaagcagaacttgccagttataaagaaaaggctgaaaaacttcaagaagagcttttggtaaaagaaacaaatatgacatctcttcagaaagacttaagccaagttagggatcacctcgcagaggcaaaagagaaattgtccattttagaaaaagaagatgagactgaggtacaagaaagcaaaaaggcctgcatgtttgagccacttcctataaaactgagtaagagcattgcatcccagacagatgggactctgaagatcagtagcagcaatcagactccacaaattcttgttaaaaatgcaggaatacaaattaatttacagagtgaatgttcctcagaagaagttactgaaataatcagtcagtttactgaaaaaattgagaagatgcaagaactacatgctgctgaaattttggacatggaatccagacatatttcagaaactgaaaccttaaagagggaacactatgttgccgttcagttactgaaagaggaatgtggtaccttgaaggcagtgatacagtgtctgagaagtaaagagggatcctcaattcctgagctagcacattctgatgcttaccagactagagaaatatgctccagtgattctggatcagactggggtcagggaatttatcttacacacagtcagggatttgacatagcatcagaaggccgaggagaagaaagtgaaagtgcaacagattcctttccaaagaaaataaagggattactgagagctgtccataatgaaggcatgcaggtgctttctctcactgagtctccctatagtgatggagaggaccattctattcagcaggtttcagaaccttggctagaagagagaaaagcttacatcaatacaatctcatctctaaaggatttaattacaaagatgcaactgcaaagagaagccgaggtttatgatagttctcaatctcatgagagcttctcagactggcgaggtgaactactgcttgcccttcaacaagttttcttagaagagcgtagtgttttactagcagcatttcggacggagctgacagctctaggtactacagatgcagttggtttactaaactgtttggaacagagaatacaagaacagggtgttgaatatcaagcagctatggaatgcctccagaaagcagatagaaggagtttgttatctgaaattcaggcactgcatgcacaaatgaatggtaggaaaattactctgaaaagagaacaagagagtgagaaaccaagccaagaactcttggaatataatatacagcagaagcagtctcaaatgctggagatgcaagtggagctcagcagtatgaaagacagagcaacggaactgcaggagcagctgagttctgagaaaatggtggttgctgaactgaagagtgagcttgcacaaactaaattggaactagaaacaacactcaaggcacagcataaacacctaaaagaattggaggctttcaggttggaagttaaagataagacagatgaagtacatttgcttaatgacacattagcaagtgaacagaaaaaatcaagagagctccagtgggctttggagaaagagaaagccaagttgggacgcagtgaagaacgggataaagaagaacttgaggatctgaagttttcacttgagagtcagaaacaaaggaatcttcagctaaatctacttttggaacaacagaaacaactactgaacgaatcccagcaaaaaatagaatcacagagaatgctatatgatgcccagttgtcagaagaacaaggtcgaaacttagagcttcaggtacttcttgaatctgagaaagttcgaattcgggaaatgagtagtaccctagatagggagcgggaattgcacgcacagctgcagagcagtgatggtactggacagtctcggccacccttgccctcagaggacctactgaaagagctgcagaaacagctagaggaaaaacacagtcgcatagtagaattgttaaatgagactgaaaaatataaactggattctttgcaaacacgacagcaaatggaaaaagataggcaggttcacaggaaaacactgcagacagaacaggaggccaacactgagggacagaaaaaaatgcatgagctccagtccaaagtggaagatcttcagcgccagctggaagagaaaagacaacaagtttataagttagaccttgaaggacagcgactacaaggaatcatgcaggaattccagaagcaagaactagaacgagaagaaaaacgagaaagtagaagaattctgtatcagaaccttaatgagccaaccacgtggagcttaaccagtgatagaactagaaattgggttcttcaacagaaaatagaaggagaaacaaaagaatcaaactacgctaaattgattgaaatgaatggaggaggaaccggctgtaatcatgaattagaaatgatcagacaaaagcttcaatgtgtagcttcaaaactacaggttctaccccagaaagcctctgagagactacagtttgaaacagcagatgatgaagatttcatttgggttcaggaaaatattgatgaaattattttacaactacagaaattaactggccagcaaggtgaagagcccagcttggtgtccccaagtacttcttgtggctcattgactgaaagactactgagacaaaatgctgagctgacagggcatatcagtcaactgactgaagagaagaatgacttaaggaacatggttatgaagctggaagagcagatcaggtggtatcgacagacaggagctggtagagataattcttccaggttttcattgaatggtggtgccaacattgaagccatcattgcctctgaaaaagaagtatggaacagagaaaaattgactctccagaaatctttgaaaagggcagaggctgaagtatacaaactgaaagctgaactaagaaatgactctttacttcaaactctgagccctgattctgaacatgtcactttaaagagaatttatggtaaatacttgagggcagaaagttttcgaaaggctctcatttaccagaagaaatacctgctgctgttactgggtgggttccaggaatgtgaagatgccaccttggccctgcttgcccggatgggggggcagccagctttcacggatctagaggtgatcaccaatcgcccaaagggcttcaccaggtttcggtcggccgtcagagtatccattgcaatttccagaatgaaatttttggttcgacggtggcatcgagtcacaggttctgtttccatcaatattaacagagatggctttggactgaatcaaggtgcagaaaagactgactcattttatcattcttctggtgggctggagttatatggagaaccaagacatactacgtatcgctcaagatcagatctggactatattaggtcccctttaccatttcagaataggtacccaggcactccagctgatttcaatcctggttctttagcatgttctcagcttcagaattacgatcctgacagagccctaacagattatatcactcggctagaggcactgcaaagacgacttggaactatacagtcaggttcaactactcaatttcatgctggcatgagaagataatcctttgaaacatcattaattgaagtgattttaaatagatttccttttgtaaatcaatggttcttttgtgcttttgtattgtgaatattcaatgggaccaatatgaacacagcttatgattgtatacaaatcccttgccagcacatgaaaacaaactggaatttgtatatataagcattgtgtatgtattcatgcacaataattattgaattacctgtatatttgtggaatgctaatttaaaacattaaattataaaccttgtgtatttatcaaatgggtgaaaagattaaacttttacgcattacaatactgctgaatgtgtagctcgaggtgtcctgcacttttcttataaggctactgaagttacatgttttgcctaatatattctactggtgatgaagacagataatatcacttgtagagacctatttttgtataatggtagaagttttgaattttatggggtattttgtcaagtactgaaataaaaatgacttcaccattttcaccaca

SEQ ID NO: 412 - DNA, 12313 bp, Homo sapiens
  source 1..12313: mol_type = unassigned DNA
gacgaagatggcggcggcggcggcggtgacggcgcttcccgtgcggctgaggacgatccgccagtgagcgcggagactgcttccacttcgggcgggggagcgccggaccgaatcggctctctaggccgtggagcttgccgtcccacctccgtccaaatcgacctttcctttctatccccaaccacccctcaacccctgttttcccctgccttccttgcagaggccatggaggacgaggagagacagaagaagctggaggccggcaaagccaagattgaagaactctctttagcttttcttgtcagacagcttgcccagtttcgacaaagaaaagctcagtcggatgggcagagtccttccaagaagcagaaaaaaaagagaaaaacgtcaagcagtaaacatgatgtgtcagcacaccatgatttgaatattgatcaatcacagtgtaatgaaatgtacataaatagttctcagagagtagaatcaactgtgattcctgaatctacaataatgagaactctacatagtggagaaataaccagtcatgagcagggcttctctgtggaactggaaagtgaaatttcaaccacagcagatgactgcagttcagaggtaaatggttgcagttttgtgatgagaacaggaaagcctacaaatttattaagggaagaagaatttggtgttgatgattcttattctgaacaaggagcacaagacagtccgactcatctagagatgatggaaagtgagttggctgggaagcagcatgagattgaagagctaaacagagagctggaagaaatgagggttacctatgggactgaaggactgcagcagttacaagaatttgaagctgccattaaacaaagagatggcattataacccagctcactgctaatttacaacaagcaagaagagaaaaggatgagacaatgagagaatttttagagttgacagaacagagtcaaaaattacagattcaatttcagcaattacaggctagtgaaactctgagaaacagcactcatagtagcacagctgcagacttactacaagccaaacaacagatcctcactcatcaacagcagcttgaagaacaagaccacttattagaagattatcagaaaaagaaagaagacttcacaatgcaaattagtttcttgcaagagaaaattaaagtatatgaaatggaacaagataaaaaagtagaaaactcaaataaagaagaaatacaggaaaaggagacaatcattgaagaattaaacacaaaaataatagaagaagaaaagaaaactcttgagctaaaggataaattaacaactgctgataaattactaggagaattacaagaacagattgtgcaaaagaaccaagaaataaaaaacatgaaattagagctgactaattctaagcaaaaagaaagacagtcttctgaagaaataaaacagttaatggggacagtcgaagaacttcagaagagaaatcataaagacagccagttcgaaactgatatagtacaacgaatggaacaagaaacacaaagaaagttagaacaactccgggcagagctggatgagatgtatgggcagcagatagtgcaaatgaaacaagaattaataagacaacacatggcacagatggaggaaatgaaaacacggcataagggagaaatggagaatgctttaaggtcatattcaaatattacagttaatgaagatcagataaagttaatgaatgtggcaataaatgaactgaatataaaattgcaagatactaactctcaaaaggaaaaactcaaggaagaactaggactaattttagaagaaaagtgtgctctacagagacagcttgaagaccttgttgaagaattgagcttttcaagggaacagattcagagagctagacagacaatagctgaacaagaaagtaaacttaatgaagcacataagtcccttagtacagtggaagatttgaaagctgagattgtttctgcatctgaatccagaaaggaactagaattaaaacatgaagcagaagttacaaattacaagataaaacttgaaatgttagaaaaagaaaagaatgctgtgttagacagaatggctgaatcacaagaagctgaattagagaggctgagaacacagcttctatttagtcacgaagaagagctttccaaactgaaggaagatttagaaattgaacatcgaataaatattgaaaaacttaaagataatttaggcattcactataaacagcagatagatggtttacagaatgaaatgagtcaaaagatagaaaccatgcagtttgaaaaggacaatttgataactaagcagaatcaattaattttggaaatttcaaagctaaaagatttacagcagtctcttgtaaattcaaagtcagaagaaatgactcttcaaatcaatgaacttcaaaaagaaattgaaatactcagacaagaagaaaaagaaaagggtacacttgaacaagaagttcaagaattacaacttaaaacagaattgttagaaaaacagatgaaggaaaaagagaatgatcttcaagaaaaatttgcacaacttgaagcagagaatagcattcttaaagatgaaaagaaaacccttgaagacatgttgaaaatacatactcctgttagccaagaagaaagattgattttcttagactccattaagtccaaatccaaagactctgtgtgggaaaaagaaatagaaatacttatagaggaaaatgaggacctcaaacaacaatgtattcagctaaatgaagagattgaaaagcaaaggaacactttttcatttgctgaaaaaaactttgaagttaactatcaagagttacaagaggagtatgcttgccttctcaaagtaaaagatgatttagaagacagtaaaaataaacaggaattagagtataaaagtaaacttaaagcacttaatgaagagcttcatttgcaaagaataaatccaactacagtgaaaatgaaaagttctgtctttgatgaagacaaaacttttgtagcagaaacattggaaatgggtgaggttgttgaaaaggatacaacagaactcatggaaaaacttgaggtaaccaagcgagagaaattagagctgtcacagagactgtctgatctttctgaacaattgaaacagaaacatggtgagattagttttctaaatgaagaagttaaatctttaaagcaagagaaagaacaagtttcattgagatgtagagagctagaaatcattattaaccacaacagggcagaaaatgtacagtcatgtgatactcaagtaagctctttattagatggagttgtgaccatgacaagcaggggtgctgaaggatcagtttctaaagtaaataaaagttttggtgaagaatcaaaaataatggtggaagataaagtttcttttgaaaatatgactgttggagaagaaagtaagcaagaacagttgattttggatcacttaccatctgtaacaaaggaatcatcacttagagcaactcaaccaagtgaaaatgataaacttcagaaagaactcaatgtacttaaatcagaacagaatgatttaaggctacagatggaagcccaacgcatttgcctctctctggtttattcaactcatgtggatcaggttcgtgaatatatggaaaatgaaaaagataaagctctttgcagtcttaaagaagagcttatttttgctcaagaggaaaagatcaaggaacttcagaaaatacaccagttagaactacagactatgaaaacacaagaaacaggtgatgaaggaaagcctttacatctgctcattggaaaacttcaaaaggcagtgtctgaagaatgttcttattttttacagactttatgcagtgtccttggtgaatattatactcctgctttaaaatgtgaagtaaatgcagaagacaaagagaattctggtgattacatttctgaaaatgaagatccagaattacaagattatagatatgaagttcaagactttcaagaaaatatgcacactcttctcaacaaagtaacagaagaatacaacaaactcttggtacttcaaacacgactaagcaagatctggggacagcagacagatggtatgaaacttgaatttggagaagaaaaccttccaaaagaggaaacagagtttttatcaatccattctcagatgaccaatttggaagacattgatgtcaatcataaaagcaagttatcttctctgcaagatcttgaaaaaactaaacttgaagaacaagttcaagaattagaaagcctcatatcctctttgcagcaacagttgaaagaaactgaacaaaactatgaggcagagatccactgtttacagaagaggcttcaagctgttagtgagtccacggttccgccaagcttacctgttgattcggtggtaattacagaatctgatgcacagagaacaatgtaccctggaagttgtgtgaaaaagaatattgatggtacaatagagttttctggtgaatttggagtgaaagaggaaacaaatatcgttaagttgcttgaaaaacaataccaagaacaattagaagaagaagtagctaaggttattgtgtcaatgagtatagcatttgctcaacaaactgaactgtctagaatatctgggggaaaagaaaatactgcatcatcaaagcaagcacatgctgtgtgtcagcaagaacaacattattttaatgaaatgaaattatcacaggatcaaattggttttcagacttttgagacagtggatgtgaaatttaaagaagaatttaaaccacttagtaaagagttaggagaacatggaaaggaaattttattatcaaatagtgatccccatgatataccagaatcaaaggactgtgtgctgactatttcagaagaaatgttctccaaagataaaacatttatagttagacagtctattcatgatgagatttcagtgtcaagcatggatgcttctagacaactaatgttgaatgaagaacagttggaagatatgagacaggaacttgtacgacaataccaagaacatcaacaggcaacggaattgttaaggcaagcacatatgcggcaaatggagagacagcgagaagaccaggaacagctacaagaagagattaagagacttaatagacaattagcccagagatcctccatagataatgaaaacctggtttcagagagagagagggtgcttttagaggagctggaagcactaaagcagctgtctttagctggaagagagaagctgtgttgtgagctgcgcaacagcagtacgcaaacacagaatggaaatgaaaaccaaggagaagttgaagaacaaacatttaaagaaaaggaattagacagaaaacctgaagatgtgcctcctgagattttgtctaatgaaaggtatgcactccagaaagctaataatagacttttgaagatcctcttagaagttgtaaagacaacagcagctgttgaagaaacaattggtcgccatgtccttgggattctagatagatctagtaaaagccagtcatctgccagcctaatttggaggtcagaagcagaggcatctgtaaagtcatgtgtccatgaggaacatacaagagttacagatgaatccattccctcttattctggaagtgatatgccaagaaatgacattaacatgtggtcaaaagtaactgaggaaggaacagagctgtcacaacgacttgtgaggagtggttttgctggaactgaaatagaccctgaaaatgaagaacttatgctgaacattagctctcgactacaagcagcagttgaaaaactcctagaagccataagtgaaactagcagtcagcttgaacatgcgaaagtgacacagacagagttgatgcgtgagtcatttagacagaaacaagaagcaacagagtcccttaagtgccaagaggaacttcgagagcgccttcatgaggagtccagggccagagaacagctagctgtggagctcagtaaggctgagggcgtcattgatggctatgcagatgaaaaaactctttttgaaaggcaaattcaggaaaaaactgatataatagatcgtcttgagcaggagttgttatgtgcaagtaacaggttgcaagaattggaggcagagcaacagcagatccaagaagaaagagaattactgtccagacaaaaggaagctatgaaagcagaggcaggcccagttgaacaacaattactacaggagacagaaaaattaatgaaggaaaaactagaagtacaatgtcaagctgaaaaagtacgtgatgaccttcaaaaacaagtgaaagctctagaaatagatgtggaagaacaagtcagtaggtttatagagctggaacaagaaaaaaatactgaactaatggatttaagacagcaaaaccaagcattggaaaagcagttagaaaaaatgagaaaatttttagatgagcaagccattgacagagaacatgagagagatgtattccaacaggaaatacagaaactagaacagcaacttaaggttgttcctcgattccagcctatcagtgaacatcaaactagagaggttgaacagttagcaaatcatctgaaagaaaaaacagacaaatgcagtgagcttttgctctctaaagagcagcttcaaagggatatacaagaaaggaatgaagaaatagagaaactggagttcagagtaagagaactggagcaggcgcttcttgtgagtgcagatacttttcaaaaggtagaggaccgaaaacactttggagctgtagaagctaaaccagaattgtccctagaagtacaattgcaggctgaacgagatgccatagacagaaaggaaaaagagattacaaacttagaagagcaattagaacagtttagagaagaactggaaaataagaatgaagaagttcaacaattacatatgcaattagaaatacagaaaaaggaatctactacccgcctacaagaacttgaacaggaaaacaaattatttaaggatgacatggagaaactgggacttgccataaaggaatctgatgccatgtctactcaagaccaacatgtgctatttgggaaatttgctcaaataatacaggaaaaagaggtagaaattgaccaattaaatgaacaagttacgaaactccagcagcaacttaaaattacaacagataacaaggttattgaagaaaaaaatgaactgataagggatcttgaaacccaaatagaatgtttgatgagtgatcaagaatgtgtgaagagaaatagagaagaagaaatagagcagctcaatgaagtgattgaaaaacttcaacaggaattggcaaatattggacagaagacatcaatgaatgctcattccctctcagaagaagcagacagtttaaaacatcaattggatgtggttatagctgaaaagctggccttggaacagcaagtagaaaccgctaatgaagaaatgaccttcatgaaaaatgtacttaaagaaaccaattttaaaatgaatcagctaacacaggaattattcagcttaaagagagaacgtgaaagtgtggaaaagattcaaagcataccagagaatagtgttaacgtggctatagatcatctgagcaaagacaaacctgaactagaagtagtccttacagaggatgctcttaaatccctagaaaatcagacatacttcaaatcttttgaagaaaatggcaaaggttccataattaatttggaaacaaggttgctacaacttgagagcactgttagtgcaaaggacttagaacttacccagtgttataaacaaataaaagacatgcaagaacaaggccagtttgaaacagaaatgcttcaaaagaagattgtaaacctacagaaaatagttgaagaaaaagtggctgctgctcttgtcagtcaaatccaacttgaggcagttcaggaatatgcaaaattctgtcaagataatcaaacaatttcatcagaacctgaaagaacaaatattcagaatttaaatcaactaagagaagatgagttggggtcagatatatcagcattaaccttgagaatatcagaattagaaagccaggttgttgaaatgcatactagtttgattttagaaaaagaacaagtagaaattgcagaaaaaaatgttttagaaaaagaaaagaagctgctagaactacagaagctattggagggcaatgagaaaaaacagagagagaaagaaaagaaaagaagccctcaagatgttgaagttctcaagacaactactgagctatttcatagcaatgaagaaagtggattttttaatgaactcgaggctcttagagctgaatcagtggctaccaaagcagaacttgccagttataaagaaaaggctgaaaaacttcaagaagagcttttggtaaaagaaacaaatatgacatctcttcagaaagacttaagccaagttagggatcacctcgcagaggcaaaagagaaattgtccattttagaaaaagaagatgagactgaggtacaagaaagcaaaaaggcctgcatgtttgagccacttcctataaaactgagtaagagcattgcatcccagacagatgggactctgaagatcagtagcagcaatcagactccacaaattcttgttaaaaatgcaggaatacaaattaatttacagagtgaatgttcctcagaagaagttactgaaataatcagtcagtttactgaaaaaattgagaagatgcaagaactacatgctgctgaaattttggacatggaatccagacatatttcagaaactgaaaccttaaagagggaacactatgttgccgttcagttactgaaagaggaatgtggtaccttgaaggcagtgatacagtgtctgagaagtaaagagggattactgagagctgtccataatgaaggcatgcaggtgctttctctcactgagtctccctatagtgatggagaggaccattctattcagcaggtttcagaaccttggctagaagagagaaaagcttacatcaatacaatctcatctctaaaggatttaattacaaagatgcaactgcaaagagaagccgaggtttatgatagttctcaatctcatgagagcttctcagactggcgaggtgaactactgcttgcccttcaacaagttttcttagaagagcgtagtgttttactagcagcatttcggacggagctgacagctctaggtactacagatgcagttggtttactaaactgtttggaacagagaatacaagaacagggtgttgaatatcaagcagctatggaatgcctccagaaagcagatagaaggagtttgttatctgaaattcaggcactgcatgcacaaatgaatggtaggaaaattactctgaaaagagaacaagagagtgagaaaccaagccaagaactcttggaatataatatacagcagaagcagtctcaaatgctggagatgcaagtggagctcagcagtatgaaagacagagcaacggaactgcaggagcagctgagttctgagaaaatggtggttgctgaactgaagagtgagcttgcacaaactaaattggaactagaaacaacactcaaggcacagcataaacacctaaaagaattggaggctttcaggttggaagttaaagataagacagatgaagtacatttgcttaatgacacattagcaagtgaacagaaaaaatcaagagagctccagtgggctttggagaaagagaaagccaagttgggacgcagtgaagaacgggataaagaagaacttgaggatctgaagttttcacttgagagtcagaaacaaaggaatcttcagctaaatctacttttggaacaacagaaacaactactgaacgaatcccagcaaaaaatagaatcacagagaatgctatatgatgcccagttgtcagaagaacaaggtcgaaacttagagcttcaggtacttcttgaatctgagaaagttcgaattcgggaaatgagtagtaccctagatagggagcgggaattgcacgcacagctgcagagcagtgatggtactggacagtctcggccacccttgccctcagaggacctactgaaagagctgcagaaacagctagaggaaaaacacagtcgcatagtagaattgttaaatgagactgaaaaatataaactggattctttgcaaacacgacagcaaatggaaaaagataggcaggttcacaggaaaacactgcagacagaacaggaggccaacactgagggacagaaaaaaatgcatgagctccagtccaaagtggaagatcttcagcgccagctggaagagaaaagacaacaagtttataagttagaccttgaaggacagcgactacaaggaatcatgcaggaattccagaagcaagaactagaacgagaagaaaaacgagaaagtagaagaattctgtatcagaaccttaatgagccaaccacgtggagcttaaccagtgatagaactagaaattgggttcttcaacagaaaatagaaggagaaacaaaagaatcaaactacgctaaattgattgaaatgaatggaggaggaaccggctgtaatcatgaattagaaatgatcagacaaaagcttcaatgtgtagcttcaaaactacaggttctaccccagaaagcctctgagagactacagtttgaaacagcagatgatgaagatttcatttgggttcaggaaaatattgatgaaattattttacaactacagaaattaactggccagcaaggtgaagagcccagcttggtgtccccaagtacttcttgtggctcattgactgaaagactactgagacaaaatgctgagctgacagggcatatcagtcaactgactgaagagaagaatgacttaaggaacatggttatgaagctggaagagcagatcaggtggtatcgacagacaggagctggtagagataattcttccaggttttcattgaatggtggtgccaacattgaagccatcattgcctctgaaaaagaagtatggaacagagaaaaattgactctccagaaatctttgaaaagggcagaggctgaagtatacaaactgaaagctgaactaagaaatgactctttacttcaaactctgagccctgattctgaacatgtcactttaaagagaatttatggtaaatacttgagggcagaaagttttcgaaaggctctcatttaccagaagaaatacctgctgctgttactgggtgggttccaggaatgtgaagatgccaccttggccctgcttgcccggatgggggggcagccagctttcacggatctagaggtgatcaccaatcgcccaaagggcttcaccaggtttcggtcggccgtcagagtatccattgcaatttccagaatgaaatttttggttcgacggtggcatcgagtcacaggttctgtttccatcaatattaacagagatggctttggactgaatcaaggtgcagaaaagactgactcattttatcattcttctggtgggctggagttatatggagaaccaagacatactacgtatcgctcaagatcagatctggactatattaggtcccctttaccatttcagaataggtacccaggcactccagctgatttcaatcctggttctttagcatgttctcagcttcagaattacgatcctgacagagccctaacagattatatcactcggctagaggcactgcaaagacgacttggaactatacagtcaggttcaactactcaatttcatgctggcatgagaagataatcctttgaaacatcattaattgaagtgattttaaatagatttccttttgtaaatcaatggttcttttgtgcttttgtattgtgaatattcaatgggaccaatatgaacacagcttatgattgtatacaaatcccttgccagcacatgaaaacaaactggaatttgtatatataagcattgtgtatgtattcatgcacaataattattgaattacctgtatatttgtggaatgctaatttaaaacattaaattataaaccttgtgtatttatcaaatgggtgaaaagattaaacttttacgcattacaatactgctgaatgtgtagctcgaggtgtcctgcacttttcttataaggctactgaagttacatgttttgcctaatatattctactggtgatgaagacagataatatcacttgtagagacctatttttgtataatggtagaagttttgaattttatggggtattttgtcaagtactgaaataaaaatgacttcaccattttcaccaca

SEQ ID NO: 413 - DNA, 12475 bp, Homo sapiens
  source 1..12475: mol_type = unassigned DNA
gacgaagatggcggcggcggcggcggtgacggcgcttcccgtgcggctgaggacgatccgccagtgagcgcggagactgcttccacttcgggcgggggagcgccggaccgaatcggctctctaggccgtggagcttgccgtcccacctccgtccaaatcgacctttcctttctatccccaaccacccctcaacccctgttttcccctgccttccttgcagaggccatggaggacgaggagagacagaagaagctggaggccggcaaagccaagattgaagaactctctttagcttttcttgtcagacagcttgcccagtttcgacaaagaaaagctcagtcggatgggcagagtccttccaagaagcagaaaaaaaagagaaaaacgtcaagcagtaaacatgatgtgtcagcacaccatgatttgaatattgatcaatcacagtgtaatgaaatgtacataaatagttctcagagagtagaatcaactgtgattcctgaatctacaataatgagaactctacatagtggagaaataaccagtcatgagcagggcttctctgtggaactggaaagtgaaatttcaaccacagcagatgactgcagttcagaggtaaatggttgcagttttgtgatgagaacaggaaagcctacaaatttattaagggaagaagaatttggtgttgatgattcttattctgaacaaggagcacaagacagtccgactcatctagagatgatggaaagtgagttggctgggaagcagcatgagattgaagagctaaacagagagctggaagaaatgagggttacctatgggactgaaggactgcagcagttacaagaatttgaagctgccattaaacaaagagatggcattataacccagctcactgctaatttacaacaagcaagaagagaaaaggatgagacaatgagagaatttttagagttgacagaacagagtcaaaaattacagattcaatttcagcaattacaggctagtgaaactctgagaaacagcactcatagtagcacagctgcagacttactacaagccaaacaacagatcctcactcatcaacagcagcttgaagaacaagaccacttattagaagattatcagaaaaagaaagaagacttcacaatgcaaattagtttcttgcaagagaaaattaaagtatatgaaatggaacaagataaaaaagtagaaaactcaaataaagaagaaatacaggaaaaggagacaatcattgaagaattaaacacaaaaataatagaagaagaaaagaaaactcttgagctaaaggataaattaacaactgctgataaattactaggagaattacaagaacagattgtgcaaaagaaccaagaaataaaaaacatgaaattagagctgactaattctaagcaaaaagaaagacagtcttctgaagaaataaaacagttaatggggacagtcgaagaacttcagaagagaaatcataaagacagccagttcgaaactgatatagtacaacgaatggaacaagaaacacaaagaaagttagaacaactccgggcagagctggatgagatgtatgggcagcagatagtgcaaatgaaacaagaattaataagacaacacatggcacagatggaggaaatgaaaacacggcataagggagaaatggagaatgctttaaggtcatattcaaatattacagttaatgaagatcagataaagttaatgaatgtggcaataaatgaactgaatataaaattgcaagatactaactctcaaaaggaaaaactcaaggaagaactaggactaattttagaagaaaagtgtgctctacagagacagcttgaagaccttgttgaagaattgagcttttcaagggaacagattcagagagctagacagacaatagctgaacaagaaagtaaacttaatgaagcacataagtcccttagtacagtggaagatttgaaagctgagattgtttctgcatctgaatccagaaaggaactagaattaaaacatgaagcagaagttacaaattacaagataaaacttgaaatgttagaaaaagaaaagaatgctgtgttagacagaatggctgaatcacaagaagctgaattagagaggctgagaacacagcttctatttagtcacgaagaagagctttccaaactgaaggaagatttagaaattgaacatcgaataaatattgaaaaacttaaagataatttaggcattcactataaacagcagatagatggtttacagaatgaaatgagtcaaaagatagaaaccatgcagtttgaaaaggacaatttgataactaagcagaatcaattaattttggaaatttcaaagctaaaagatttacagcagtctcttgtaaattcaaagtcagaagaaatgactcttcaaatcaatgaacttcaaaaagaaattgaaatactcagacaagaagaaaaagaaaagggtacacttgaacaagaagttcaagaattacaacttaaaacagaattgttagaaaaacagatgaaggaaaaagagaatgatcttcaagaaaaatttgcacaacttgaagcagagaatagcattcttaaagatgaaaagaaaacccttgaagacatgttgaaaatacatactcctgttagccaagaagaaagattgattttcttagactccattaagtccaaatccaaagactctgtgtgggaaaaagaaatagaaatacttatagaggaaaatgaggacctcaaacaacaatgtattcagctaaatgaagagattgaaaagcaaaggaacactttttcatttgctgaaaaaaactttgaagttaactatcaagagttacaagaggagtatgcttgccttctcaaagtaaaagatgatttagaagacagtaaaaataaacaggaattagagtataaaagtaaacttaaagcacttaatgaagagcttcatttgcaaagaataaatccaactacagtgaaaatgaaaagttctgtctttgatgaagacaaaacttttgtagcagaaacattggaaatgggtgaggttgttgaaaaggatacaacagaactcatggaaaaacttgaggtaaccaagcgagagaaattagagctgtcacagagactgtctgatctttctgaacaattgaaacagaaacatggtgagattagttttctaaatgaagaagttaaatctttaaagcaagagaaagaacaagtttcattgagatgtagagagctagaaatcattattaaccacaacagggcagaaaatgtacagtcatgtgatactcaagtaagctctttattagatggagttgtgaccatgacaagcaggggtgctgaaggatcagtttctaaagtaaataaaagttttggtgaagaatcaaaaataatggtggaagataaagtttcttttgaaaatatgactgttggagaagaaagtaagcaagaacagttgattttggatcacttaccatctgtaacaaaggaatcatcacttagagcaactcaaccaagtgaaaatgataaacttcagaaagaactcaatgtacttaaatcagaacagaatgatttaaggctacagatggaagcccaacgcatttgcctctctctggtttattcaactcatgtggatcaggttcgtgaatatatggaaaatgaaaaagataaagctctttgcagtcttaaagaagagcttatttttgctcaagaggaaaagatcaaggaacttcagaaaatacaccagttagaactacagactatgaaaacacaagaaacaggtgatgaaggaaagcctttacatctgctcattggaaaacttcaaaaggcagtgtctgaagaatgttcttattttttacagactttatgcagtgtccttggtgaatattatactcctgctttaaaatgtgaagtaaatgcagaagacaaagagaattctggtgattacatttctgaaaatgaagatccagaattacaagattatagatatgaagttcaagactttcaagaaaatatgcacactcttctcaacaaagtaacagaagaatacaacaaactcttggtacttcaaacacgactaagcaagatctggggacagcagacagatggtatgaaacttgaatttggagaagaaaaccttccaaaagaggaaacagagtttttatcaatccattctcagatgaccaatttggaagacattgatgtcaatcataaaagcaagttatcttctctgcaagatcttgaaaaaactaaacttgaagaacaagttcaagaattagaaagcctcatatcctctttgcagcaacagttgaaagaaactgaacaaaactatgaggcagagatccactgtttacagaagaggcttcaagctgttagtgagtccacggttccgccaagcttacctgttgattcggtggtaattacagaatctgatgcacagagaacaatgtaccctggaagttgtgtgaaaaagaatattgatggtacaatagagttttctggtgaatttggagtgaaagaggaaacaaatatcgttaagttgcttgaaaaacaataccaagaacaattagaagaagaagtagctaaggttattgtgtcaatgagtatagcatttgctcaacaaactgaactgtctagaatatctgggggaaaagaaaatactgcatcatcaaagcaagcacatgctgtgtgtcagcaagaacaacattattttaatgaaatgaaattatcacaggatcaaattggttttcagacttttgagacagtggatgtgaaatttaaagaagaatttaaaccacttagtaaagagttaggagaacatggaaaggaaattttattatcaaatagtgatccccatgatataccagaatcaaaggactgtgtgctgactatttcagaagaaatgttctccaaagataaaacatttatagttagacagtctattcatgatgagatttcagtgtcaagcatggatgcttctagacaactaatgttgaatgaagaacagttggaagatatgagacaggaacttgtacgacaataccaagaacatcaacaggcaacggaattgttaaggcaagcacatatgcggcaaatggagagacagcgagaagaccaggaacagctacaagaagagattaagagacttaatagacaattagcccagagatcctccatagataatgaaaacctggtttcagagagagagagggtgcttttagaggagctggaagcactaaagcagctgtctttagctggaagagagaagctgtgttgtgagctgcgcaacagcagtacgcaaacacagaatggaaatgaaaaccaaggagaagttgaagaacaaacatttaaagaaaaggaattagacagaaaacctgaagatgtgcctcctgagattttgtctaatgaaaggtatgcactccagaaagctaataatagacttttgaagatcctcttagaagttgtaaagacaacagcagctgttgaagaaacaattggtcgccatgtccttgggattctagatagatctagtaaaagccagtcatctgccagcctaatttggaggtcagaagcagaggcatctgtaaagtcatgtgtccatgaggaacatacaagagttacagatgaatccattccctcttattctggaagtgatatgccaagaaatgacattaacatgtggtcaaaagtaactgaggaaggaacagagctgtcacaacgacttgtgaggagtggttttgctggaactgaaatagaccctgaaaatgaagaacttatgctgaacattagctctcgactacaagcagcagttgaaaaactcctagaagccataagtgaaactagcagtcagcttgaacatgcgaaagtgacacagacagagttgatgcgtgagtcatttagacagaaacaagaagcaacagagtcccttaagtgccaagaggaacttcgagagcgccttcatgaggagtccagggccagagaacagctagctgtggagctcagtaaggctgagggcgtcattgatggctatgcagatgaaaaaactctttttgaaaggcaaattcaggaaaaaactgatataatagatcgtcttgagcaggagttgttatgtgcaagtaacaggttgcaagaattggaggcagagcaacagcagatccaagaagaaagagaattactgtccagacaaaaggaagctatgaaagcagaggcaggcccagttgaacaacaattactacaggagacagaaaaattaatgaaggaaaaactagaagtacaatgtcaagctgaaaaagtacgtgatgaccttcaaaaacaagtgaaagctctagaaatagatgtggaagaacaagtcagtaggtttatagagctggaacaagaaaaaaatactgaactaatggatttaagacagcaaaaccaagcattggaaaagcagttagaaaaaatgagaaaatttttagatgagcaagccattgacagagaacatgagagagatgtattccaacaggaaatacagaaactagaacagcaacttaaggttgttcctcgattccagcctatcagtgaacatcaaactagagaggttgaacagttagcaaatcatctgaaagaaaaaacagacaaatgcagtgagcttttgctctctaaagagcagcttcaaagggatatacaagaaaggaatgaagaaatagagaaactggagttcagagtaagagaactggagcaggcgcttcttgtgagtgcagatacttttcaaaaggtagaggaccgaaaacactttggagctgtagaagctaaaccagaattgtccctagaagtacaattgcaggctgaacgagatgccatagacagaaaggaaaaagagattacaaacttagaagagcaattagaacagtttagagaagaactggaaaataagaatgaagaagttcaacaattacatatgcaattagaaatacagaaaaaggaatctactacccgcctacaagaacttgaacaggaaaacaaattatttaaggatgacatggagaaactgggacttgccataaaggaatctgatgccatgtctactcaagaccaacatgtgctatttgggaaatttgctcaaataatacaggaaaaagaggtagaaattgaccaattaaatgaacaagttacgaaactccagcagcaacttaaaattacaacagataacaaggttattgaagaaaaaaatgaactgataagggatcttgaaacccaaatagaatgtttgatgagtgatcaagaatgtgtgaagagaaatagagaagaagaaatagagcagctcaatgaagtgattgaaaaacttcaacaggaattggcaaatattggacagaagacatcaatgaatgctcattccctctcagaagaagcagacagtttaaaacatcaattggatgtggttatagctgaaaagctggccttggaacagcaagtagaaaccgctaatgaagaaatgaccttcatgaaaaatgtacttaaagaaaccaattttaaaatgaatcagctaacacaggaattattcagcttaaagagagaacgtgaaagtgtggaaaagattcaaagcataccagagaatagtgttaacgtggctatagatcatctgagcaaagacaaacctgaactagaagtagtccttacagaggatgctcttaaatccctagaaaatcagacatacttcaaatcttttgaagaaaatggcaaaggttccataattaatttggaaacaaggttgctacaacttgagagcactgttagtgcaaaggacttagaacttacccagtgttataaacaaataaaagacatgcaagaacaaggccagtttgaaacagaaatgcttcaaaagaagattgtaaacctacagaaaatagttgaagaaaaagtggctgctgctcttgtcagtcaaatccaacttgaggcagttcaggaatatgcaaaattctgtcaagataatcaaacaatttcatcagaacctgaaagaacaaatattcagaatttaaatcaactaagagaagatgagttggggtcagatatatcagcattaaccttgagaatatcagaattagaaagccaggttgttgaaatgcatactagtttgattttagaaaaagaacaagtagaaattgcagaaaaaaatgttttagaaaaagaaaagaagctgctagaactacagaagctattggagggcaatgagaaaaaacagagagagaaagaaaagaaaagaagccctcaagatgttgaagttctcaagacaactactgagctatttcatagcaatgaagaaagtggattttttaatgaactcgaggctcttagagctgaatcagtggctaccaaagcagaacttgccagttataaagaaaaggctgaaaaacttcaagaagagcttttggtaaaagaaacaaatatgacatctcttcagaaagacttaagccaagttagggatcacctcgcagaggcaaaagagaaattgtccattttagaaaaagaagatgagactgaggtacaagaaagcaaaaaggcctgcatgtttgagccacttcctataaaactgagtaagagcattgcatcccagacagatgggactctgaagatcagtagcagcaatcagactccacaaattcttgttaaaaatgcaggaatacaaattaatttacagagtgaatgttcctcagaagaagttactgaaataatcagtcagtttactgaaaaaattgagaagatgcaagaactacatgctgctgaaattttggacatggaatccagacatatttcagaaactgaaaccttaaagagggaacactatgttgccgttcagttactgaaagaggaatgtggtaccttgaaggcagtgatacagtgtctgagaagtaaagaggtatttggtttttataatatgtgtttttcaacattgtgtgattctggatcagactggggtcagggaatttatcttacacacagtcagggatttgacatagcatcagaaggccgaggagaagaaagtgaaagtgcaacagattcctttccaaagaaaataaagggattactgagagctgtccataatgaaggcatgcaggtgctttctctcactgagtctccctatagtgatggagaggaccattctattcagcaggtttcagaaccttggctagaagagagaaaagcttacatcaatacaatctcatctctaaaggatttaattacaaagatgcaactgcaaagagaagccgaggtttatgatagttctcaatctcatgagagcttctcagactggcgaggtgaactactgcttgcccttcaacaagttttcttagaagagcgtagtgttttactagcagcatttcggacggagctgacagctctaggtactacagatgcagttggtttactaaactgtttggaacagagaatacaagaacagggtgttgaatatcaagcagctatggaatgcctccagaaagcagatagaaggagtttgttatctgaaattcaggcactgcatgcacaaatgaatggtaggaaaattactctgaaaagagaacaagagagtgagaaaccaagccaagaactcttggaatataatatacagcagaagcagtctcaaatgctggagatgcaagtggagctcagcagtatgaaagacagagcaacggaactgcaggagcagctgagttctgagaaaatggtggttgctgaactgaagagtgagcttgcacaaactaaattggaactagaaacaacactcaaggcacagcataaacacctaaaagaattggaggctttcaggttggaagttaaagataagacagatgaagtacatttgcttaatgacacattagcaagtgaacagaaaaaatcaagagagctccagtgggctttggagaaagagaaagccaagttgggacgcagtgaagaacgggataaagaagaacttgaggatctgaagttttcacttgagagtcagaaacaaaggaatcttcagctaaatctacttttggaacaacagaaacaactactgaacgaatcccagcaaaaaatagaatcacagagaatgctatatgatgcccagttgtcagaagaacaaggtcgaaacttagagcttcaggtacttcttgaatctgagaaagttcgaattcgggaaatgagtagtaccctagatagggagcgggaattgcacgcacagctgcagagcagtgatggtactggacagtctcggccacccttgccctcagaggacctactgaaagagctgcagaaacagctagaggaaaaacacagtcgcatagtagaattgttaaatgagactgaaaaatataaactggattctttgcaaacacgacagcaaatggaaaaagataggcaggttcacaggaaaacactgcagacagaacaggaggccaacactgagggacagaaaaaaatgcatgagctccagtccaaagtggaagatcttcagcgccagctggaagagaaaagacaacaagtttataagttagaccttgaaggacagcgactacaaggaatcatgcaggaattccagaagcaagaactagaacgagaagaaaaacgagaaagtagaagaattctgtatcagaaccttaatgagccaaccacgtggagcttaaccagtgatagaactagaaattgggttcttcaacagaaaatagaaggagaaacaaaagaatcaaactacgctaaattgattgaaatgaatggaggaggaaccggctgtaatcatgaattagaaatgatcagacaaaagcttcaatgtgtagcttcaaaactacaggttctaccccagaaagcctctgagagactacagtttgaaacagcagatgatgaagatttcatttgggttcaggaaaatattgatgaaattattttacaactacagaaattaactggccagcaaggtgaagagcccagcttggtgtccccaagtacttcttgtggctcattgactgaaagactactgagacaaaatgctgagctgacagggcatatcagtcaactgactgaagagaagaatgacttaaggaacatggttatgaagctggaagagcagatcaggtggtatcgacagacaggagctggtagagataattcttccaggttttcattgaatggtggtgccaacattgaagccatcattgcctctgaaaaagaagtatggaacagagaaaaattgactctccagaaatctttgaaaagggcagaggctgaagtatacaaactgaaagctgaactaagaaatgactctttacttcaaactctgagccctgattctgaacatgtcactttaaagagaatttatggtaaatacttgagggcagaaagttttcgaaaggctctcatttaccagaagaaatacctgctgctgttactgggtgggttccaggaatgtgaagatgccaccttggccctgcttgcccggatgggggggcagccagctttcacggatctagaggtgatcaccaatcgcccaaagggcttcaccaggtttcggtcggccgtcagagtatccattgcaatttccagaatgaaatttttggttcgacggtggcatcgagtcacaggttctgtttccatcaatattaacagagatggctttggactgaatcaaggtgcagaaaagactgactcattttatcattcttctggtgggctggagttatatggagaaccaagacatactacgtatcgctcaagatcagatctggactatattaggtcccctttaccatttcagaataggtacccaggcactccagctgatttcaatcctggttctttagcatgttctcagcttcagaattacgatcctgacagagccctaacagattatatcactcggctagaggcactgcaaagacgacttggaactatacagtcaggttcaactactcaatttcatgctggcatgagaagataatcctttgaaacatcattaattgaagtgattttaaatagatttccttttgtaaatcaatggttcttttgtgcttttgtattgtgaatattcaatgggaccaatatgaacacagcttatgattgtatacaaatcccttgccagcacatgaaaacaaactggaatttgtatatataagcattgtgtatgtattcatgcacaataattattgaattacctgtatatttgtggaatgctaatttaaaacattaaattataaaccttgtgtatttatcaaatgggtgaaaagattaaacttttacgcattacaatactgctgaatgtgtagctcgaggtgtcctgcacttttcttataaggctactgaagttacatgttttgcctaatatattctactggtgatgaagacagataatatcacttgtagagacctatttttgtataatggtagaagttttgaattttatggggtattttgtcaagtactgaaataaaaatgacttcaccattttcaccaca

SEQ ID NO: 414 - DNA, 5157 bp, Homo sapiens
  source 1..5157: mol_type = unassigned DNA
gacgaagatggcggcggcggcggcggtgacggcgcttcccgtgcggctgaggacgatccgccagtgagcgcggagactgcttccacttcgggcgggggagcgccggaccgaatcggctctctaggccgtggagcttgccgtcccacctccgtccaaatcgacctttcctttctatccccaaccacccctcaacccctgttttcccctgccttccttgcagaggccatggaggacgaggagagacagaagaagctggaggccggcaaagccaagattgaagaactctctttagcttttcttgtcagacagcttgcccagtttcgacaaagaaaagctcagtcggatgggcagagtccttccaagaagcagaaaaaaaagagaaaaacgtcaagcagtaaacatgatgtgtcagcacaccatgatttgaatattgatcaatcacagtgtaatgaaatgtacataaatagttctcagagagtagaatcaactgtgattcctgaatctacaataatgagaactctacatagtggagaaataaccagtcatgagcagggcttctctgtggaactggaaagtgaaatttcaaccacagcagatgactgcagttcagaggtaaatggttgcagttttgtgatgagaacaggaaagcctacaaatttattaagggaagaagaatttggtgttgatgattcttattctgaacaaggagcacaagacagtccgactcatctagagatgatggaaagtgagttggctgggaagcagcatgagattgaagagctaaacagagagctggaagaaatgagggttacctatgggactgaaggactgcagcagttacaagaatttgaagctgccattaaacaaagagatggcattataacccagctcactgctaatttacaacaagcaagaagagaaaaggatgagacaatgagagaatttttagagttgacagaacagagtcaaaaattacagattcaatttcagcaattacaggctagtgaaactctgagaaacagcactcatagtagcacagctgcagacttactacaagccaaacaacagatcctcactcatcaacagcagcttgaagaacaagaccacttattagaagattatcagaaaaagaaagaagacttcacaatgcaaattagtttcttgcaagagaaaattaaagtatatgaaatggaacaagataaaaaagtagaaaactcaaataaagaagaaatacaggaaaaggagacaatcattgaagaattaaacacaaaaataatagaagaagaaaagaaaactcttgagctaaaggataaattaacaactgctgataaattactaggagaattacaagaacagattgtgcaaaagaaccaagaaataaaaaacatgaaattagagctgactaattctaagcaaaaagaaagacagtcttctgaagaaataaaacagttaatggggacagtcgaagaacttcagaagagaaatcataaagacagccagttcgaaactgatatagtacaacgaatggaacaagaaacacaaagaaagttagaacaactccgggcagagctggatgagatgtatgggcagcagatagtgcaaatgaaacaagaattaataagacaacacatggcacagatggaggaaatgaaaacacggcataagggagaaatggagaatgctttaaggtcatattcaaatattacagttaatgaagatcagataaagttaatgaatgtggcaataaatgaactgaatataaaattgcaagatactaactctcaaaaggaaaaactcaaggaagaactaggactaattttagaagaaaagtgtgctctacagagacagcttgaagaccttgttgaagaattgagcttttcaagggaacagattcagagagctagacagacaatagctgaacaagaaagtaaacttaatgaagcacataagtcccttagtacagtggaagatttgaaagctgagattgtttctgcatctgaatccagaaaggaactagaattaaaacatgaagcagaagttacaaattacaagataaaacttgaaatgttagaaaaagaaaagaatgctgtgttagacagaatggctgaatcacaagaagctgaattagagaggctgagaacacagcttctatttagtcacgaagaagagctttccaaactgaaggaagatttagaaattgaacatcgaataaatattgaaaaacttaaagataatttaggcattcactataaacagcagatagatggtttacagaatgaaatgagtcaaaagatagaaaccatgcagtttgaaaaggacaatttgataactaagcagaatcaattaattttggaaatttcaaagctaaaagatttacagcagtctcttgtaaattcaaagtcagaagaaatgactcttcaaatcaatgaacttcaaaaagaaattgaaatactcagacaagaagaaaaagaaaagggtacacttgaacaagaagttcaagaattacaacttaaaacagaattgttagaaaaacagatgaaggaaaaagagaatgatcttcaagaaaaatttgcacaacttgaagcagagaatagcattcttaaagatgaaaagaaaacccttgaagacatgttgaaaatacatactcctgttagccaagaagaaagattgattttcttagactccattaagtccaaatccaaagactctgtgtgggaaaaagaaatagaaatacttatagaggaaaatgaggacctcaaacaacaatgtattcagctaaatgaagagattgaaaagcaaaggaacactttttcatttgctgaaaaaaactttgaagttaactatcaagagttacaagaggagtatgcttgccttctcaaagtaaaagatgatttagaagacagtaaaaataaacaggaattagagtataaaagtaaacttaaagcacttaatgaagagcttcatttgcaaagaataaatccaactacagtgaaaatgaaaagttctgtctttgatgaagacaaaacttttgtagcagaaacattggaaatgggtgaggttgttgaaaaggatacaacagaactcatggaaaaacttgaggtaaccaagcgagagaaattagagctgtcacagagactgtctgatctttctgaacaattgaaacagaaacatggtgagattagttttctaaatgaagaagttaaatctttaaagcaagagaaagaacaagtttcattgagatgtagagagctagaaatcattattaaccacaacagggcagaaaatgtacagtcatgtgatactcaagtaagctctttattagatggagttgtgaccatgacaagcaggggtgctgaaggatcagtttctaaagtaaataaaagttttggtgaagaatcaaaaataatggtggaagataaagtttcttttgaaaatatgactgttggagaagaaagtaagcaagaacagttgattttggatcacttaccatctgtaacaaaggaatcatcacttagagcaactcaaccaagtgaaaatgataaacttcagaaagaactcaatgtacttaaatcagaacagaatgatttaaggctacagatggaagcccaacgcatttgcctctctctggtttattcaactcatgtggatcaggttcgtgaatatatggaaaatgaaaaagataaagctctttgcagtcttaaagaagagcttatttttgctcaagaggaaaagatcaaggaacttcagaaaatacaccagttagaactacagactatgaaaacacaagaaacaggtgatgaaggaaagcctttacatctgctcattggaaaacttcaaaaggcagtgtctgaagaatgttcttattttttacagactttatgcagtgtccttggtgaatattatactcctgctttaaaatgtgaagtaaatgcagaagacaaagagaattctggtgattacatttctgaaaatgaagatccagaattacaagattatagatatgaagttcaagactttcaagaaaatatgcacactcttctcaacaaagtaacagaagaatacaacaaactcttggtacttcaaacacgactaagcaagatctggggacagcagacagatggtatgaaacttgaatttggagaagaaaaccttccaaaagaggaaacagagtttttatcaatccattctcagatgaccaatttggaagacattgatgtcaatcataaaagcaagttatcttctctgcaagatcttgaaaaaactaaacttgaagaacaagttcaagaattagaaagcctcatatcctctttgcagcaacagttgaaagaaactgaacaaaactatgaggcagagatccactgtttacagaagaggcttcaagctgttagtgagtccacggttccgccaagcttacctgttgattcggtggtaattacagaatctgatgcacagagaacaatgtaccctggaagttgtgtgaaaaagaatattgatggtacaatagagttttctggtgaatttggagtgaaagaggaaacaaatatcgttaagttgcttgaaaaacaataccaagaacaattagaagaagaagtagctaaggttattgtgtcaatgagtatagcatttgctcaacaaactgaactgtctagaatatctgggggaaaagaaaatactgcatcatcaaagcaagcacatgctgtgtgtcagcaagaacaacattattttaatgaaatgaaattatcacaggatcaaattggttttcagacttttgagacagtggatgtgaaatttaaagaagaatttaaaccacttagtaaagagttaggagaacatggaaaggaaattttattatcaaatagtgatccccatgatataccagaatcaaaggactgtgtgctgactatttcagaagaaatgttctccaaagataaaacatttatagttagacagtctattcatgatgagatttcagtgtcaagcatggatgcttctagacaactaatgttgaatgaagaacagttggaagatatgagacaggaacttgtacgacaataccaagaacatcaacaggcaacggaattgttaaggcaagcacatatgcggcaaatggagagacagcgagaagaccaggaacagctacaagtaagggtcttgtag

SEQ ID NO: 415 - DNA, 12012 bp, Homo sapiens
  source 1..12012: mol_type = unassigned DNA
gacgaagatggcggcggcggcggcggtgacggcgcttcccgtgcggctgaggacgatccgccagtgagcgcggagactgcttccacttcgggcgggggagcgccggaccgaatcggctctctaggccgtggagcttgccgtcccacctccgtccaaatcgacctttcctttctatccccaaccacccctcaacccctgttttcccctgccttccttgcagaggccatggaggacgaggagagacagaagaagctggaggccggcaaagccaagattgaagaactctctttagcttttcttgtcagacagcttgcccagtttcgacaaagaaaagctcagtcggatgggcagagtccttccaagaagcagaaaaaaaagagaaaaacgtcaagcagtaaacatgatgtgtcagcacaccatgatttgaatattgatcaatcacagtgtaatgaaatgtacataaatagttctcagagagtagaatcaactgtgattcctgaatctacaataatgagaactctacatagtggagaaataaccagtcatgagcagggcttctctgtggaactggaaagtgaaatttcaaccacagcagatgactgcagttcagaggtaaatggttgcagttttgtgatgagaacaggaaagcctacaaatttattaagggaagaagaatttggtgttgatgattcttattctgaacaaggagcacaagacagtccgactcatctagagatgatggaaagtgagttggctgggaagcagcatgagattgaagagctaaacagagagctggaagaaatgagggttacctatgggactgaaggactgcagcagttacaagaatttgaagctgccattaaacaaagagatggcattataacccagctcactgctaatttacaacaagcaagaagagaaaaggatgagacaatgagagaatttttagagttgacagaacagagtcaaaaattacagattcaatttcagcaattacaggctagtgaaactctgagaaacagcactcatagtagcacagctgcagacttactacaagccaaacaacagatcctcactcatcaacagcagcttgaagaacaagaccacttattagaagattatcagaaaaagaaagaagacttcacaatgcaaattagtttcttgcaagagaaaattaaagtatatgaaatggaacaagataaaaaagtagaaaactcaaataaagaagaaatacaggaaaaggagacaatcattgaagaattaaacacaaaaataatagaagaagaaaagaaaactcttgagctaaaggataaattaacaactgctgataaattactaggagaattacaagaacagattgtgcaaaagaaccaagaaataaaaaacatgaaattagagctgactaattctaagcaaaaagaaagacagtcttctgaagaaataaaacagttaatggggacagtcgaagaacttcagaagagaaatcataaagacagccagttcgaaactgatatagtacaacgaatggaacaagaaacacaaagaaagttagaacaactccgggcagagctggatgagatgtatgggcagcagatagtgcaaatgaaacaagaattaataagacaacacatggcacagatggaggaaatgaaaacacggcataagggagaaatggagaatgctttaaggtcatattcaaatattacagttaatgaagatcagataaagttaatgaatgtggcaataaatgaactgaatataaaattgcaagatactaactctcaaaaggaaaaactcaaggaagaactaggactaattttagaagaaaagtgtgctctacagagacagcttgaagaccttgttgaagaattgagcttttcaagggaacagattcagagagctagacagacaatagctgaacaagaaagtaaacttaatgaagcacataagtcccttagtacagtggaagatttgaaagctgagattgtttctgcatctgaatccagaaaggaactagaattaaaacatgaagcagaagttacaaattacaagataaaacttgaaatgttagaaaaagaaaagaatgctgtgttagacagaatggctgaatcacaagaagctgaattagagaggctgagaacacagcttctatttagtcacgaagaagagctttccaaactgaaggaagatttagaaattgaacatcgaataaatattgaaaaacttaaagataatttaggcattcactataaacagcagatagatggtttacagaatgaaatgagtcaaaagatagaaaccatgcagtttgaaaaggacaatttgataactaagcagaatcaattaattttggaaatttcaaagctaaaagatttacagcagtctcttgtaaattcaaagtcagaagaaatgactcttcaaatcaatgaacttcaaaaagaaattgaaatactcagacaagaagaaaaagaaaagggtacacttgaacaagaagttcaagaattacaacttaaaacagaattgttagaaaaacagatgaaggaaaaagagaatgatcttcaagaaaaatttgcacaacttgaagcagagaatagcattcttaaagatgaaaagaaaacccttgaagacatgttgaaaatacatactcctgttagccaagaagaaagattgattttcttagactccattaagtccaaatccaaagactctgtgtgggaaaaagaaatagaaatacttatagaggaaaatgaggacctcaaacaacaatgtattcagctaaatgaagagattgaaaagcaaaggaacactttttcatttgctgaaaaaaactttgaagttaactatcaagagttacaagaggagtatgcttgccttctcaaagtaaaagatgatttagaagacagtaaaaataaacaggaattagagtataaaagtaaacttaaagcacttaatgaagagcttcatttgcaaagaataaatccaactacagtgaaaatgaaaagttctgtctttgatgaagacaaaacttttgtagcagaaacattggaaatgggtgaggttgttgaaaaggatacaacagaactcatggaaaaacttgaggtaaccaagcgagagaaattagagctgtcacagagactgtctgatctttctgaacaattgaaacagaaacatggtgagattagttttctaaatgaagaagttaaatctttaaagcaagagaaagaacaagtttcattgagatgtagagagctagaaatcattattaaccacaacagggcagaaaatgtacagtcatgtgatactcaagtaagctctttattagatggagttgtgaccatgacaagcaggggtgctgaaggatcagtttctaaagtaaataaaagttttggtgaagaatcaaaaataatggtggaagataaagtttcttttgaaaatatgactgttggagaagaaagtaagcaagaacagttgattttggatcacttaccatctgtaacaaaggaatcatcacttagagcaactcaaccaagtgaaaatgataaacttcagaaagaactcaatgtacttaaatcagaacagaatgatttaaggctacagatggaagcccaacgcatttgcctctctctggtttattcaactcatgtggatcaggttcgtgaatatatggaaaatgaaaaagataaagctctttgcagtcttaaagaagagcttatttttgctcaagaggaaaagatcaaggaacttcagaaaatacaccagttagaactacagactatgaaaacacaagaaacaggtgatgaaggaaagcctttacatctgctcattggaaaacttcaaaaggcagtgtctgaagaatgttcttattttttacagactttatgcagtgtccttggtgaatattatactcctgctttaaaatgtgaagtaaatgcagaagacaaagagaattctggtgattacatttctgaaaatgaagatccagaattacaagattatagatatgaagttcaagactttcaagaaaatatgcacactcttctcaacaaagtaacagaagaatacaacaaactcttggtacttcaaacacgactaagcaagatctggggacagcagacagatggtatgaaacttgaatttggagaagaaaaccttccaaaagaggaaacagagtttttatcaatccattctcagatgaccaatttggaagacattgatgtcaatcataaaagcaagttatcttctctgcaagatcttgaaaaaactaaacttgaagaacaagttcaagaattagaaagcctcatatcctctttgcagcaacagttgaaagaaactgaacaaaactatgaggcagagatccactgtttacagaagaggcttcaagctgttagtgagtccacggttccgccaagcttacctgttgattcggtggtaattacagaatctgatgcacagagaacaatgtaccctggaagttgtgtgaaaaagaatattgatggtacaatagagttttctggtgaatttggagtgaaagaggaaacaaatatcgttaagttgcttgaaaaacaataccaagaacaattagaagaagaagtagctaaggttattgtgtcaatgagtatagcatttgctcaacaaactgaactgtctagaatatctgggggaaaagaaaatactgcatcatcaaagcaagcacatgctgtgtgtcagcaagaacaacattattttaatgaaatgaaattatcacaggatcaaattggttttcagacttttgagacagtggatgtgaaatttaaagaagaatttaaaccacttagtaaagagttaggagaacatggaaaggaaattttattatcaaatagtgatccccatgatataccagaatcaaaggactgtgtgctgactatttcagaagaaatgttctccaaagataaaacatttatagttagacagtctattcatgatgagatttcagtgtcaagcatggatgcttctagacaactaatgttgaatgaagaacagttggaagatatgagacaggaacttgtacgacaataccaagaacatcaacaggcaacggaattgttaaggcaagcacatatgcggcaaatggagagacagcgagaagaccaggaacagctacaagaagagattaagagacttaatagacaattagcccagagatcctccatagataatgaaaacctggtttcagagagagagagggtgcttttagaggagctggaagcactaaagcagctgtctttagctggaagagagaagctgtgttgtgagctgcgcaacagcagtacgcaaacacagaatggaaatgaaaaccaaggagaagttgaagaacaaacatttaaagaaaaggaattagacagaaaacctgaagatgtgcctcctgagattttgtctaatgaaaggtatgcactccagaaagctaataatagacttttgaagatcctcttagaagttgtaaagacaacagcagctgttgaagaaacaattggtcgccatgtccttgggattctagatagatctagtaaaagccagtcatctgccagcctaatttggaggtcagaagcagaggcatctgtaaagtcatgtgtccatgaggaacatacaagagttacagatgaatccattccctcttattctggaagtgatatgccaagaaatgacattaacatgtggtcaaaagtaactgaggaaggaacagagctgtcacaacgacttgtgaggagtggttttgctggaactgaaatagaccctgaaaatgaagaacttatgctgaacattagctctcgactacaagcagcagttgaaaaactcctagaagccataagtgaaactagcagtcagcttgaacatgcgaaagtgacacagacagagttgatgcgtgagtcatttagacagaaacaagaagcaacagagtcccttaagtgccaagaggaacttcgagagcgccttcatgaggagtccagggccagagaacagctagctgtggagctcagtaaggctgagggcgtcattgatggctatgcagatgaaaaaactctttttgaaaggcaaattcaggaaaaaactgatataatagatcgtcttgagcaggagttgttatgtgcaagtaacaggttgcaagaattggaggcagagcaacagcagatccaagaagaaagagaattactgtccagacaaaaggaagctatgaaagcagaggcaggcccagttgaacaacaattactacaggagacagaaaaattaatgaaggaaaaactagaagtacaatgtcaagctgaaaaagtacgtgatgaccttcaaaaacaagtgaaagctctagaaatagatgtggaagaacaagtcagtaggtttatagagctggaacaagaaaaaaatactgaactaatggatttaagacagcaaaaccaagcattggaaaagcagttagaaaaaatgagaaaatttttagatgagcaagccattgacagagaacatgagagagatgtattccaacaggaaatacagaaactagaacagcaacttaaggttgttcctcgattccagcctatcagtgaacatcaaactagagaggttgaacagttagcaaatcatctgaaagaaaaaacagacaaatgcagtgagcttttgctctctaaagagcagcttcaaagggatatacaagaaaggaatgaagaaatagagaaactggagttcagagtaagagaactggagcaggcgcttcttgtagaggaccgaaaacactttggagctgtagaagctaaaccagaattgtccctagaagtacaattgcaggctgaacgagatgccatagacagaaaggaaaaagagattacaaacttagaagagcaattagaacagtttagagaagaactggaaaataagaatgaagaagttcaacaattacatatgcaattagaaatacagaaaaaggaatctactacccgcctacaagaacttgaacaggaaaacaaattatttaaggatgacatggagaaactgggacttgccataaaggaatctgatgccatgtctactcaagaccaacatgtgctatttgggaaatttgctcaaataatacaggaaaaagaggtagaaattgaccaattaaatgaacaagttacgaaactccagcagcaacttaaaattacaacagataacaaggttattgaagaaaaaaatgaactgataagggatcttgaaacccaaatagaatgtttgatgagtgatcaagaatgtgtgaagagaaatagagaagaagaaatagagcagctcaatgaagtgattgaaaaacttcaacaggaattggcaaatattggacagaagacatcaatgaatgctcattccctctcagaagaagcagacagtttaaaacatcaattggatgtggttatagctgaaaagctggccttggaacagcaagtagaaaccgctaatgaagaaatgaccttcatgaaaaatgtacttaaagaaaccaattttaaaatgaatcagctaacacaggaattattcagcttaaagagagaacgtgaaagtgtggaaaagattcaaagcataccagagaatagtgttaacgtggctatagatcatctgagcaaagacaaacctgaactagaagtagtccttacagaggatgctcttaaatccctagaaaatcagacatacttcaaatcttttgaagaaaatggcaaaggttccataattaatttggaaacaaggttgctacaacttgagagcactgttagtgcaaaggacttagaacttacccagtgttataaacaaataaaagacatgcaagaacaaggccagtttgaaacagaaatgcttcaaaagaagattgtaaacctacagaaaatagttgaagaaaaagtggctgctgctcttgtcagtcaaatccaacttgaggcagttcaggaatatgcaaaattctgtcaagataatcaaacaatttcatcagaacctgaaagaacaaatattcagaatttaaatcaactaagagaagatgagttggggtcagatatatcagcattaaccttgagaatatcagaattagaaagccaggttgttgaaatgcatactagtttgattttagaaaaagaacaagtagaaattgcagaaaaaaatgttttagaaaaagaaaagaagctgctagaactacagaagctattggagggcaatgagaaaaaacagagagagaaagaaaagaaaagaagccctcaagatgttgaagttctcaagacaactactgagctatttcatagcaatgaagaaagtggattttttaatgaactcgaggctcttagagctgaatcagtggctaccaaagcagaacttgccagttataaagaaaaggctgaaaaacttcaagaagagcttttggtaaaagaaacaaatatgacatctcttcagaaagacttaagccaagttagggatcacctcgcagaggcaaaagagaaattgtccattttagaaaaagaagatgagactgaggtacaagaaagcaaaaaggcctgcatgtttgagccacttcctataaaactgagtaagagcattgcatcccagacagatgggactctgaagatcagtagcagcaatcagactccacaaattcttgttaaaaatgcaggaatacaaattaatttacagagtgaatgttcctcagaagaagttactgaaataatcagtcagtttactgaaaaaattgagaagatgcaagaactacatgctgctgaaattttggacatggaatccagacatatttcagaaactgaaaccttaaagagggaacactatgttgccgttcagttactgaaagaggaatgtggtaccttgaaggcagtgatacagtgtctgagaagtaaagagggatcctcaattcctgagctagcacattctgatgcttaccagactagagaaatatgctccagtgattctggatcagactggggtcagggaatttatcttacacacagtcagggatttgacatagcatcagaaggccgaggagaagaaagtgaaagtgcaacagattcctttccaaagaaaataaagggattactgagagctgtccataatgaaggcatgcaggtgctttctctcactgagtctccctatagtgatggagaggaccattctattcagcaggtttcagaaccttggctagaagagagaaaagcttacatcaatacaatctcatctctaaaggatttaattacaaagatgcaactgcaaagagaagccgaggtttatgatagttctcaatctcatgagagcttctcagactggcgaggtgaactactgcttgcccttcaacaagttttcttagaagagcgtagtgttttactagcagcatttcggacggagctgacagctctaggtactacagatgcagttggtttactaaactgtttggaacagagaatacaagaacagggtgttgaatatcaagcagctatggaatgcctccagaaagcagatagaaggagtttgttatctgaaattcaggcactgcatgcacaaatgaatggtaggaaaattactctgaaaagagaacaagagagtgagaaaccaagccaagaactcttggaatataatatacagcagaagcagtctcaaatgctggagatgcaagtggagctcagcagtatgaaagacagagcaacggaactgcaggagcagctgagttctgagaaaatggtggttgctgaactgaagagtgagcttgcacaaactaaattggaactagaaacaacactcaaggcacagcataaacacctaaaagaattggaggctttcaggttggaagttaaagataagacagatgaagtacatttgcttaatgacacattagcaagtgaacagaaaaaatcaagagagctccagtgggctttggagaaagagaaagccaagttgggacgcagtgaagaacgggataaagaagaacttgaggatctgaagttttcacttgagagtcagaaacaaaggaatcttcagctaaatctacttttggaacaacagaaacaactactgaacgaatcccagcaaaaaatagaatcacagagaatgctatatgatgcccagttgtcagaagaacaaggtcgaaacttagagcttcaggtacttcttgaatctgagaaagttcgaattcgggaaatgagtagtaccctagatagggagcgggaattgcacgcacagctgcagagcagtgatggtactggacagtctcggccacccttgccctcagaggacctactgaaagagctgcagaaacagctagaggaaaaacacagtcgcatagtagaattgttaaatgagactgaaaaatataaactggattctttgcaaacacgacagcaaatggaaaaagataggcaggttcacaggaaaacactgcagacagaacaggaggccaacactgagggacagaaaaaaatgcatgagctccagtccaaagtggaagatcttcagcgccagctggaagagaaaagacaacaagtttataagttagaccttgaaggacagcgactacaaggaatcatgcaggaattccagaagcaagaactagaacgagaagaaaaacgagaaagtagaagaattctgtatcagaaccttaatgagccaaccacgtggagcttaaccagtgatagaactagaaattgggttcttcaacagaaaatagaaggagaaacaaaagaatcaaactacgctaaattgattgaaatgaatggaggaggaaccggctgtaatcatgaattagaaatgatcagacaaaagcttcaatgtgtagcttcaaaactacaggttctaccccagaaagcctctgagagactacagtttgaaacagcagatgatgaagatttcatttgggttcaggaaaatattgatgaaattattttacaactacagaaattaactggccagcaaggtgaagagcccagcttggtgtccccaagtacttcttgtggctcattgactgaaagactactgagacaaaatgctgagctgacagggcatatcagtcaactgactgaagagaagaatgacttaaggaacatggttatgaagctggaagagcagatcaggtggtatcgacagacaggagctggtagagataattcttccaggttttcattgaatggtggtgccaacattgaagccatcattgcctctgaaaaagaagtatggaacagagaaaaattgactctccagaaatctttgaaaagggcagaggctgaagtatacaaactgaaagctgaactaagaaatgactctttacttcaaactctgagccctgattctgaacatgtcactttaaagagaatttatggtaaatacttgagggcagaaagttttcgaaaggctctcatttaccagaagaaatacctgctgctgttactgggtgggttccaggaatgtgaagatgccaccttggccctgcttgcccggatgggggggcagccagctttcacggatctagaggtgatcaccaatcgcccaaagggcttcaccaggtttcggtcggccgtcagagtatccattgcaatttccagaatgaaatttttggttcgacggtggcatcgagtcacaggttctgtttccatcaatattaacagagatggctttggactgaatcaaggtgcagaaaagactgactcattttatcattcttctggtgggctggagttatatggagaaccaagacatactacgtatcgctcaagatcagatctggactatattaggtcccctttaccatttcagaataggtacccaggcactccagctgatttcaatcctggttctttagcatgttctcagcttcagaattacgatcctgacagagccctaacagattatatcactcggctagaggcactgcaaagacgacttggaactatacagtcaggtgctctgagtttaaccacatcttggcagcaccacagtgcgagacccacagctcccttctttgaaattctttcacactcattaggataa

SEQ ID NO: 416 - DNA, 2013 bp, Homo sapiens
  source 1..2013: mol_type = unassigned DNA
aagggcgaggggcggggcctgcgtcgcgctgcgggcacgtcgccgcgcgtcttcagtatttaatgtctctgtgttccacccgcctgggctagcacgtgggggagctgcggaagcgcggcgctgcgggccgggccgcggggcacagccgggggccggcggcggcgcgcggactccgcatcccgcaccccgatggtagccgaggagctggtgtaattacttcaagcctccaggatggcaatccagttccgttcgctcttccccttggcattgcctgggatgctggcgctcctcggctggtggtggtttttctctcgtaaaaaaggccatgtcagcagccatgatgagcagcaggtggaggctggtgctgtgcagctgagggctgaccctgccatcaaggaacctctccccgtggaagacgtctgtcccaaagtagtgtccacaccccccagtgtcacagagcctccagaaaaggaactgtccaccgtgagcaagctgcctgcagagcccccagcattgctccagacacacccaccttgccgaagatcagagtcctcgggcattcttcctaacaccacagacatgagattgcgaccaggaacacgcagagatgacagtacaaagctggagctagccctgacaggtggtgaagccaaatcgattcctctagagtgccccctttcatccccaaagggtgtactattctccagcaaatcagctgaggtgtgtaagcaagattcccccttcagcagggtgccaaggaaggtccagccaggctaccccgtagtccccgcagagaagcgtagctctggggagagggcaagagagacaggtggggccgaagggactggtgatgccgtgttgggggaaaaggtgcttgaagaagctctgttgtctcgggagcatgtcttggaattggagaacagcaagggccccagcctggcctctttagagggggaagaagataaggggaagagcagctcatcccaggtggtggggccagtgcaggaggaagagtatgtagcagagaagttgccaagtaggttcatcgagtcggctcacacagagctggcaaaggacgatgcggcgccagcacccccagtcgcagacgccaaagcccaggatagaggtgtcgagggagaactgggcaatgaggagagcttggatagaaatgaggagggcttggatagaaatgaggagggcttggatagaaatgaggagagcttggatagaaatgaggagggcttggatagaaatgaggagattaagcgggctgccttccagataatctcccaagtgatctcagaagcaaccgaacaggtgctggccaccacggttggcaaggttgcaggtcgtgtgtgtcaggccagtcagctccaagggcagaaggaagagagctgtgtcccagttcaccagaaaactgtcttgggcccagacactgcggagcctgccacagcagaggcagctgttgccccgccggatgctggcctccccttgccaggcctaccagcagagggctcaccaccaccaaagacctacgtgagctgcctgaagagccttctgtccagccccaccaaggacagtaagccaaatatctctgcacaccacatctccctggcctcctgcctggcactgaccacccccagtgaagagttgccggaccgggcaggcatcctggtggaagatgccacctgtgtcacctgcatgtcagacagcagccaaagtgtccctttggtggcttctccaggacactgctcagattctttcagcacttcagggcttgaagactcttgcacagagaccagctcgagccccagggacaaggccatcaccccgccactgccagaaagtactgtgcccttcagcaatggggtgctgaagggggagttgtcagacttgggggctgaggatggatggaccatggatgcggaagcagatcattcaggagttgcagctccacccccgggaaagcggggcactttgataacgaggtgtcctgggtttttcgagtgctga

SEQ ID NO: 417 - DNA, 3970 bp, Homo sapiens
  source 1..3970: mol_type = unassigned DNA
acaagggcgaggggcggggcctgcgtcgcgctgcgggcacgtcgccgcgcgtcttcagtatttaatgtctctgtgttccacccgcctgggctagcacgtgggggagctgcggaagcgcggcgctgcgggccgggccgcggggcacagccgggggccggcggcggcgcgcggactccgcatcccgcaccccgatggtagccgaggagctggtgtaattacttcaagcctccaggatggcaatccagttccgttcgctcttccccttggcattgcctgggatgctggcgctcctcggctggtggtggtttttctctcgtaaaaaaggccatgtcagcagccatgatgagcagcaggtggaggctggtgctgtgcagctgagggctgaccctgccatcaaggaacctctccccgtggaagacgtctgtcccaaagtagtgtccacaccccccagtgtcacagagcctccagaaaaggaactgtccaccgtgagcaagctgcctgcagagcccccagcattgctccagacacacccaccttgccgaagatcagagtcctcgggcattcttcctaacaccacagacatgagattgcgaccaggaacacgcagagatgacagtacaaagctggagctagccctgacaggtggtgaagccaaatcgattcctctagagtgccccctttcatccccaaagggtgtactattctccagcaaatcagctgaggtgtgtaagcaagattcccccttcagcagggtgccaaggaaggtccagccaggctaccccgtagtccccgcagagaagcgtagctctggggagagggcaagagagacaggtggggccgaagggactggtgatgccgtgttgggggaaaaggtgcttgaagaagctctgttgtctcgggagcatgtcttggaattggagaacagcaagggccccagcctggcctctttagagggggaagaagataaggggaagagcagctcatcccaggtggtggggccagtgcaggaggaagagtatgtagcagagaagttgccaagtaggttcatcgagtcggctcacacagagctggcaaaggacgatgcggcgccagcacccccagtcgcagacgccaaagcccaggatagaggtgtcgagggagaactgggcaatgaggagagcttggatagaaatgaggagggcttggatagaaatgaggagggcttggatagaaatgaggagagcttggatagaaatgaggagggcttggatagaaatgaggagattaagcgggctgccttccagataatctcccaagtgatctcagaagcaaccgaacaggtgctggccaccacggttggcaaggttgcaggtcgtgtgtgtcaggccagtcagctccaagggcagaaggaagagagctgtgtcccagttcaccagaaaactgtcttgggcccagacactgcggagcctgccacagcagaggcagctgttgccccgccggatgctggcctccccttgccaggcctaccagcagagggctcaccaccaccaaagacctacgtgagctgcctgaagagccttctgtccagccccaccaaggacagtaagccaaatatctctgcacaccacatctccctggcctcctgcctggcactgaccacccccagtgaagagttgccggaccgggcaggcatcctggtggaagatgccacctgtgtcacctgcatgtcagacagcagccaaagtgtccctttggtggcttctccaggacactgctcagattctttcagcacttcagggcttgaagactcttgcacagagaccagctcgagccccagggacaaggccatcaccccgccactgccagaaagtactgtgcccttcagcaatggggtgctgaagggggagttgtcagacttgggggctgaggatggatggaccatggatgcggaagcagatcattcaggaggttctgacaggaacagcatggattccgtggatagctgttgcagtctcaagaagactgagagcttccaaaatgcccaggcaggctccaaccctaagaaggtcgacctcatcatctgggagatcgaggtgccaaagcacttagtcggtcggctaattggcaagcaggggcgctatgtgagttttctgaagcaaacatctggtgccaagatctacatttcaaccctgccttacacccagagcgtccagatctgccacatagaaggctctcaacatcatgtagacaaagcgctgaacttgattgggaagaagttcaaagagctgaacctcaccaatatctacgctcccccattgccttcactggcactgccttctctgccgatgacatcctggctcatgctgcctgatggcatcaccgtggaggtcattgtggtcaaccaggtcaatgccgggcacctgttcgtgcagcagcacacacaccctaccttccacgcgctgcgcagcctcgaccagcagatgtacctctgttactctcagcctggaatccccaccttgcccaccccagtggaaataacggtcatctgtgccgcccctggtgcggacggggcctggtggcgagcccaagtggttgcctcctacgaggagaccaacgaagtggagattcgatacgtggactacggcggatataagagggtgaaagtagacgtgctccggcaaatcaggtctgactttgtcaccctgccgtttcagggagcagaagtccttctggacagtgtgatgcccctgtcagacgatgaccagttttcaccggaagcagatgccgccatgagcgagatgacggggaatacagcactgcttgctcaggtgacaagttacagtccaactggtcttcctctgattcagctgtggagtgtggttggagatgaagtggtgttgataaaccggtccctggtggagcgaggccttgcccagtgggtagacagctactacacaagcctttgacccccatgctgcttcctgagagtctttttttgcactgttgaaattgggcttggcactcaagtcaaagatgaacatcggaataacaaacattgtcctctccagaaagtcctttctttctccatactgtagtcctattgagaagacatttcgtctctgagaaaaaaggatggaactatgggttctcttcgcaaagccaaaggatagtgtttaacaagccagctggcttatgctggttctcagctgtttaaaaaaaaaaaaaaaaaggaatagaaacagtttcaaccagattgtcctattccccctgttccattcccctcttcttccttctatctccttccccggcaaaaaccaaacaaactggcagacaggccagggatgtatgttgcttgcttgagagggtttcttttacttcaaaatctttcttcagggagcaagacatgaactgactaattggtatccactacttgtacagcttacataaatgagttgatgatatttaaccagtttttataaacttcatttaggtctctaaacacagactttttaaattgcaactgtaaatatgaaatggtcatcacatctgaccttggtcagtggggaggggaactggtatcctgccaagcctggttgtaatttgtaaccattttctatttgtgcaaactctgtaaatatgtgtttaaacaaatgtaatattttgtacaagatacactggagaacaaagggaactcaagattcttccagccacatgtcacctgtaggtagaagtaaactctgcagtgcagcttctgctcttggcccctctggccagggcccctgtggcttcctgcacactggacaggtgactgtatggtagagactgtgatctgggaactttttgctgtacaaatctgtttaaaaaaaaaaaaaagtaactcattgaattaacttgcagtggtgtgtttgattcttttttagactggcttcagcattgtgcagtttaaaaataagtaagtaacttacataaatcttcaattgtatgaactgca

SEQ ID NO: 418 - DNA, 3044 bp, Homo sapiens
  source 1..3044: mol_type = unassigned DNA
aacttaaccggagcgtgcacacccgcctgcgaggctgacccgagcgcgtcccacccaaggtcgcccagccccgcgggcgtttacttttcaaagggagggataggagaagaaaggtgctgatcgtggtaggcggtgctgtggcgactcggaacggcatgggagccctgggcgtttcgggatcttcctctcctgggggatgtcctgggtggcggcgccttcctgccgccgttaacacaaacccggtggacttcgctccaggtgtaattactcaagcctccaggatggcaatccagttccgttcgctcttccccttggcattgcctgggatgctggcgctcctcggctggtggtggtttttctctcgtaaaaaaggccatgtcagcagccatgatgagcagcaggtggaggctggtgctgtgcagctgagggctgaccctgccatcaaggaacctctccccgtggaagacgtctgtcccaaagtagtgtccacaccccccagtgtcacagagcctccagaaaaggaactgtccaccgtgagcaagctgcctgcagagcccccagcattgctccagacacacccaccttgccgaagatcagagtcctcgggcattcttcctaacaccacagacatgagattgcgaccaggaacacgcagagatgacagtacaaagctggagctagccctgacaggtggtgaagccaaatcgattcctctagagtgccccctttcatccccaaagggtgtactattctccagcaaatcagctgaggtgtgtaagcaagattcccccttcagcagggtgccaaggaaggtccagccaggctaccccgtagtccccgcagagaagcgtagctctggggagagggcaagagagacaggtggggccgaagggactggtgatgccgtgttgggggaaaaggtgcttgaagaagctctgttgtctcgggagcatgtcttggaattggagaacagcaagggccccagcctggcctctttagagggggaagaagataaggggaagagcagctcatcccaggtggtggggccagtgcaggaggaagagtatgtagcagagaagttgccaagtaggttcatcgagtcggctcacacagagctggcaaaggacgatgcggcgccagcacccccagtcgcagacgccaaagcccaggatagaggtgtcgagggagaactgggcaatgaggagagcttggatagaaatgaggagggcttggatagaaatgaggagggcttggatagaaatgaggagagcttggatagaaatgaggagggcttggatagaaatgaggagattaagcgggctgccttccagataatctcccaagtgatctcagaagcaaccgaacaggtgctggccaccacggttggcaaggttgcaggtcgtgtgtgtcaggccagtcagctccaagggcagaaggaagagagctgtgtcccagttcaccagaaaactgtcttgggcccagacactgcggagcctgccacagcagaggcagctgttgccccgccggatgctggcctccccttgccaggcctaccagcagagggctcaccaccaccaaagacctacgtgagctgcctgaagagccttctgtccagccccaccaaggacagtaagccaaatatctctgcacaccacatctccctggcctcctgcctggcactgaccacccccagtgaagagttgccggaccgggcaggcatcctggtggaagatgccacctgtgtcacctgcatgtcagacagcagccaaagtgtccctttggtggcttctccaggacactgctcagattctttcagcacttcagggcttgaagactcttgcacagagaccagctcgagccccagggacaaggccatcaccccgccactgccagaaagtactgtgcccttcagcaatggggtgctgaagggggagttgtcagacttgggggctgaggatggatggaccatggatgcggaagcagatcattcaggaggttctgacaggaacagcatggattccgtggatagctgttgcagtctcaagaagactgagagcttccaaaatgcccaggcaggctccaaccctaagaaggtcgacctcatcatctgggagatcgaggtgccaaagcacttagtcggtcggctaattggcaagcaggggcgctatgtgagttttctgaagcaaacatctggtgccaagatctacatttcaaccctgccttacacccagagcgtccagatctgccacatagaaggctctcaacatcatgtagacaaagcgctgaacttgattgggaagaagttcaaagagctgaacctcaccaatatctacgctcccccattgccttcactggcactgccttctctgccgatgacatcctggctcatgctgcctgatggcatcaccgtggaggtcattgtggtcaaccaggtcaatgccgggcacctgttcgtgcagcagcacacacaccctaccttccacgcgctgcgcagcctcgaccagcagatgtacctctgttactctcagcctggaatccccaccttgcccaccccagtggaaataacggtcatctgtgccgcccctggtgcggacggggcctggtggcgagcccaagtggttgcctcctacgaggagaccaacgaagtggagattcgatacgtggactacggcggatataagagggtgaaagtagacgtgctccggcaaatcaggtctgactttgtcaccctgccgtttcagggagcagaagtccttctggacagtgtgatgcccctgtcagacgatgaccagttttcaccggaagcagatgccgccatgagcgagatgacggggaatacagcactgcttgctcaggtgacaagttacagtccaactggtcttcctctgattcagctgtggagtgtggttggagatgaagtggtgttgataaaccggtccctggtggagcgaggccttgcccagtgggtagacagctactacacaagcctttgacccccatgctgcttcctgagagtctttttttgcactgttgaaattgggctt

SEQ ID NO: 419 - DNA, 3153 bp, Homo sapiens
  source 1..3153: mol_type = unassigned DNA
gtgacttacacaggcccctgaggatgaaggtaacagtcctgtgagcactgaggctgggctgggaccaacacctgagccatggctccagcactctgattcctggcccagccatgctgctgagggtgcacagcccaggcctaccatcgcccccacccttggtggcagaaccgagcactacccagcaaggtgtaattacttcaagcctccaggatggcaatccagttccgttcgctcttccccttggcattgcctgggatgctggcgctcctcggctggtggtggtttttctctcgtaaaaaaggccatgtcagcagccatgatgagcagcaggtggaggctggtgctgtgcagctgagggctgaccctgccatcaaggaacctctccccgtggaagacgtctgtcccaaagtagtgtccacaccccccagtgtcacagagcctccagaaaaggaactgtccaccgtgagcaagctgcctgcagagcccccagcattgctccagacacacccaccttgccgaagatcagagtcctcgggcattcttcctaacaccacagacatgagattgcgaccaggaacacgcagagatgacagtacaaagctggagctagccctgacaggtggtgaagccaaatcgattcctctagagtgccccctttcatccccaaagggtgtactattctccagcaaatcagctgaggtgtgtaagcaagattcccccttcagcagggtgccaaggaaggtccagccaggctaccccgtagtccccgcagagaagcgtagctctggggagagggcaagagagacaggtggggccgaagggactggtgatgccgtgttgggggaaaaggtgcttgaagaagctctgttgtctcgggagcatgtcttggaattggagaacagcaagggccccagcctggcctctttagagggggaagaagataaggggaagagcagctcatcccaggtggtggggccagtgcaggaggaagagtatgtagcagagaagttgccaagtaggttcatcgagtcggctcacacagagctggcaaaggacgatgcggcgccagcacccccagtcgcagacgccaaagcccaggatagaggtgtcgagggagaactgggcaatgaggagagcttggatagaaatgaggagggcttggatagaaatgaggagggcttggatagaaatgaggagagcttggatagaaatgaggagggcttggatagaaatgaggagattaagcgggctgccttccagataatctcccaagtgatctcagaagcaaccgaacaggtgctggccaccacggttggcaaggttgcaggtcgtgtgtgtcaggccagtcagctccaagggcagaaggaagagagctgtgtcccagttcaccagaaaactgtcttgggcccagacactgcggagcctgccacagcagaggcagctgttgccccgccggatgctggcctccccttgccaggcctaccagcagagggctcaccaccaccaaagacctacgtgagctgcctgaagagccttctgtccagccccaccaaggacagtaagccaaatatctctgcacaccacatctccctggcctcctgcctggcactgaccacccccagtgaagagttgccggaccgggcaggcatcctggtggaagatgccacctgtgtcacctgcatgtcagacagcagccaaagtgtccctttggtggcttctccaggacactgctcagattctttcagcacttcagggcttgaagactcttgcacagagaccagctcgagccccagggacaaggccatcaccccgccactgccagaaagtactgtgcccttcagcaatggggtgctgaagggggagttgtcagacttgggggctgaggatggatggaccatggatgcggaagcagatcattcaggaggttctgacaggaacagcatggattccgtggatagctgttgcagtctcaagaagactgagagcttccaaaatgcccaggcaggctccaaccctaagaaggtcgacctcatcatctgggagatcgaggtgccaaagcacttagtcggtcggctaattggcaagcaggggcgctatgtgagttttctgaagcaaacatctggtgccaagatctacatttcaaccctgccttacacccagagcgtccagatctgccacatagaaggctctcaacatcatgtagacaaagcgctgaacttgattgggaagaagttcaaagagctgaacctcaccaatatctacgctcccccattgccttcactggcactgccttctctgccgatgacatcctggctcatgctgcctgatggcatcaccgtggaggtcattgtggtcaaccaggtcaatgccgggcacctgttcgtgcagcagcacacacaccctaccttccacgcgctgcgcagcctcgaccagcagatgtacctctgttactctcagcctggaatccccaccttgcccaccccagtggaaataacggtcatctgtgccgcccctggtgcggacggggcctggtggcgagcccaagtggttgcctcctacgaggagaccaacgaagtggagattcgatacgtggactacggcggatataagagggtgaaagtagacgtgctccggcaaatcaggtctgactttgtcaccctgccgtttcagggagcagaagtccttctggacagtgtgatgcccctgtcagacgatgaccagttttcaccggaagcagatgccgccatgagcgagatgacggggaatacagcactgcttgctcaggtgacaagttacagtccaactggtcttcctctgattcagctgtggagtgtggttggagatgaagtggtgttgataaaccggtccctggtggagcgaggccttgcccagtgggtagacagctactacacaagcctttgacccccatgctgcttcctgagagtctttttttgcactgttgaaattgggcttggcactcaagtcaaagatgaacatcggaataacaaacattgtcctctccagaaagtcctttctttctccatactgtagtcctattgagaagacatttcgtctctgagaaaaaaggatggaactatgggttctcttcgcaaagccaaaggatagtgtttaacaagccagctggcttatgct

SEQ ID NO: 420 - DNA, 3899 bp, Homo sapiens
  source 1..3899: mol_type = unassigned DNA
aaggaccggaactccgggcgggcggcttgttgataatatggcggctggagctgcctgggcatcccgaggaggcggtggggcccactcccggaagaagggtcccttttcgcgctagtgcagcggcccctctggacccggaagtccgggccggttgctgaatgaggggagccgggccctccccgcgccagtccccccgcaccctccgtcccgacccgggccccgccatgtccttcttccggcggaaagtgaaaggcaaagaacaagagaagacctcagatgtgaagtccattaaagcttcaatatccgtacattccccacaaaaaagcactaaaaatcatgccttgctggaggctgcaggaccaagtcatgttgcaatcaatgccatttctgccaacatggactccttttcaagtagcaggacagccacacttaagaagcagccaagccacatggaggccgctcattttggtgacctgggcagatcttgtctggactaccagactcaagagaccaaatcaagcctttctaagacccttgaacaagtcttgcacgacactattgtcctcccttacttcattcaattcatggaacttcggcgaatggagcatttggtgaaattttggttagaggctgaaagttttcattcaacaacttggtcgcgaataagagcacacagtctaaacacagtgaagcagagctcactggctgagcctgtctctccatctaaaaagcatgaaactacagcgtcttttttaactgattctcttgataagagattggaggattctggctcagcacagttgtttatgactcattcagaaggaattgacctgaataatagaactaacagcactcagaatcacttgctgctttcccaggaatgtgacagtgcccattctctccgtcttgaaatggccagagcaggaactcaccaagtttccatggaaacccaagaatcttcctctacacttacagtagccagtagaaatagtcccgcttctccactaaaagaattgtcaggaaaactaatgaaaagtatagaacaagatgcagtgaatacttttaccaaatatatatctccagatgctgctaaaccaataccaattacagaagcaatgagaaatgacatcatagcaaggatttgtggagaagatggacaggtggatcccaactgtttcgttttggcacagtccatagtctttagtgcaatggagcaagagcactttagtgagtttctgcgaagtcaccatttctgtaaataccagattgaagtgctgaccagtggaactgtttacctggctgacattctcttctgtgagtcagccctcttttatttctctgagtacatggaaaaagaggatgcagtgaatatcttacaattctggttggcagcagataacttccagtctcagcttgctgccaaaaagggccaatatgatggacaggaggcacagaatgatgccatgattttatatgacaagtacttctccctccaagccacacatcctcttggatttgatgatgttgtacgattagaaattgaatccaatatctgcagggaaggtgggccactccccaactgtttcacaactccattacgtcaggcctggacaaccatggagaaggtctttttgcctggctttttgtccagcaatctttattataaatatttgaatgatctcatccattcggttcgaggagatgaatttctgggcgggaacgtgtcgctgactgctcctggctctgttggccctcctgatgagtctcacccagggagttctgacagctctgcgtctcagtccagtgtgaaaaaagccagtattaaaatactgaaaaattttgatgaagcgataattgtggatgcggcaagtctggatccagaatctttatatcaacggacatatgccgggaagatgacatttggaagagtcagtgacttggggcaattcatccgagaatctgagcctgaacctgatgtaaggaaatcaaaaggatccatgttctcacaagctatgaagaaatgggtgcaaggaaatactgatgaggcccaggaagagctagcttggaagattgctaaaatgatagtcagtgacattatgcagcaggctcagtatgatcaaccgttagagaaatctacaaagttatgactcaaaacttgagataaaggaaatctgcttgtgaaaaataagagaacttttttcccttggttggattcttcaacacagccaatgaaaacagcactatatttctgatctgtcactgttgtttccaggagagaatgggagacaatcctagacttccaccataatgcagttacctgtaggcataattgatgcacatgatgttcacacagtgagagtcttaaagatacaaaatggtattgtttacattactagaaaattattagttttccaatggcaataacccatttatgagagtgttttagcctactggaatagacagggaccacatcctctgggaagcagataagcatagaactgatacttgatgcacactcgtagtggtaactcatccctaatcagcattgtaaagcaggtgccagaggtggtttgctttgtccttccaaagcaggtgagtcagccccaccgagagccaggcagctttgagtggcagcgtggtgctagcagcttcagcggaacagggtgagagttaattatgcagtcttcttgacagcggcattaatttggaaggaaactgacaagtcatgggtcaagtttcagtgacttcctccttcctctgatggcagtatatagttttcacattttaattcctcctcctgagatgcactatacttaaaaccattctctcccctgctaacagaagggtgtgaatctggtttactttgagcattaggatttgcccctttggaattctgcactccagttacttaactttcccttcagaatacatgtggaaagaaagaaagaaatagcgatgactccacttttgcccctgtggcaccttgaacaaagcagttcttcccaaattatactttttttttttttaaataaggtgagcaggatgactggggagagagaaacatttgactttgactgcctcccccattctttgctgtgagctggaaagtgtgcagttggtcgtctttcttctcctttctttaggatagtaagagactcactcactgcacttctgctcagttggcttctgcatcgggatcacacagccatcagcaggactgcccagttggtgagcacactccattgaccacgtggcgccagcgcttcctcaatgcacatgattgagaggaaagaaagttctcttagatgttactgcttttgctcagactttgcaaaaaaaaaaatatatatatatatgtataaatatataattattaatcacttttgtccttgagaaagtcttgaatgaacagagaatttattccattgcaatatttgattgtatagaggcacactgtttcatcgacagaagaagcaaaaaggctttgtgtaagtttttggtactatgtaccacctctgttattcttttaaagctgaagtattcatgtacttaaaccatattatatttaattgtgtttgattttaaaatatatatatatgaattctatttaaaattgtgtcaactttctgctttcagggcatttatggctcttctgttgaaatatattgatctttccaaatattttcatttgctttctaaaaacccagaacatgagccactactggactttgccttgtgtttgaagtgtatggcataaacccaaggtttttattagtcatctatgctgtgattaattcattttgttcttttaacaaaatatttccatccacttcacattgcttcaatctttaacagaaaagcaatataaaggttatagaataaaatgtggttttgggcaa

SEQ ID NO: 421 - DNA, 1812 bp, Homo sapiens
  source 1..1812: mol_type = unassigned DNA
atgaggggagccgggccctccccgcgccagtccccccgcaccctccgtcccgacccgggccccgccatgtccttcttccggcggaaagtgaaaggcaaagaacaagagaagacctcagatgtgaagtccattaaagcttcaatatccgtacattccccacaaaaaagcactaaaaatcatgccttgctggaggctgcaggaccaagtcatgttgcaatcaatgccatttctgccaacatggactccttttcaagtagcaggacagccacacttaagaagcagccaagccacatggaggccgctcattttggtgacctgggcagatcttgtctggactaccagactcaagagaccaaatcaagcctttctaagacccttgaacaagtcttgcacgacactattgtcctcccttacttcattcaattcatggaacttcggcgaatggagcatttggtgaaattttggttagaggctgaaagttttcattcaacaacttggtcgcgaataagagcacacagtctaaacacagtgaagcagagctcactggctgagcctgtctctccatctaaaaagcatgaaactacagcgtcttttttaactgattctcttgataagagattggaggattctggctcagcacagttgtttatgactcattcagaaggaattgacctgaataatagaactaacagcactcagaatcacttgctgctttcccaggaatgtgacagtgcccattctctccgtcttgaaatggccagagcaggaactcaccaagtttccatggaaacccaagaatcttcctctacacttacagtagccagtagaaatagtcccgcttctccactaaaagaattgtcaggaaaactaatgaaaagtatagaacaagatgcagtgaatacttttaccaaatatatatctccagatgctgctaaaccaataccaattacagaagcaatgagaaatgacatcatagcaaggatttgtggagaagatggacaggtggatcccaactgtttcgttttggcacagtccatagtctttagtgcaatggagcaagagcactttagtgagtttctgcgaagtcaccatttctgtaaataccagattgaagtgctgaccagtggaactgtttacctggctgacattctcttctgtgagtcagccctcttttatttctctgagtacatggaaaaagaggatgcagtgaatatcttacaattctggttggcagcagataacttccagtctcagcttgctgccaaaaagggccaatatgatggacaggaggcacagaatgatgccatgattttatatgacaagtacttctccctccaagccacacatcctcttggatttgatgatgttgtacgattagaaattgaatccaatatctgcagggaaggtgggccactccccaactgtttcacaactccattacgtcaggcctggacaaccatggagaagtccagtgtgaaaaaagccagtattaaaatactgaaaaattttgatgaagcgataattgtggatgcggcaagtctggatccagaatctttatatcaacggacatatgccgggaagatgacatttggaagagtcagtgacttggggcaattcatccgagaatctgagcctgaacctgatgtaaggaaatcaaaaggatccatgttctcacaagctatgaagaaatgggtgcaaggaaatactgatgaggcccaggaagagctagcttggaagattgctaaaatgatagtcagtgacattatgcagcaggctcagtatgatcaaccgttagagaaatctacaaaggta

SEQ ID NO: 422 - DNA, 9468 bp, Homo sapiens
  source 1..9468: mol_type = unassigned DNA
tgtctttctccgcggcgaaggtgaagagttgtcccagctcggcccgcgggggagccccgggagccgcacgtgtcctgggtcatgaaacttaatccacagcaagctcccttatatggtgattgtgttgttacagtgctgcttgctgaagaggacaaagctgaagatgatgtagtgttttacttggtatttttgggttccaccctccgtcactgtacaagtactcggaaggtcagttctgatacattggagaccattgctcctggtcatgattgttgtgaaacagtgaaggtgcagctctgtgcttccaaagagggccttcccgtgtttgtggtggctgaagaagactttcatttcgtccaggatgaagcgtatgatgcagctcaattcctagcaaccagtgctggaaatcagcaggctttgaactttacccgttttcttgaccagtcaggacccccatctggggatgtgaattcccttgataagaagttggtgctggcattcaggcacctgaagctgcccacggagtggaatgtattggggacagatcagagtttgcatgatgctggcccgcgagagacattgatgcattttgctgtgcggctgggactgctgaggttgacgtggttcctgttgcagaagccaggtggccgcggagctctcagtatccacaaccaggaaggggcgacgcctgtgagcttggccttggagcgaggctatcacaagctgcaccagcttctaaccgaggagaatgctggagaaccagactcctggagcagtttatcctatgaaataccgtatggagactgttctgtgaggcatcatcgagagttggacatctatacattaacctctgagtctgattcacatcatgaacacccatttcctggagacggttgcactggaccaatttttaaacttatgaacatccaacagcaactaatgaaaacaaacctcaagcagatggacagtcttatgcccttaatgatgacagcacaggatccttccagtgccccagagacagatggccagtttcttccctgtgcaccggagcccacggaccctcagcgactttcttcttctgaagagactgagagcactcagtgctgcccagggagccctgttgcacagactgaaagtccctgtgatttgtcaagcatagttgaggaggagaatacagaccgttcctgtaggaagaaaaataaaggcgtggaaagaaaaggggaagaggtggagccagcacctattgtggactctggaactgtatctgatcaagacagctgccttcagagcttgcctgattgtggagtaaagggcacggaaggcctttcgtcctgtggaaacagaaatgaagaaactggaacaaaatcttctggaatgcccacagaccaggagtccctgagcagtggagatgctgtgcttcagagagacttggtcatggagccaggcacagcccagtattcctctggaggtgaactgggaggcatttcaacaacaaatgtcagtaccccagacactgcaggggaaatggaacatgggctcatgaacccagatgccactgtttggaagaatgtgcttcagggaggggaaagtacaaaggaaagatttgagaactctaatattggcacagctggagcctctgacgtgcacgtcacaagtaagcctgtggataaaatcagtgttccaaactgtgcccctgctgccagttccctggatggtaacaaacctgctgagtcttcacttgcatttagtaatgaagaaacctccactgaaaaaacagcagaaacggaaacttcacgaagtcgtgaggagagtgctgatgctccagtagatcagaattctgtggtgattccagctgctgcaaaagacaagatttcagatggattagaaccttatactctcttagcagcaggcataggtgaggcaatgtcaccctcagatttagcccttcttgggctggaagaagatgtaatgccacaccagaactcagaaacaaattcatctcatgctcaaagccaaaagggcaaatcctcacccatttgttctacaactggagacgataaactttgtgcagactctgcatgtcaacagaacacagtgacttctagtggcgatttggttgcaaaactgtgtgataacatagttagcgagtccgaaagcaccacagcaaggcaacccagctcacaagatccacccgatgcctcccactgtgaagacccacaggctcatacagtcacctctgaccctgtaagggatacccaggaacgtgcggatttttgtcctttcaaagtggtggataacaaaggccaacgaaaagatgtgaaactagataaacctttaacaaatatgcttgaggtggtttcacatccacatccagttgtccctaaaatggagaaagaactggtgccagaccaggcagtaatatcagacagtactttctctctggcaaacagtccaggcagtgaatcagtaaccaaggatgacgcactttcttttgtcccctcccagaaagaaaagggaacagcaactcctgaactacatacagctacagattatagagatggcccagatggaaattcgaatgagcctgatacgcggccactagaagacagggcagtaggcctgtccacatcctccactgctgcagagcttcagcacgggatggggaataccagtctcacaggacttggtggagagcatgagggtcccgcccctccagcaatcccagaagctctgaatatcaaggggaacactgactcttccctgcaaagtgtgggtaaggccactttggctttagattcagttttgactgaagaaggaaaacttctggtggtttcagaaagctctgcagctcaggaacaagataaggataaagcggtgacctgttcctctattaaggaaaatgctctctcttcaggaactttgcaggaagagcagagaacaccacctcctggacaagatactcaacaatttcatgaaaaatcaatctcagctgactgtgccaaggacaaagcacttcagctaagtaattcaccgggtgcatcctctgcctttcttaaggcagaaactgaacataacaaggaagtggccccacaagtctcactgctgactcaaggtggggctgcccagagcctggtgccaccaggagcaagtctggccacagagtcaaggcaggaagccttgggggcagagcacaacagctccgctctgttgccatgtctgttgccagatgggtctgatgggtccgatgctcttaactgcagtcagccttctcctctggatgttggagtgaagaacactcaatcccagggaaaaactagtgcctgtgaggtgagtggagatgtgacggtggatgttacaggggttaatgctctacaaggtatggctgagcccagaagagagaatatatcacacaacacccaagacatcctgattccaaacgtcttgttgagccaagagaagaatgccgttctaggtttgccagtggctctacaggacaaagctgtgactgacccacagggagttggaaccccagagatgatacctcttgattgggagaaagggaagctggagggagcagaccacagctgtaccatgggtgacgctgaggaagcccaaatagacgatgaagcacatcctgtcctactgcagcctgttgccaaggagctccccacagacatggagctctcagcccatgatgatggggccccagctggtgtgagggaagtcatgcgagccccgccttcaggcagggaaaggagcactccctctctaccttgcatggtctctgcccaggacgcacctctgcctaagggggcagacttgatagaggaggctgccagccgtatagtggatgctgtcatcgaacaagtcaaggccgctggagcactgcttactgagggggaggcctgtcacatgtcactgtccagccctgagttgggtcctctcactaaaggactagagagtgcttttacagaaaaagtgagtactttcccacctggggagagcctaccaatgggcagtactcctgaggaagccacggggagccttgcaggatgttttgctggaagggaggagccagagaagatcattttacctgtccaggggcctgagccagcagcagaaatgccagacgtgaaagctgaagatgaagtggattttagagcaagttcaatttctgaagaagtggctgtagggagcatagctgctacactgaagatgaagcaaggcccaatgacccaggcgataaaccgagaaaactggtgtacaatagagccatgccctgatgcagcatctcttctggcttccaagcagagcccagaatgtgagaacttcctggatgttggactgggcagagagtgtacctcaaaacaaggtgtacttaaaagagaatctgggagtgattctgacctctttcactcacccagtgatgacatggacagcatcatcttcccaaagccagaggaagagcatttggcctgtgatatcaccggatccagttcatccaccgatgacacggcttcactggaccgacattcttctcatggcagtgatgtgtctctctcccagattttaaagccaaacaggtcaagagatcggcaaagccttgatggattctacagccatgggatgggagctgagggtcgagaaagtgagagtgagcctgctgacccaggcgacgtggaggaggaggagatggacagtatcactgaagtgcctgcaaactgctctgtcctaaggagctccatgcgctctctttctcccttccggaggcacagctgggggcctgggaaaaatgcagccagcgatgcagaaatgaaccaccggagtatgagctggtgcccctctggtgtgcagtactctgctggcctgagtgctgactttaattacagaagtttcagtctagaaggcttgacaggaggagctggtgtcggaaacaagccatcctcatctctagaagtaagctctgcaaatgccgaagagctcagacacccattcagtggtgaggaacgggttgactctttggtgtcactttcagaagaggatctggagtcagaccagagagaacataggatgtttgatcagcagatatgtcacagatctaagcagcagggatttaattactgtacatcagccatttcctctccattgacaaaatccatctcattaatgacaatcagccatcctggattggacaattcacggcccttccacagtaccttccacaataccagtgctaatctgactgagagtataacagaagagaactataatttcctgccacatagcccctccaagaaagattctgaatggaagagtggaacaaaagtcagtcgtacattcagctacatcaagaataaaatgtctagcagcaagaagagcaaagaaaaggaaaaagaaaaagataagattaaggagaaggagaaagattctaaagacaaggagaaagataagaagactgtcaacgggcacactttcagttccattcctgttgtgggtcccatcagctgtagccagtgtatgaagcccttcaccaacaaagatgcctatacttgtgcaaattgcagtgcttttgtccacaaaggctgccgagaaagtctagcctcctgtgcaaaggtcaaaatgaagcagcccaaagggagccttcaggcacatgacacatcatcactgcccacggtcattatgagaaacaagccctcacagcccaaggagcgtcctcggtccgcagtcctcctggtggatgaaaccgctaccaccccaatatttgccaatagacgatcccagcagagtgtctcgctctccaaaagtgtctccatacagaacattactggagttggcaatgatgagaacatgtcaaacacctggaaattcctgtctcattcaacagactcactaaataaaatcagcaaggtcaatgagtcaacagaatcacttactgatgagggagtaggtacagacatgaatgaaggacaactactgggagactttgagattgagtccaaacagctggaagcagagtcttggagtcggataatagacagcaagtttctaaaacagcaaaagaaagatgtggtcaaacggcaagaagtaatatatgagttgatgcagacagagtttcatcatgtccgcactctcaagatcatgagtggtgtgtacagccaggggatgatggcggatctgctttttgagcagcagatggtagaaaagctgttcccctgtttggatgagctgatcagtatccatagccaattcttccagaggattctggagcggaagaaggagtctctggtggataaaagtgaaaagaactttctcatcaagaggataggggatgtgcttgtaaatcagttttcaggtgagaatgcagaacgtttaaagaagacatatggcaagttttgtgggcaacataaccagtctgtaaactacttcaaagacctttatgccaaggataagcgttttcaagcctttgtaaagaagaagatgagcagttcagttgttagaaggcttggaattccagagtgcatattgcttgtaactcagcggattaccaagtacccagttttattccaaagaatattgcagtgtaccaaagacaatgaagtggagcaggaagatctagcacagtccttgagcctggtgaaggatgtgattggagctgtagacagcaaagtggcaagttatgaaaagaaagtgcgtctcaatgagatttatacaaagacagatagcaagtcaatcatgaggatgaagagtggtcagatgtttgccaaggaagatttgaaacggaagaagcttgtacgtgatgggagtgtgtttctgaagaatgcagcaggaaggttgaaagaggttcaagcagttcttctcactgacattttagttttccttcaagaaaaagaccagaagtacatctttgcatcattggaccagaagtcaacagtgatctctttaaagaagctgattgtgagagaagtggcacatgaggagaaaggtttattcctgatcagcatggggatgacagatccagagatggtagaagtccatgccagctccaaagaggaacgaaacagctggattcagatcattcaggacacaatcaacaccctgaacagagatgaagatgaaggaattcctagtgagaatgaggaagaaaagaaaatgttggacaccagagcccgagaattaaaagaacaacttcaccagaaggaccaaaaaatcctactcttgttggaagagaaggagatgattttccgggacatggctgagtgcagcacccctctcccagaggattgctccccaacacatagccctagagttctcttccgctccaacacagaagaggctctcaaaggaggacctttaatgaaaagtgcaataaatgaggtggagatccttcagggtttggtgagtggaaatctgggaggcacacttgggccgactgtcagcagccccattgagcaagatgtggtcggtcccgtttccctgccccggagagcagagacctttggaggatttgacagccatcagatgaatgcttcaaaaggaggcgagaaggaagagggagatgatggccaagatcttaggagaacggaatcagatagtggcctaaaaaagggtggaaatgctaacctggtatttatgcttaaaagaaacagtgagcaggttgtccagagcgttgttcatctctacgagctcctcagcgctctgcagggtgtggtgctgcagcaggacagctacattgaggaccagaaactggtgctgagcgagagggcgctcactcgcagcttgtcccgcccgagctccctcattgagcaggagaagcagcgcagcctggagaagcagcgccaggacctggccaacctgcagaagcagcaggcccagtacctcgaggagaagcgcaggcgcgagcgtgagtgggaagctcgtgagagggagctgcgggagcgggaggccctcctggcccagcgcgaggaggaggtgcagcaggggcagcaggacctggaaaaggagcgggaggagctccagcagaagaagggcacataccagtatgacctggagcgactgcgtgctgcccagaaacagcttgagagggaacaggagcagctgcgccgggaggcagagcggctcagccagcggcagacagaacgggacctgtgtcaggtttcccatccacataccaagctgatgaggatcccatcgttcttccccagtcctgaggagcccccctcgccatctgcaccttccatagccaaatcagggtcattggactcagaactttcagtgtccccaaaaaggaacagcatctctcggacacacaaagataaggggccttttcacatactgagttcaaccagccagacaaacaaaggaccagaagggcagagccaggcccctgcgtccacctctgcctctacccgcctgtttgggttaacaaagccaaaggaaaagaaggagaaaaaaaagaagaacaaaaccagccgctctcagcccggtgatggtcccgcgtcagaagtatcagcagagggtgaagagatcttctgctgaccctcttcctctctgctgaggcagctgcctcctgatcctggccagcccacctctcctgctgtccccgcgtgcacaagtctcttacactggacgcccactgctcctcagcgtccagtcctcctgggcggccccaggtcctggacaataagcaacagatgatattgagtgtcgggtggggaaggaggcccagactctgcttcggccatgatttgtgactgcccaggactctcaggttgggctggccctactcaggattacactgaaagtaatggcctcgtaagtacaggtgatggttttggacacgtcaggaattcctaaaggctgaaagagtgtatccaagtaaggtctgaacctccgaatgccttttatttgggggaacacaaaaccaaacagcagatgttttggacttgatctgtgtacgtacatggggacctgtctgcatatacacacggggaatgccagaagaaggcccagtctgcaccaggcgtctggtcaacttagcacaagggcagtgcctggacggacccggagcccccgcatatcagcagttcacccagtactcctcagagactggtttccctctaaacccatcccgggcacataccacccgtgttttgcatgtatttctcatttcattttagggatgacaaacatttgtgaaaccagtgagagaaggcttgatgtgtataaaagacgtgatgtgcaccacctcgatctcggtgtttcaggcactaaagcaacaaaacaacccatagtatctcattctgtcatcagatccagaagaaatatcctggttttccagcatgtttacccacatgttttggccatggataaagtgaagaggcctactcaccattatccctgcagcgtgacaccttttgattgtcactgaccactcagaaggggccacggcctcctggctgtgttcctgag

SEQ ID NO: 423 - DNA, 8081 bp, Homo sapiens
  source 1..8081: mol_type = unassigned DNA
gtctaaaactctcttttctcttggctcttcttattcgagtgatgaggaggaggagttgcataattcacggcccttccacagtaccttccacaataccagtgctaatctgactgagagtataacagaagagaactataatttcctgccacatagcccctccaagaaagattctgaatggaagagtggaacaaaagtcagtcgtacattcagctacatcaagaataaaatgtctagcagcaagaagagcaaagaaaaggaaaaagaaaaagataagattaaggagaaggagaaagattctaaagacaaggagaaagataagaagactgtcaacgggcacactttcagttccattcctgttgtgggtcccatcagctgtagccagtgtatgaagcccttcaccaacaaagatgcctatacttgtgcaaattgcagtgcttttgtccacaaaggctgccgagaaagtctagcctcctgtgcaaaggtcaaaatgaagcagcccaaagggagccttcaggcacatgacacatcatcactgcccacggtcattatgagaaacaagccctcacagcccaaggagcgtcctcggtccgcagtcctcctggtggatgaaaccgctaccaccccaatatttgccaatagacgatcccagcagagtgtctcgctctccaaaagtgtctccatacagaacattactggagttggcaatgatgagaacatgtcaaacacctggaaattcctgtctcattcaacagactcactaaataaaatcagcaaggtcaatgagtcaacagaatcacttactgatgagggagtaggtacagacatgaatgaaggacaactactgggagactttgagattgagtccaaacagctggaagcagagtcttggagtcggataatagacagcaagtttctaaaacagcaaaagaaagatgtggtcaaacggcaagaagtaatatatgagttgatgcagacagagtttcatcatgtccgcactctcaagatcatgagtggtgtgtacagccaggggatgatggcggatctgctttttgagcagcagatggtagaaaagctgttcccctgtttggatgagctgatcagtatccatagccaattcttccagaggattctggagcggaagaaggagtctctggtggataaaagtgaaaagaactttctcatcaagaggataggggatgtgcttgtaaatcagttttcaggtgagaatgcagaacgtttaaagaagacatatggcaagttttgtgggcaacataaccagtctgtaaactacttcaaagacctttatgccaaggataagcgttttcaagcctttgtaaagaagaagatgagcagttcagttgttagaaggcttggaattccagagtgcatattgcttgtaactcagcggattaccaagtacccagttttattccaaagaatattgcagtgtaccaaagacaatgaagtggagcaggaagatctagcacagtccttgagcctggtgaaggatgtgattggagctgtagacagcaaagtggcaagttatgaaaagaaagtgcgtctcaatgagatttatacaaagacagatagcaagtcaatcatgaggatgaagagtggtcagatgtttgccaaggaagatttgaaacggaagaagcttgtacgtgatgggagtgtgtttctgaagaatgcagcaggaaggttgaaagaggttcaagcagttcttctcactgacattttagttttccttcaagaaaaagaccagaagtacatctttgcatcattggaccagaagtcaacagtgatctctttaaagaagctgattgtgagagaagtggcacatgaggagaaaggtttattcctgatcagcatggggatgacagatccagagatggtagaagtccatgccagctccaaagaggaacgaaacagctggattcagatcattcaggacacaatcaacaccctgaacagagatgaagatgaaggaattcctagtgagaatgaggaagaaaagaaaatgttggacaccagagcccgagaattaaaagaacaacttcaccagaaggaccaaaaaatcctactcttgttggaagagaaggagatgattttccgggacatggctgagtgcagcacccctctcccagaggattgctccccaacacatagccctagagttctcttccgctccaacacagaagaggctctcaaaggaggacctttaatgaaaagtgcaataaatgaggtggagatccttcagggtttggtgagtggaaatctgggaggcacacttgggccgactgtcagcagccccattgagcaagatgtggtcggtcccgtttccctgccccggagagcagagacctttggaggatttgacagccatcagatgaatgcttcaaaaggaggcgagaaggaagagggagatgatggccaagatcttaggagaacggaatcagatagtggcctaaaaaagggtggaaatgctaacctggtatttatgcttaaaagaaacagtgagcaggttgtccagagcgttgttcatctctacgagctcctcagcgctctgcagggtgtggtgctgcagcaggacagctacattgaggaccagaaactggtgctgagcgagagggcgctcactcgcagcttgtcccgcccgagctccctcattgagcaggagaagcagcgcagcctggagaagcagcgccaggacctggccaacctgcagaagcagcaggcccagtacctcgaggagaagcgcaggcgcgagcgtgagtgggaagctcgtgagagggagctgcgggagcgggaggccctcctggcccagcgcgaggaggaggtgcagcaggggcagcaggacctggaaaaggagcgggaggagctccagcagaagaagggcacataccagtatgacctggagcgactgcgtgctgcccagaaacagcttgagagggaacaggagcagctgcgccgggaggcagagcggctcagccagcggcagacagaacgggacctgtgtcaggtttcccatccacataccaagctgatgaggatcccatcgttcttccccagtcctgaggagcccccctcgccatctgcaccttccatagccaaatcagggtcattggactcagaactttcagtgtccccaaaaaggaacagcatctctcggacacacaaagataaggggccttttcacatactgagttcaaccagccagacaaacaaaggaccagaagggcagagccaggcccctgcgtccacctctgcctctacccgcctgtttgggttaacaaagccaaaggaaaagaaggagaaaaaaaagaagaacaaaaccagccgctctcagcccggtgatggtcccgcgtcagaagtatcagcagagggtgaagagatcttctgctgaccctcttcctctctgctgaggcagctgcctcctgatcctggccagcccacctctcctgctgtccccgcgtgcacaagtctcttacactggacgcccactgctcctcagcgtccagtcctcctgggcggccccaggtcctggacaataagcaacagatgatattgagtgtcgggtggggaaggaggcccagactctgcttcggccatgatttgtgactgcccaggactctcaggttgggctggccctactcaggattacactgaaagtaatggcctcgtaagtacaggtgatggttttggacacgtcaggaattcctaaaggctgaaagagtgtatccaagtaaggtctgaacctccgaatgccttttatttgggggaacacaaaaccaaacagcagatgttttggacttgatctgtgtacgtacatggggacctgtctgcatatacacacggggaatgccagaagaaggcccagtctgcaccaggcgtctggtcaacttagcacaagggcagtgcctggacggacccggagcccccgcatatcagcagttcacccagtactcctcagagactggtttccctctaaacccatcccgggcacataccacccgtgttttgcatgtatttctcatttcattttagggatgacaaacatttgtgaaaccagtgagagaaggcttgatgtgtataaaagacgtgatgtgcaccacctcgatctcggtgtttcaggcactaaagcaacaaaacaacccatagtatctcattctgtcatcagatccagaagaaatatcctggttttccagcatgtttacccacatgttttggccatggataaagtgaagaggcctactcaccattatccctgcagcgtgacaccttttgattgtcactgaccactcagaaggggccacggcctcctggctgtgttcctgagcccccgtcgtgcctctcccagacagcagctgtctggcccttgctgggtgagggcacaccactgccaggggtcagcctcgcacccaggccaggcagaagctgtgctctgaagctaggacagctggctgagaagtgggttcaggcgaagggtgaagccatgtgtagcagttcctgccagtgcagatctggagaggagctggcccggaaggcgtggttgtgaaagcgcccttcttatgttaggaggccttggcaaaattggatttcttcaaaaatacatgtaaaggtctgttgttgaattgtactctgcccctggaagcagatacagatggctgcctgctgctcggctttgcttttgcttttcccaccgtgttttcatctttgttcacttgaggctttccccagctggtgtgtgcaggacagttcatggtaatgttgccctctgaggccccgtacaccagaagggaggccctggaaaattttgtgcttccaacgtggccttcaattcttgcttttttgcccctcggaagcatggggcttttgagcacacttaaaaaaagaaaaatctgtaacttggtgcttattgatgaattgcaagctggccttgcagatggagatatttatctttcagtttatttgaaagaggtctggtttaaaatttgtagcctacatttgttttatttattgtatttgtgtgtttgtgtttgtttttttttaagggtgagccaggtctagcccaacagtctaaactatccagtcaataccgagtgaagtggcagccagcactgttcactctgtgtcttttgaagtgccttgaaggcccagatgaaattttaaagggagggggtccatgtccttccctcccccaccccgcctcattctttaatcaaaggatgtcttctcccttgtttgagaatgaagaaactcgccacctctgacctacctttgcctttttctgtcatggagaatactcacccttcagaaacagaccaaaggccaaaacctgctgatttttctattgaaaatatgtccccttgcaaagaccctaaacaaaaagttaagtttctttctttcacctatttgtacaactccaagttacagctgaatctgtcgtgactttcctgagatctacccggggcttggctgtctgttctgggcactggctccgagttcccctcctgggatttgcaggagggcagtactgaacctgcattcttctccttgtaaatgtaggccgggtgcccctgttctccgggtttggaacaatacgaggttggtgctgatgggatttacttgcgtacgtgctcttcacaaaaacaccgtggatgctgaagttagagcacgtcgccacagagcttgacatcaatgttagagggtctcttactccccgcccagctgtgatgtttcatctgctttggttgttttggtggtcttttttaaaaatagagatttcacatctgcccagaccccactcaaaacgatttggtcaggttctggttggacaagtttaaaatcaaagtagtgcccggaattccctcaaaccacccaacttcatccaggaatacagtctgcagtgcagcaacagaaccgcttaccaagaactgtgcttacatacctttgtcatctctcttccccccttggaagttgtcctcagggggatttgttcctgtcctggggatttacctgggatggtggctgcctgtgcttttgctcatggccttgacagtgctctagttgctggatctaatggcctgtcttggtttctatcacatgagaaggggttgtttttttggggtgactcggactgaattccccatactgtttccacgccgggacaccatgttctccatcaagctaaagaaatcacgtgcctgaaactgtgcttaagttttgggggaaagatggagttcctatccagagcccccagatttccagaatcgagtgagcttcctggaaggagactgcgtcttctctcaattccagtcatctcagtcgttgtcgttaggtgacatgtgcactttaaatgctctcatcggttggcttcattttcaagacaatcaaatgtattgactgtgttttcttcttagaaaatggagagggttaaaaacatgcaaactgccactttcaacctttgccagtattccctctacccccgtgagagctatctggggggaagaatccttaccaaggtttttttggaaaggtacgaatcttaacttttttccccttctgtgtctcagggtaatactattcagagtcgcccctttgctcattttctcccgtatttgttaccttcctgaggcctcagtattagtcgtgagcacaaagttttgagacctttggcgttgtttcttgatgtgggaggggaggtgttagtgcatgcaagggttgaactagatagaccctgccttagtagagggtgggactataaccttagaggccagaacttgatccagaagttgctgtccacagaagtgctttctatttcatcatttttgtttctagggctctttttctgtagccaggtcttcccaaggattttagtatttgcattggagttgaggtttactctaatgatggtggcccagctgtgcccagaggacagccaggcaggccctgggagggagtttagaaagacagtcctggtgaatgggcttcaagtggtcacaaagagggtggctgtgaggtgaccccagacactgcagaacgatgtgcaccctctgcgttttggatgtccttggaatgtgggagcctagaaataaccctgtggatggaattggggcagcggctgctggagatctgtgtgccttgccttccttcagcaggaccgtctaggtgcgcagccacctatggatgcgtcccagccagccccgtcgctctcgtccatcctcagagacaaagaagagggcagggagtttgggcttggttttgaactttcctttcaatgtagcaaagcattcctagttaaccagagccttggaatctactgcctgctggccaggctttaaaatgaaaagtgttttaatgctgccataaaagggaggcgggggggaggaagggaaaataaaggcatctttccaagtactcatctaatttaattgtcaaaagattgataggccatgaattacttctccatctcactaagggttaaaggcgtgcaaccccccactggctgtgtcccctgccaccgaagtgagtgacctgccctacaaccaggtgggaccacctgtgctgcagtccggaggggcttctgcaggaagcactcaccccccacaccttccccggcctgagcttcccctacctttcgtcaccacctgagggcatgagcacaggccatggggcgtgcctggtgagtctgcctgtggttcaggcttagcctgtggtctcctgtgtgctgctgcccgcatgggatgcgcaggggaggcgtggggatccgcaggagggtggttgggatacaccggatacctctgctctcattgcttgtttgcaaatgctctatggacatttgtgtgctaaatcctattaaataaaaaagacgggttaaaacccagatgctgtatattcatttgtaattatgtataaagtgaagcagttttaaactgtaaagatttttttcagtgtgttttctcgaattttgccacaacatactggcttcgtattttatttatctttctttctagttaccagcttcagacccttgtaaagtctccctcagccctttcaaaaaataataaatttcctgtgaagtt

SEQ ID NO: 424 - DNA, 13129 bp, Homo sapiens
  source 1..13129: mol_type = unassigned DNA
aaattattagaaaagcagcctcctattgaaggtgattgtgttgttacagtgctgcttgctgaagaggacaaagctgaagatgatgtagtgttttacttggtatttttgggttccaccctccgtcactgtacaagtactcggaaggtcagttctgatacattggagaccattgctcctggtcatgattgttgtgaaacagtgaaggtgcagctctgtgcttccaaagagggccttcccgtgtttgtggtggctgaagaagactttcatttcgtccaggatgaagcgtatgatgcagctcaattcctagcaaccagtgctggaaatcagcaggctttgaactttacccgttttcttgaccagtcaggacccccatctggggatgtgaattcccttgataagaagttggtgctggcattcaggcacctgaagctgcccacggagtggaatgtattggggacagatcagagtttgcatgatgctggcccgcgagagacattgatgcattttgctgtgcggctgggactgctgaggttgacgtggttcctgttgcagaagccaggtggccgcggagctctcagtatccacaaccaggaaggggcgacgcctgtgagcttggccttggagcgaggctatcacaagctgcaccagcttctaaccgaggagaatgctggagaaccagactcctggagcagtttatcctatgaaataccgtatggagactgttctgtgaggcatcatcgagagttggacatctatacattaacctctgagtctgattcacatcatgaacacccatttcctggagacggttgcactggaccaatttttaaacttatgaacatccaacagcaactaatgaaaacaaacctcaagcagatggacagtcttatgcccttaatgatgacagcacaggatccttccagtgccccagagacagatggccagtttcttccctgtgcaccggagcccacggaccctcagcgactttcttcttctgaagagactgagagcactcagtgctgcccagggagccctgttgcacagactgaaagtccctgtgatttgtcaagcatagttgaggaggagaatacagaccgttcctgtaggaagaaaaataaaggcgtggaaagaaaaggggaagaggtggagccagcacctattgtggactctggaactgtatctgatcaagacagctgccttcagagcttgcctgattgtggagtaaagggcacggaaggcctttcgtcctgtggaaacagaaatgaagaaactggaacaaaatcttctggaatgcccacagaccaggagtccctgagcagtggagatgctgtgcttcagagagacttggtcatggagccaggcacagcccagtattcctctggaggtgaactgggaggcatttcaacaacaaatgtcagtaccccagacactgcaggggaaatggaacatgggctcatgaacccagatgccactgtttggaagaatgtgcttcagggaggggaaagtacaaaggaaagatttgagaactctaatattggcacagctggagcctctgacgtgcacgtcacaagtaagcctgtggataaaatcagtgttccaaactgtgcccctgctgccagttccctggatggtaacaaacctgctgagtcttcacttgcatttagtaatgaagaaacctccactgaaaaaacagcagaaacggaaacttcacgaagtcgtgaggagagtgctgatgctccagtagatcagaattctgtggtgattccagctgctgcaaaagacaagatttcagatggattagaaccttatactctcttagcagcaggcataggtgaggcaatgtcaccctcagatttagcccttcttgggctggaagaagatgtaatgccacaccagaactcagaaacaaattcatctcatgctcaaagccaaaagggcaaatcctcacccatttgttctacaactggagacgataaactttgtgcagactctgcatgtcaacagaacacagtgacttctagtggcgatttggttgcaaaactgtgtgataacatagttagcgagtccgaaagcaccacagcaaggcaacccagctcacaagatccacccgatgcctcccactgtgaagacccacaggctcatacagtcacctctgaccctgtaagggatacccaggaacgtgcggatttttgtcctttcaaagtggtggataacaaaggccaacgaaaagatgtgaaactagataaacctttaacaaatatgcttgaggtggtttcacatccacatccagttgtccctaaaatggagaaagaactggtgccagaccaggcagtaatatcagacagtactttctctctggcaaacagtccaggcagtgaatcagtaaccaaggatgacgcactttcttttgtcccctcccagaaagaaaagggaacagcaactcctgaactacatacagctacagattatagagatggcccagatggaaattcgaatgagcctgatacgcggccactagaagacagggcagtaggcctgtccacatcctccactgctgcagagcttcagcacgggatggggaataccagtctcacaggacttggtggagagcatgagggtcccgcccctccagcaatcccagaagctctgaatatcaaggggaacactgactcttccctgcaaagtgtgggtaaggccactttggctttagattcagttttgactgaagaaggaaaacttctggtggtttcagaaagctctgcagctcaggaacaagataaggataaagcggtgacctgttcctctattaaggaaaatgctctctcttcaggaactttgcaggaagagcagagaacaccacctcctggacaagatactcaacaatttcatgaaaaatcaatctcagctgactgtgccaaggacaaagcacttcagctaagtaattcaccgggtgcatcctctgcctttcttaaggcagaaactgaacataacaaggaagtggccccacaagtctcactgctgactcaaggtggggctgcccagagcctggtgccaccaggagcaagtctggccacagagtcaaggcaggaagccttgggggcagagcacaacagctccgctctgttgccatgtctgttgccagatgggtctgatgggtccgatgctcttaactgcagtcagccttctcctctggatgttggagtgaagaacactcaatcccagggaaaaactagtgcctgtgaggtgagtggagatgtgacggtggatgttacaggggttaatgctctacaaggtatggctgagcccagaagagagaatatatcacacaacacccaagacatcctgattccaaacgtcttgttgagccaagagaagaatgccgttctaggtttgccagtggctctacaggacaaagctgtgactgacccacagggagttggaaccccagagatgatacctcttgattgggagaaagggaagctggagggagcagaccacagctgtaccatgggtgacgctgaggaagcccaaatagacgatgaagcacatcctgtcctactgcagcctgttgccaaggagctccccacagacatggagctctcagcccatgatgatggggccccagctggtgtgagggaagtcatgcgagccccgccttcaggcagggaaaggagcactccctctctaccttgcatggtctctgcccaggacgcacctctgcctaagggggcagacttgatagaggaggctgccagccgtatagtggatgctgtcatcgaacaagtcaaggccgctggagcactgcttactgagggggaggcctgtcacatgtcactgtccagccctgagttgggtcctctcactaaaggactagagagtgcttttacagaaaaagtgagtactttcccacctggggagagcctaccaatgggcagtactcctgaggaagccacggggagccttgcaggatgttttgctggaagggaggagccagagaagatcattttacctgtccaggggcctgagccagcagcagaaatgccagacgtgaaagctgaagatgaagtggattttagagcaagttcaatttctgaagaagtggctgtagggagcatagctgctacactgaagatgaagcaaggcccaatgacccaggcgataaaccgagaaaactggtgtacaatagagccatgccctgatgcagcatctcttctggcttccaagcagagcccagaatgtgagaacttcctggatgttggactgggcagagagtgtacctcaaaacaaggtgtacttaaaagagaatctgggagtgattctgacctctttcactcacccagtgatgacatggacagcatcatcttcccaaagccagaggaagagcatttggcctgtgatatcaccggatccagttcatccaccgatgacacggcttcactggaccgacattcttctcatggcagtgatgtgtctctctcccagattttaaagccaaacaggtcaagagatcggcaaagccttgatggattctacagccatgggatgggagctgagggtcgagaaagtgagagtgagcctgctgacccaggcgacgtggaggaggaggagatggacagtatcactgaagtgcctgcaaactgctctgtcctaaggagctccatgcgctctctttctcccttccggaggcacagctgggggcctgggaaaaatgcagccagcgatgcagaaatgaaccaccggagtatgagctggtgcccctctggtgtgcagtactctgctggcctgagtgctgactttaattacagaagtttcagtctagaaggcttgacaggaggagctggtgtcggaaacaagccatcctcatctctagaagtaagctctgcaaatgccgaagagctcagacacccattcagtggtgaggaacgggttgactctttggtgtcactttcagaagaggatctggagtcagaccagagagaacataggatgtttgatcagcagatatgtcacagatctaagcagcagggatttaattactgtacatcagccatttcctctccattgacaaaatccatctcattaatgacaatcagccatcctggattggacaattcacggcccttccacagtaccttccacaataccagtgctaatctgactgagagtataacagaagagaactataatttcctgccacatagcccctccaagaaagattctgaatggaagagtggaacaaaagtcagtcgtacattcagctacatcaagaataaaatgtctagcagcaagaagagcaaagaaaaggaaaaagaaaaagataagattaaggagaaggagaaagattctaaagacaaggagaaagataagaagactgtcaacgggcacactttcagttccattcctgttgtgggtcccatcagctgtagccagtgtatgaagcccttcaccaacaaagatgcctatacttgtgcaaattgcagtgcttttgtccacaaaggctgccgagaaagtctagcctcctgtgcaaaggtcaaaatgaagcagcccaaagggagccttcaggcacatgacacatcatcactgcccacggtcattatgagaaacaagccctcacagcccaaggagcgtcctcggtccgcagtcctcctggtggatgaaaccgctaccaccccaatatttgccaatagacgatcccagcagagtgtctcgctctccaaaagtgtctccatacagaacattactggagttggcaatgatgagaacatgtcaaacacctggaaattcctgtctcattcaacagactcactaaataaaatcagcaaggtcaatgagtcaacagaatcacttactgatgagggagtaggtacagacatgaatgaaggacaactactgggagactttgagattgagtccaaacagctggaagcagagtcttggagtcggataatagacagcaagtttctaaaacagcaaaagaaagatgtggtcaaacggcaagaagtaatatatgagttgatgcagacagagtttcatcatgtccgcactctcaagatcatgagtggtgtgtacagccaggggatgatggcggatctgctttttgagcagcagatggtagaaaagctgttcccctgtttggatgagctgatcagtatccatagccaattcttccagaggattctggagcggaagaaggagtctctggtggataaaagtgaaaagaactttctcatcaagaggataggggatgtgcttgtaaatcagttttcaggtgagaatgcagaacgtttaaagaagacatatggcaagttttgtgggcaacataaccagtctgtaaactacttcaaagacctttatgccaaggataagcgttttcaagcctttgtaaagaagaagatgagcagttcagttgttagaaggcttggaattccagagtgcatattgcttgtaactcagcggattaccaagtacccagttttattccaaagaatattgcagtgtaccaaagacaatgaagtggagcaggaagatctagcacagtccttgagcctggtgaaggatgtgattggagctgtagacagcaaagtggcaagttatgaaaagaaagtgcgtctcaatgagatttatacaaagacagatagcaagtcaatcatgaggatgaagagtggtcagatgtttgccaaggaagatttgaaacggaagaagcttgtacgtgatgggagtgtgtttctgaagaatgcagcaggaaggttgaaagaggttcaagcagttcttctcactgacattttagttttccttcaagaaaaagaccagaagtacatctttgcatcattggaccagaagtcaacagtgatctctttaaagaagctgattgtgagagaagtggcacatgaggagaaaggtttattcctgatcagcatggggatgacagatccagagatggtagaagtccatgccagctccaaagaggaacgaaacagctggattcagatcattcaggacacaatcaacaccctgaacagagatgaagatgaaggaattcctagtgagaatgaggaagaaaagaaaatgttggacaccagagcccgagaattaaaagaacaacttcaccagaaggaccaaaaaatcctactcttgttggaagagaaggagatgattttccgggacatggctgagtgcagcacccctctcccagaggattgctccccaacacatagccctagagttctcttccgctccaacacagaagaggctctcaaaggaggacctttaatgaaaagtgcaataaatgaggtggagatccttcagggtttggtgagtggaaatctgggaggcacacttgggccgactgtcagcagccccattgagcaagatgtggtcggtcccgtttccctgccccggagagcagagacctttggaggatttgacagccatcagatgaatgcttcaaaaggaggcgagaaggaagagggagatgatggccaagatcttaggagaacggaatcagatagtggcctaaaaaagggtggaaatgctaacctggtatttatgcttaaaagaaacagtgagcaggttgtccagagcgttgttcatctctacgagctcctcagcgctctgcagggtgtggtgctgcagcaggacagctacattgaggaccagaaactggtgctgagcgagagggcgctcactcgcagcttgtcccgcccgagctccctcattgagcaggagaagcagcgcagcctggagaagcagcgccaggacctggccaacctgcagaagcagcaggcccagtacctcgaggagaagcgcaggcgcgagcgtgagtgggaagctcgtgagagggagctgcgggagcgggaggccctcctggcccagcgcgaggaggaggtgcagcaggggcagcaggacctggaaaaggagcgggaggagctccagcagaagaagggcacataccagtatgacctggagcgactgcgtgctgcccagaaacagcttgagagggaacaggagcagctgcgccgggaggcagagcggctcagccagcggcagacagaacgggacctgtgtcaggtttcccatccacataccaagctgatgaggatcccatcgttcttccccagtcctgaggagcccccctcgccatctgcaccttccatagccaaatcagggtcattggactcagaactttcagtgtccccaaaaaggaacagcatctctcggacacacaaagataaggggccttttcacatactgagttcaaccagccagacaaacaaaggaccagaagggcagagccaggcccctgcgtccacctctgcctctacccgcctgtttgggttaacaaagccaaaggaaaagaaggagaaaaaaaagaagaacaaaaccagccgctctcagcccggtgatggtcccgcgtcagaagtatcagcagagggtgaagagatcttctgctgaccctcttcctctctgctgaggcagctgcctcctgatcctggccagcccacctctcctgctgtccccgcgtgcacaagtctcttacactggacgcccactgctcctcagcgtccagtcctcctgggcggccccaggtcctggacaataagcaacagatgatattgagtgtcgggtggggaaggaggcccagactctgcttcggccatgatttgtgactgcccaggactctcaggttgggctggccctactcaggattacactgaaagtaatggcctcgtaagtacaggtgatggttttggacacgtcaggaattcctaaaggctgaaagagtgtatccaagtaaggtctgaacctccgaatgccttttatttgggggaacacaaaaccaaacagcagatgttttggacttgatctgtgtacgtacatggggacctgtctgcatatacacacggggaatgccagaagaaggcccagtctgcaccaggcgtctggtcaacttagcacaagggcagtgcctggacggacccggagcccccgcatatcagcagttcacccagtactcctcagagactggtttccctctaaacccatcccgggcacataccacccgtgttttgcatgtatttctcatttcattttagggatgacaaacatttgtgaaaccagtgagagaaggcttgatgtgtataaaagacgtgatgtgcaccacctcgatctcggtgtttcaggcactaaagcaacaaaacaacccatagtatctcattctgtcatcagatccagaagaaatatcctggttttccagcatgtttacccacatgttttggccatggataaagtgaagaggcctactcaccattatccctgcagcgtgacaccttttgattgtcactgaccactcagaaggggccacggcctcctggctgtgttcctgagcccccgtcgtgcctctcccagacagcagctgtctggcccttgctgggtgagggcacaccactgccaggggtcagcctcgcacccaggccaggcagaagctgtgctctgaagctaggacagctggctgagaagtgggttcaggcgaagggtgaagccatgtgtagcagttcctgccagtgcagatctggagaggagctggcccggaaggcgtggttgtgaaagcgcccttcttatgttaggaggccttggcaaaattggatttcttcaaaaatacatgtaaaggtctgttgttgaattgtactctgcccctggaagcagatacagatggctgcctgctgctcggctttgcttttgcttttcccaccgtgttttcatctttgttcacttgaggctttccccagctggtgtgtgcaggacagttcatggtaatgttgccctctgaggccccgtacaccagaagggaggccctggaaaattttgtgcttccaacgtggccttcaattcttgcttttttgcccctcggaagcatggggcttttgagcacacttaaaaaaagaaaaatctgtaacttggtgcttattgatgaattgcaagctggccttgcagatggagatatttatctttcagtttatttgaaagaggtctggtttaaaatttgtagcctacatttgttttatttattgtatttgtgtgtttgtgtttgtttttttttaagggtgagccaggtctagcccaacagtctaaactatccagtcaataccgagtgaagtggcagccagcactgttcactctgtgtcttttgaagtgccttgaaggcccagatgaaattttaaagggagggggtccatgtccttccctcccccaccccgcctcattctttaatcaaaggatgtcttctcccttgtttgagaatgaagaaactcgccacctctgacctacctttgcctttttctgtcatggagaatactcacccttcagaaacagaccaaaggccaaaacctgctgatttttctattgaaaatatgtccccttgcaaagaccctaaacaaaaagttaagtttctttctttcacctatttgtacaactccaagttacagctgaatctgtcgtgactttcctgagatctacccggggcttggctgtctgttctgggcactggctccgagttcccctcctgggatttgcaggagggcagtactgaacctgcattcttctccttgtaaatgtaggccgggtgcccctgttctccgggtttggaacaatacgaggttggtgctgatgggatttacttgcgtacgtgctcttcacaaaaacaccgtggatgctgaagttagagcacgtcgccacagagcttgacatcaatgttagagggtctcttactccccgcccagctgtgatgtttcatctgctttggttgttttggtggtcttttttaaaaatagagatttcacatctgcccagaccccactcaaaacgatttggtcaggttctggttggacaagtttaaaatcaaagtagtgcccggaattccctcaaaccacccaacttcatccaggaatacagtctgcagtgcagcaacagaaccgcttaccaagaactgtgcttacatacctttgtcatctctcttccccccttggaagttgtcctcagggggatttgttcctgtcctggggatttacctgggatggtggctgcctgtgcttttgctcatggccttgacagtgctctagttgctggatctaatggcctgtcttggtttctatcacatgagaaggggttgtttttttggggtgactcggactgaattccccatactgtttccacgccgggacaccatgttctccatcaagctaaagaaatcacgtgcctgaaactgtgcttaagttttgggggaaagatggagttcctatccagagcccccagatttccagaatcgagtgagcttcctggaaggagactgcgtcttctctcaattccagtcatctcagtcgttgtcgttaggtgacatgtgcactttaaatgctctcatcggttggcttcattttcaagacaatcaaatgtattgactgtgttttcttcttagaaaatggagagggttaaaaacatgcaaactgccactttcaacctttgccagtattccctctacccccgtgagagctatctggggggaagaatccttaccaaggtttttttggaaaggtacgaatcttaacttttttccccttctgtgtctcagggtaatactattcagagtcgcccctttgctcattttctcccgtatttgttaccttcctgaggcctcagtattagtcgtgagcacaaagttttgagacctttggcgttgtttcttgatgtgggaggggaggtgttagtgcatgcaagggttgaactagatagaccctgccttagtagagggtgggactataaccttagaggccagaacttgatccagaagttgctgtccacagaagtgctttctatttcatcatttttgtttctagggctctttttctgtagccaggtcttcccaaggattttagtatttgcattggagttgaggtttactctaatgatggtggcccagctgtgcccagaggacagccaggcaggccctgggagggagtttagaaagacagtcctggtgaatgggcttcaagtggtcacaaagagggtggctgtgaggtgaccccagacactgcagaacgatgtgcaccctctgcgttttggatgtccttggaatgtgggagcctagaaataaccctgtggatggaattggggcagcggctgctggagatctgtgtgccttgccttccttcagcaggaccgtctaggtgcgcagccacctatggatgcgtcccagccagccccgtcgctctcgtccatcctcagagacaaagaagagggcagggagtttgggcttggttttgaactttcctttcaatgtagcaaagcattcctagttaaccagagccttggaatctactgcctgctggccaggctttaaaatgaaaagtgttttaatgctgccataaaagggaggcgggggggaggaagggaaaataaaggcatctttccaagtactcatctaatttaattgtcaaaagattgataggccatgaattacttctccatctcactaagggttaaaggcgtgcaaccccccactggctgtgtcccctgccaccgaagtgagtgacctgccctacaaccaggtgggaccacctgtgctgcagtccggaggggcttctgcaggaagcactcaccccccacaccttccccggcctgagcttcccctacctttcgtcaccacctgagggcatgagcacaggccatggggcgtgcctggtgagtctgcctgtggttcaggcttagcctgtggtctcctgtgtgctgctgcccgcatgggatgcgcaggggaggcgtggggatccgcaggagggtggttgggatacaccggatacctctgctctcattgcttgtttgcaaatgctctatggacatttgtgtgctaaatcctattaaataaaaaagacgggttaaaacccagatgctgtatattcatttgtaattatgtataaagtgaagcagttttaaactgtaaagatttttttcagtgtgttttctcgaattttgccacaacatactggcttcgtattttatttatctttctttctagttaccagcttcagacccttgtaaagtctccctcagccctttcaaaaaataataaatttcctgtgaagtt

SEQ ID NO: 425 - DNA, 13215 bp, Homo sapiens
  source 1..13215: mol_type = unassigned DNA
gagcggccgcctattgtctttctccgcggcgaaggtgaagagttgtcccagctcggcccgcgggggagccccgggagccgcacgtgtcctgggtcatgaaacttaatccacagcaagctcccttatatggtgattgtgttgttacagtgctgcttgctgaagaggacaaagctgaagatgatgtagtgttttacttggtatttttgggttccaccctccgtcactgtacaagtactcggaaggtcagttctgatacattggagaccattgctcctggtcatgattgttgtgaaacagtgaaggtgcagctctgtgcttccaaagagggccttcccgtgtttgtggtggctgaagaagactttcatttcgtccaggatgaagcgtatgatgcagctcaattcctagcaaccagtgctggaaatcagcaggctttgaactttacccgttttcttgaccagtcaggacccccatctggggatgtgaattcccttgataagaagttggtgctggcattcaggcacctgaagctgcccacggagtggaatgtattggggacagatcagagtttgcatgatgctggcccgcgagagacattgatgcattttgctgtgcggctgggactgctgaggttgacgtggttcctgttgcagaagccaggtggccgcggagctctcagtatccacaaccaggaaggggcgacgcctgtgagcttggccttggagcgaggctatcacaagctgcaccagcttctaaccgaggagaatgctggagaaccagactcctggagcagtttatcctatgaaataccgtatggagactgttctgtgaggcatcatcgagagttggacatctatacattaacctctgagtctgattcacatcatgaacacccatttcctggagacggttgcactggaccaatttttaaacttatgaacatccaacagcaactaatgaaaacaaacctcaagcagatggacagtcttatgcccttaatgatgacagcacaggatccttccagtgccccagagacagatggccagtttcttccctgtgcaccggagcccacggaccctcagcgactttcttcttctgaagagactgagagcactcagtgctgcccagggagccctgttgcacagactgaaagtccctgtgatttgtcaagcatagttgaggaggagaatacagaccgttcctgtaggaagaaaaataaaggcgtggaaagaaaaggggaagaggtggagccagcacctattgtggactctggaactgtatctgatcaagacagctgccttcagagcttgcctgattgtggagtaaagggcacggaaggcctttcgtcctgtggaaacagaaatgaagaaactggaacaaaatcttctggaatgcccacagaccaggagtccctgagcagtggagatgctgtgcttcagagagacttggtcatggagccaggcacagcccagtattcctctggaggtgaactgggaggcatttcaacaacaaatgtcagtaccccagacactgcaggggaaatggaacatgggctcatgaacccagatgccactgtttggaagaatgtgcttcagggaggggaaagtacaaaggaaagatttgagaactctaatattggcacagctggagcctctgacgtgcacgtcacaagtaagcctgtggataaaatcagtgttccaaactgtgcccctgctgccagttccctggatggtaacaaacctgctgagtcttcacttgcatttagtaatgaagaaacctccactgaaaaaacagcagaaacggaaacttcacgaagtcgtgaggagagtgctgatgctccagtagatcagaattctgtggtgattccagctgctgcaaaagacaagatttcagatggattagaaccttatactctcttagcagcaggcataggtgaggcaatgtcaccctcagatttagcccttcttgggctggaagaagatgtaatgccacaccagaactcagaaacaaattcatctcatgctcaaagccaaaagggcaaatcctcacccatttgttctacaactggagacgataaactttgtgcagactctgcatgtcaacagaacacagtgacttctagtggcgatttggttgcaaaactgtgtgataacatagttagcgagtccgaaagcaccacagcaaggcaacccagctcacaagatccacccgatgcctcccactgtgaagacccacaggctcatacagtcacctctgaccctgtaagggatacccaggaacgtgcggatttttgtcctttcaaagtggtggataacaaaggccaacgaaaagatgtgaaactagataaacctttaacaaatatgcttgaggtggtttcacatccacatccagttgtccctaaaatggagaaagaactggtgccagaccaggcagtaatatcagacagtactttctctctggcaaacagtccaggcagtgaatcagtaaccaaggatgacgcactttcttttgtcccctcccagaaagaaaagggaacagcaactcctgaactacatacagctacagattatagagatggcccagatggaaattcgaatgagcctgatacgcggccactagaagacagggcagtaggcctgtccacatcctccactgctgcagagcttcagcacgggatggggaataccagtctcacaggacttggtggagagcatgagggtcccgcccctccagcaatcccagaagctctgaatatcaaggggaacactgactcttccctgcaaagtgtgggtaaggccactttggctttagattcagttttgactgaagaaggaaaacttctggtggtttcagaaagctctgcagctcaggaacaagataaggataaagcggtgacctgttcctctattaaggaaaatgctctctcttcaggaactttgcaggaagagcagagaacaccacctcctggacaagatactcaacaatttcatgaaaaatcaatctcagctgactgtgccaaggacaaagcacttcagctaagtaattcaccgggtgcatcctctgcctttcttaaggcagaaactgaacataacaaggaagtggccccacaagtctcactgctgactcaaggtggggctgcccagagcctggtgccaccaggagcaagtctggccacagagtcaaggcaggaagccttgggggcagagcacaacagctccgctctgttgccatgtctgttgccagatgggtctgatgggtccgatgctcttaactgcagtcagccttctcctctggatgttggagtgaagaacactcaatcccagggaaaaactagtgcctgtgaggtgagtggagatgtgacggtggatgttacaggggttaatgctctacaaggtatggctgagcccagaagagagaatatatcacacaacacccaagacatcctgattccaaacgtcttgttgagccaagagaagaatgccgttctaggtttgccagtggctctacaggacaaagctgtgactgacccacagggagttggaaccccagagatgatacctcttgattgggagaaagggaagctggagggagcagaccacagctgtaccatgggtgacgctgaggaagcccaaatagacgatgaagcacatcctgtcctactgcagcctgttgccaaggagctccccacagacatggagctctcagcccatgatgatggggccccagctggtgtgagggaagtcatgcgagccccgccttcaggcagggaaaggagcactccctctctaccttgcatggtctctgcccaggacgcacctctgcctaagggggcagacttgatagaggaggctgccagccgtatagtggatgctgtcatcgaacaagtcaaggccgctggagcactgcttactgagggggaggcctgtcacatgtcactgtccagccctgagttgggtcctctcactaaaggactagagagtgcttttacagaaaaagtgagtactttcccacctggggagagcctaccaatgggcagtactcctgaggaagccacggggagccttgcaggatgttttgctggaagggaggagccagagaagatcattttacctgtccaggggcctgagccagcagcagaaatgccagacgtgaaagctgaagatgaagtggattttagagcaagttcaatttctgaagaagtggctgtagggagcatagctgctacactgaagatgaagcaaggcccaatgacccaggcgataaaccgagaaaactggtgtacaatagagccatgccctgatgcagcatctcttctggcttccaagcagagcccagaatgtgagaacttcctggatgttggactgggcagagagtgtacctcaaaacaaggtgtacttaaaagagaatctgggagtgattctgacctctttcactcacccagtgatgacatggacagcatcatcttcccaaagccagaggaagagcatttggcctgtgatatcaccggatccagttcatccaccgatgacacggcttcactggaccgacattcttctcatggcagtgatgtgtctctctcccagattttaaagccaaacaggtcaagagatcggcaaagccttgatggattctacagccatgggatgggagctgagggtcgagaaagtgagagtgagcctgctgacccaggcgacgtggaggaggaggagatggacagtatcactgaagtgcctgcaaactgctctgtcctaaggagctccatgcgctctctttctcccttccggaggcacagctgggggcctgggaaaaatgcagccagcgatgcagaaatgaaccaccggagttcaatgcgagttcttggggatgttgtcaggagacctcccattcataggagaagtttcagtctagaaggcttgacaggaggagctggtgtcggaaacaagccatcctcatctctagaagtaagctctgcaaatgccgaagagctcagacacccattcagtggtgaggaacgggttgactctttggtgtcactttcagaagaggatctggagtcagaccagagagaacataggatgtttgatcagcagatatgtcacagatctaagcagcagggatttaattactgtacatcagccatttcctctccattgacaaaatccatctcattaatgacaatcagccatcctggattggacaattcacggcccttccacagtaccttccacaataccagtgctaatctgactgagagtataacagaagagaactataatttcctgccacatagcccctccaagaaagattctgaatggaagagtggaacaaaagtcagtcgtacattcagctacatcaagaataaaatgtctagcagcaagaagagcaaagaaaaggaaaaagaaaaagataagattaaggagaaggagaaagattctaaagacaaggagaaagataagaagactgtcaacgggcacactttcagttccattcctgttgtgggtcccatcagctgtagccagtgtatgaagcccttcaccaacaaagatgcctatacttgtgcaaattgcagtgcttttgtccacaaaggctgccgagaaagtctagcctcctgtgcaaaggtcaaaatgaagcagcccaaagggagccttcaggcacatgacacatcatcactgcccacggtcattatgagaaacaagccctcacagcccaaggagcgtcctcggtccgcagtcctcctggtggatgaaaccgctaccaccccaatatttgccaatagacgatcccagcagagtgtctcgctctccaaaagtgtctccatacagaacattactggagttggcaatgatgagaacatgtcaaacacctggaaattcctgtctcattcaacagactcactaaataaaatcagcaaggtcaatgagtcaacagaatcacttactgatgagggagtaggtacagacatgaatgaaggacaactactgggagactttgagattgagtccaaacagctggaagcagagtcttggagtcggataatagacagcaagtttctaaaacagcaaaagaaagatgtggtcaaacggcaagaagtaatatatgagttgatgcagacagagtttcatcatgtccgcactctcaagatcatgagtggtgtgtacagccaggggatgatggcggatctgctttttgagcagcagatggtagaaaagctgttcccctgtttggatgagctgatcagtatccatagccaattcttccagaggattctggagcggaagaaggagtctctggtggataaaagtgaaaagaactttctcatcaagaggataggggatgtgcttgtaaatcagttttcaggtgagaatgcagaacgtttaaagaagacatatggcaagttttgtgggcaacataaccagtctgtaaactacttcaaagacctttatgccaaggataagcgttttcaagcctttgtaaagaagaagatgagcagttcagttgttagaaggcttggaattccagagtgcatattgcttgtaactcagcggattaccaagtacccagttttattccaaagaatattgcagtgtaccaaagacaatgaagtggagcaggaagatctagcacagtccttgagcctggtgaaggatgtgattggagctgtagacagcaaagtggcaagttatgaaaagaaagtgcgtctcaatgagatttatacaaagacagatagcaagtcaatcatgaggatgaagagtggtcagatgtttgccaaggaagatttgaaacggaagaagcttgtacgtgatgggagtgtgtttctgaagaatgcagcaggaaggttgaaagaggttcaagcagttcttctcactgacattttagttttccttcaagaaaaagaccagaagtacatctttgcatcattggaccagaagtcaacagtgatctctttaaagaagctgattgtgagagaagtggcacatgaggagaaaggtttattcctgatcagcatggggatgacagatccagagatggtagaagtccatgccagctccaaagaggaacgaaacagctggattcagatcattcaggacacaatcaacaccctgaacagagatgaagatgaaggaattcctagtgagaatgaggaagaaaagaaaatgttggacaccagagcccgagaattaaaagaacaacttcaccagaaggaccaaaaaatcctactcttgttggaagagaaggagatgattttccgggacatggctgagtgcagcacccctctcccagaggattgctccccaacacatagccctagagttctcttccgctccaacacagaagaggctctcaaaggaggacctttaatgaaaagtgcaataaatgaggtggagatccttcagggtttggtgagtggaaatctgggaggcacacttgggccgactgtcagcagccccattgagcaagatgtggtcggtcccgtttccctgccccggagagcagagacctttggaggatttgacagccatcagatgaatgcttcaaaaggaggcgagaaggaagagggagatgatggccaagatcttaggagaacggaatcagatagtggcctaaaaaagggtggaaatgctaacctggtatttatgcttaaaagaaacagtgagcaggttgtccagagcgttgttcatctctacgagctcctcagcgctctgcagggtgtggtgctgcagcaggacagctacattgaggaccagaaactggtgctgagcgagagggcgctcactcgcagcttgtcccgcccgagctccctcattgagcaggagaagcagcgcagcctggagaagcagcgccaggacctggccaacctgcagaagcagcaggcccagtacctcgaggagaagcgcaggcgcgagcgtgagtgggaagctcgtgagagggagctgcgggagcgggaggccctcctggcccagcgcgaggaggaggtgcagcaggggcagcaggacctggaaaaggagcgggaggagctccagcagaagaagggcacataccagtatgacctggagcgactgcgtgctgcccagaaacagcttgagagggaacaggagcagctgcgccgggaggcagagcggctcagccagcggcagacagaacgggacctgtgtcaggtttcccatccacataccaagctgatgaggatcccatcgttcttccccagtcctgaggagcccccctcgccatctgcaccttccatagccaaatcagggtcattggactcagaactttcagtgtccccaaaaaggaacagcatctctcggacacacaaagataaggggccttttcacatactgagttcaaccagccagacaaacaaaggaccagaagggcagagccaggcccctgcgtccacctctgcctctacccgcctgtttgggttaacaaagccaaaggaaaagaaggagaaaaaaaagaagaacaaaaccagccgctctcagcccggtgatggtcccgcgtcagaagtatcagcagagggtgaagagatcttctgctgaccctcttcctctctgctgaggcagctgcctcctgatcctggccagcccacctctcctgctgtccccgcgtgcacaagtctcttacactggacgcccactgctcctcagcgtccagtcctcctgggcggccccaggtcctggacaataagcaacagatgatattgagtgtcgggtggggaaggaggcccagactctgcttcggccatgatttgtgactgcccaggactctcaggttgggctggccctactcaggattacactgaaagtaatggcctcgtaagtacaggtgatggttttggacacgtcaggaattcctaaaggctgaaagagtgtatccaagtaaggtctgaacctccgaatgccttttatttgggggaacacaaaaccaaacagcagatgttttggacttgatctgtgtacgtacatggggacctgtctgcatatacacacggggaatgccagaagaaggcccagtctgcaccaggcgtctggtcaacttagcacaagggcagtgcctggacggacccggagcccccgcatatcagcagttcacccagtactcctcagagactggtttccctctaaacccatcccgggcacataccacccgtgttttgcatgtatttctcatttcattttagggatgacaaacatttgtgaaaccagtgagagaaggcttgatgtgtataaaagacgtgatgtgcaccacctcgatctcggtgtttcaggcactaaagcaacaaaacaacccatagtatctcattctgtcatcagatccagaagaaatatcctggttttccagcatgtttacccacatgttttggccatggataaagtgaagaggcctactcaccattatccctgcagcgtgacaccttttgattgtcactgaccactcagaaggggccacggcctcctggctgtgttcctgagcccccgtcgtgcctctcccagacagcagctgtctggcccttgctgggtgagggcacaccactgccaggggtcagcctcgcacccaggccaggcagaagctgtgctctgaagctaggacagctggctgagaagtgggttcaggcgaagggtgaagccatgtgtagcagttcctgccagtgcagatctggagaggagctggcccggaaggcgtggttgtgaaagcgcccttcttatgttaggaggccttggcaaaattggatttcttcaaaaatacatgtaaaggtctgttgttgaattgtactctgcccctggaagcagatacagatggctgcctgctgctcggctttgcttttgcttttcccaccgtgttttcatctttgttcacttgaggctttccccagctggtgtgtgcaggacagttcatggtaatgttgccctctgaggccccgtacaccagaagggaggccctggaaaattttgtgcttccaacgtggccttcaattcttgcttttttgcccctcggaagcatggggcttttgagcacacttaaaaaaagaaaaatctgtaacttggtgcttattgatgaattgcaagctggccttgcagatggagatatttatctttcagtttatttgaaagaggtctggtttaaaatttgtagcctacatttgttttatttattgtatttgtgtgtttgtgtttgtttttttttaagggtgagccaggtctagcccaacagtctaaactatccagtcaataccgagtgaagtggcagccagcactgttcactctgtgtcttttgaagtgccttgaaggcccagatgaaattttaaagggagggggtccatgtccttccctcccccaccccgcctcattctttaatcaaaggatgtcttctcccttgtttgagaatgaagaaactcgccacctctgacctacctttgcctttttctgtcatggagaatactcacccttcagaaacagaccaaaggccaaaacctgctgatttttctattgaaaatatgtccccttgcaaagaccctaaacaaaaagttaagtttctttctttcacctatttgtacaactccaagttacagctgaatctgtcgtgactttcctgagatctacccggggcttggctgtctgttctgggcactggctccgagttcccctcctgggatttgcaggagggcagtactgaacctgcattcttctccttgtaaatgtaggccgggtgcccctgttctccgggtttggaacaatacgaggttggtgctgatgggatttacttgcgtacgtgctcttcacaaaaacaccgtggatgctgaagttagagcacgtcgccacagagcttgacatcaatgttagagggtctcttactccccgcccagctgtgatgtttcatctgctttggttgttttggtggtcttttttaaaaatagagatttcacatctgcccagaccccactcaaaacgatttggtcaggttctggttggacaagtttaaaatcaaagtagtgcccggaattccctcaaaccacccaacttcatccaggaatacagtctgcagtgcagcaacagaaccgcttaccaagaactgtgcttacatacctttgtcatctctcttccccccttggaagttgtcctcagggggatttgttcctgtcctggggatttacctgggatggtggctgcctgtgcttttgctcatggccttgacagtgctctagttgctggatctaatggcctgtcttggtttctatcacatgagaaggggttgtttttttggggtgactcggactgaattccccatactgtttccacgccgggacaccatgttctccatcaagctaaagaaatcacgtgcctgaaactgtgcttaagttttgggggaaagatggagttcctatccagagcccccagatttccagaatcgagtgagcttcctggaaggagactgcgtcttctctcaattccagtcatctcagtcgttgtcgttaggtgacatgtgcactttaaatgctctcatcggttggcttcattttcaagacaatcaaatgtattgactgtgttttcttcttagaaaatggagagggttaaaaacatgcaaactgccactttcaacctttgccagtattccctctacccccgtgagagctatctggggggaagaatccttaccaaggtttttttggaaaggtacgaatcttaacttttttccccttctgtgtctcagggtaatactattcagagtcgcccctttgctcattttctcccgtatttgttaccttcctgaggcctcagtattagtcgtgagcacaaagttttgagacctttggcgttgtttcttgatgtgggaggggaggtgttagtgcatgcaagggttgaactagatagaccctgccttagtagagggtgggactataaccttagaggccagaacttgatccagaagttgctgtccacagaagtgctttctatttcatcatttttgtttctagggctctttttctgtagccaggtcttcccaaggattttagtatttgcattggagttgaggtttactctaatgatggtggcccagctgtgcccagaggacagccaggcaggccctgggagggagtttagaaagacagtcctggtgaatgggcttcaagtggtcacaaagagggtggctgtgaggtgaccccagacactgcagaacgatgtgcaccctctgcgttttggatgtccttggaatgtgggagcctagaaataaccctgtggatggaattggggcagcggctgctggagatctgtgtgccttgccttccttcagcaggaccgtctaggtgcgcagccacctatggatgcgtcccagccagccccgtcgctctcgtccatcctcagagacaaagaagagggcagggagtttgggcttggttttgaactttcctttcaatgtagcaaagcattcctagttaaccagagccttggaatctactgcctgctggccaggctttaaaatgaaaagtgttttaatgctgccataaaagggaggcgggggggaggaagggaaaataaaggcatctttccaagtactcatctaatttaattgtcaaaagattgataggccatgaattacttctccatctcactaagggttaaaggcgtgcaaccccccactggctgtgtcccctgccaccgaagtgagtgacctgccctacaaccaggtgggaccacctgtgctgcagtccggaggggcttctgcaggaagcactcaccccccacaccttccccggcctgagcttcccctacctttcgtcaccacctgagggcatgagcacaggccatggggcgtgcctggtgagtctgcctgtggttcaggcttagcctgtggtctcctgtgtgctgctgcccgcatgggatgcgcaggggaggcgtggggatccgcaggagggtggttgggatacaccggatacctctgctctcattgcttgtttgcaaatgctctatggacatttgtgtgctaaatcctattaaataaaaaagacgggttaaaacccagatgctgtatattcatttgtaattatgtataaagtgaagcagttttaaactgtaaagatttttttcagtgtgttttctcgaattttgccacaacatactggcttcgtattttatttatctttctttctagttaccagcttcagacccttgtaaagtctccctcagccctttcaaaaaataataaatttcctgtgaagtt

SEQ ID NO: 426 - DNA, 10125 bp, Homo sapiens
  source 1..10125: mol_type = unassigned DNA
gcggctaaagcggcggcaaccgaggcgagcagtgggcacggcggtctcggccgagccgagggccttcaccgctgctgctccggctccgcgacagctctgcgggagcggccgcctattgtctttctccgcggcgaaggtgaagagttgtcccagctcggcccgcgggggagccccgggagccgcacgtgtcctgggtcatgaaacttaatccacagcaagctcccttatatggtgattgtgttgttacagtgctgcttgctgaagaggacaaagctgaagatgatgtagtgttttacttggtatttttgggttccaccctccgtcactgtacaagtactcggaaggtcagttctgatacattggagaccattgctcctggtcatgattgttgtgaaacagtgaaggtgcagctctgtgcttccaaagagggccttcccgtgtttgtggtggctgaagaagactttcatttcgtccaggatgaagcgtatgatgcagctcaattcctagcaaccagtgctggaaatcagcaggctttgaactttacccgttttcttgaccagtcaggacccccatctggggatgtgaattcccttgataagaagttggtgctggcattcaggcacctgaagctgcccacggagtggaatgtattggggacagatcagagtttgcatgatgctggcccgcgagagacattgatgcattttgctgtgcggctgggactgctgaggttgacgtggttcctgttgcagaagccaggtggccgcggagctctcagtatccacaaccaggaaggggcgacgcctgtgagcttggccttggagcgaggctatcacaagctgcaccagcttctaaccgaggagaatgctggagaaccagactcctggagcagtttatcctatgaaataccgtatggagactgttctgtgaggcatcatcgagagttggacatctatacattaacctctgagtctgattcacatcatgaacacccatttcctggagacggttgcactggaccaatttttaaacttatgaacatccaacagcaactaatgaaaacaaacctcaagcagatggacagtcttatgcccttaatgatgacagcacaggatccttccagtgccccagagacagatggccagtttcttccctgtgcaccggagcccacggaccctcagcgactttcttcttctgaagagactgagagcactcagtgctgcccagggagccctgttgcacagactgaaagtccctgtgatttgtcaagcatagttgaggaggagaatacagaccgttcctgtaggaagaaaaataaaggcgtggaaagaaaaggggaagaggtggagccagcacctattgtggactctggaactgtatctgatcaagacagctgccttcagagcttgcctgattgtggagtaaagggcacggaaggcctttcgtcctgtggaaacagaaatgaagaaactggaacaaaatcttctggaatgcccacagaccaggagtccctgagcagtggagatgctgtgcttcagagagacttggtcatggagccaggcacagcccagtattcctctggaggtgaactgggaggcatttcaacaacaaatgtcagtaccccagacactgcaggggaaatggaacatgggctcatgaacccagatgccactgtttggaagaatgtgcttcagggaggggaaagtacaaaggaaagatttgagaactctaatattggcacagctggagcctctgacgtgcacgtcacaagtaagcctgtggataaaatcagtgttccaaactgtgcccctgctgccagttccctggatggtaacaaacctgctgagtcttcacttgcatttagtaatgaagaaacctccactgaaaaaacagcagaaacggaaacttcacgaagtcgtgaggagagtgctgatgctccagtagatcagaattctgtggtgattccagctgctgcaaaagacaagatttcagatggattagaaccttatactctcttagcagcaggcataggtgaggcaatgtcaccctcagatttagcccttcttgggctggaagaagatgtaatgccacaccagaactcagaaacaaattcatctcatgctcaaagccaaaagggcaaatcctcacccatttgttctacaactggagacgataaactttgtgcagactctgcatgtcaacagaacacagtgacttctagtggcgatttggttgcaaaactgtgtgataacatagttagcgagtccgaaagcaccacagcaaggcaacccagctcacaagatccacccgatgcctcccactgtgaagacccacaggctcatacagtcacctctgaccctgtaagggatacccaggaacgtgcggatttttgtcctttcaaagtggtggataacaaaggccaacgaaaagatgtgaaactagataaacctttaacaaatatgcttgaggtggtttcacatccacatccagttgtccctaaaatggagaaagaactggtgccagaccaggcagtaatatcagacagtactttctctctggcaaacagtccaggcagtgaatcagtaaccaaggatgacgcactttcttttgtcccctcccagaaagaaaagggaacagcaactcctgaactacatacagctacagattatagagatggcccagatggaaattcgaatgagcctgatacgcggccactagaagacagggcagtaggcctgtccacatcctccactgctgcagagcttcagcacgggatggggaataccagtctcacaggacttggtggagagcatgagggtcccgcccctccagcaatcccagaagctctgaatatcaaggggaacactgactcttccctgcaaagtgtgggtaaggccactttggctttagattcagttttgactgaagaaggaaaacttctggtggtttcagaaagctctgcagctcaggaacaagataaggataaagcggtgacctgttcctctattaaggaaaatgctctctcttcaggaactttgcaggaagagcagagaacaccacctcctggacaagatactcaacaatttcatgaaaaatcaatctcagctgactgtgccaaggacaaagcacttcagctaagtaattcaccgggtgcatcctctgcctttcttaaggcagaaactgaacataacaaggaagtggccccacaagtctcactgctgactcaaggtggggctgcccagagcctggtgccaccaggagcaagtctggccacagagtcaaggcaggaagccttgggggcagagcacaacagctccgctctgttgccatgtctgttgccagatgggtctgatgggtccgatgctcttaactgcagtcagccttctcctctggatgttggagtgaagaacactcaatcccagggaaaaactagtgcctgtgaggtgagtggagatgtgacggtggatgttacaggggttaatgctctacaaggtatggctgagcccagaagagagaatatatcacacaacacccaagacatcctgattccaaacgtcttgttgagccaagagaagaatgccgttctaggtttgccagtggctctacaggacaaagctgtgactgacccacagggagttggaaccccagagatgatacctcttgattgggagaaagggaagctggagggagcagaccacagctgtaccatgggtgacgctgaggaagcccaaatagacgatgaagcacatcctgtcctactgcagcctgttgccaaggagctccccacagacatggagctctcagcccatgatgatggggccccagctggtgtgagggaagtcatgcgagccccgccttcaggcagggaaaggagcactccctctctaccttgcatggtctctgcccaggacgcacctctgcctaagggggcagacttgatagaggaggctgccagccgtatagtggatgctgtcatcgaacaagtcaaggccgctggagcactgcttactgagggggaggcctgtcacatgtcactgtccagccctgagttgggtcctctcactaaaggactagagagtgcttttacagaaaaagtgagtactttcccacctggggagagcctaccaatgggcagtactcctgaggaagccacggggagccttgcaggatgttttgctggaagggaggagccagagaagatcattttacctgtccaggggcctgagccagcagcagaaatgccagacgtgaaagctgaagatgaagtggattttagagcaagttcaatttctgaagaagtggctgtagggagcatagctgctacactgaagatgaagcaaggcccaatgacccaggcgataaaccgagaaaactggtgtacaatagagccatgccctgatgcagcatctcttctggcttccaagcagagcccagaatgtgagaacttcctggatgttggactgggcagagagtgtacctcaaaacaaggtgtacttaaaagagaatctgggagtgattctgacctctttcactcacccagtgatgacatggacagcatcatcttcccaaagccagaggaagagcatttggcctgtgatatcaccggatccagttcatccaccgatgacacggcttcactggaccgacattcttctcatggcagtgatgtgtctctctcccagattttaaagccaaacaggtcaagagatcggcaaagccttgatggattctacagccatgggatgggagctgagggtcgagaaagtgagagtgagcctgctgacccaggcgacgtggaggaggaggagatggacagtatcactgaagtgcctgcaaactgctctgtcctaaggagctccatgcgctctctttctcccttccggaggcacagctgggggcctgggaaaaatgcagccagcgatgcagaaatgaaccaccggagttcaatgcgagttcttggggatgttgtcaggagacctcccattcataggagaagtttcagtctagaaggcttgacaggaggagctggtgtcggaaacaagccatcctcatctctagaagtaagctctgcaaatgccgaagagctcagacacccattcagtggtgaggaacgggttgactctttggtgtcactttcagaagaggatctggagtcagaccagagagaacataggatgtttgatcagcagatatgtcacagatctaagcagcagggatttaattactgtacatcagccatttcctctccattgacaaaatccatctcattaatgacaatcagccatcctggattggacaattcacggcccttccacagtaccttccacaataccagtgctaatctgactgagagtataacagaagagaactataatttcctgccacatagcccctccaagaaagattctgaatggaagagtggaacaaaagtcagtcgtacattcagctacatcaagaataaaatgtctagcagcaagaagagcaaagaaaaggaaaaagaaaaagataagattaaggagaaggagaaagattctaaagacaaggagaaagataagaagactgtcaacgggcacactttcagttccattcctgttgtgggtcccatcagctgtagccagtgtatgaagcccttcaccaacaaagatgcctatacttgtgcaaattgcagtgcttttgtccacaaaggctgccgagaaagtctagcctcctgtgcaaaggtcaaaatgaagcagcccaaagggagccttcaggcacatgacacatcatcactgcccacggtcattatgagaaacaagccctcacagcccaaggagcgtcctcggtccgcagtcctcctggtggatgaaaccgctaccaccccaatatttgccaatagacgatcccagcagagtgtctcgctctccaaaagtgtctccatacagaacattactggagttggcaatgatgagaacatgtcaaacacctggaaattcctgtctcattcaacagactcactaaataaaatcagcaaggtcaatgagtcaacagaatcacttactgatgagggtacagacatgaatgaaggacaactactgggagactttgagattgagtccaaacagctggaagcagagtcttggagtcggataatagacagcaagtttctaaaacagcaaaagaaagatgtggtcaaacggcaagaagtaatatatgagttgatgcagacagagtttcatcatgtccgcactctcaagatcatgagtggtgtgtacagccaggggatgatggcggatctgctttttgagcagcagatggtagaaaagctgttcccctgtttggatgagctgatcagtatccatagccaattcttccagaggattctggagcggaagaaggagtctctggtggataaaagtgaaaagaactttctcatcaagaggataggggatgtgcttgtaaatcagttttcaggtgagaatgcagaacgtttaaagaagacatatggcaagttttgtgggcaacataaccagtctgtaaactacttcaaagacctttatgccaaggataagcgttttcaagcctttgtaaagaagaagatgagcagttcagttgttagaaggcttggaattccagagtgcatattgcttgtaactcagcggattaccaagtacccagttttattccaaagaatattgcagtgtaccaaagacaatgaagtggagcaggaagatctagcacagtccttgagcctggtgaaggatgtgattggagctgtagacagcaaagtggcaagttatgaaaagaaagtgcgtctcaatgagatttatacaaagacagatagcaagtcaatcatgaggatgaagagtggtcagatgtttgccaaggaagatttgaaacggaagaagcttgtacgtgatgggagtgtgtttctgaagaatgcagcaggaaggttgaaagaggttcaagcagttcttctcactgacattttagttttccttcaagaaaaagaccagaagtacatctttgcatcattggaccagaagtcaacagtgatctctttaaagaagctgattgtgagagaagtggcacatgaggagaaaggtttattcctgatcagcatggggatgacagatccagagatggtagaagtccatgccagctccaaagaggaacgaaacagctggattcagatcattcaggacacaatcaacaccctgaacagagatgaagatgaaggaattcctagtgagaatgaggaagaaaagaaaatgttggacaccagagcccgagaattaaaagaacaacttcaccagaaggaccaaaaaatcctactcttgttggaagagaaggagatgattttccgggacatggctgagtgcagcacccctctcccagaggattgctccccaacacatagccctagagttctcttccgctccaacacagaagaggctctcaaaggaggacctttaatgaaaagtgcaataaatgaggtggagatccttcagggtttggtgagtggaaatctgggaggcacacttgggccgactgtcagcagccccattgagcaagatgtggtcggtcccgtttccctgccccggagagcagagacctttggaggatttgacagccatcagatgaatgcttcaaaaggaggcgagaaggaagagggagatgatggccaagatcttaggagaacggaatcagatagtggcctaaaaaagggtggaaatgctaacctggtatttatgcttaaaagaaacagtgagcaggttgtccagagcgttgttcatctctacgagctcctcagcgctctgcagggtgtggtgctgcagcaggacagctacattgaggaccagaaactggtgctgagcgagagggcgctcactcgcagcttgtcccgcccgagctccctcattgagcaggagaagcagcgcagcctggagaagcagcgccaggacctggccaacctgcagaagcagcaggcccagtacctcgaggagaagcgcaggcgcgagcgtgagtgggaagctcgtgagagggagctgcgggagcgggaggccctcctggcccagcgcgaggaggaggtgcagcaggggcagcaggacctggaaaaggagcgggaggagctccagcagaagaagggcacataccagtatgacctggagcgactgcgtgctgcccagaaacagcttgagagggaacaggagcagctgcgccgggaggcagagcggctcagccagcggcagacagaacgggacctgtgtcaggtttcccatccacataccaagctgatgaggatcccatcgttcttccccagtcctgaggagcccccctcgccatctgcaccttccatagccaaatcagggtcattggactcagaactttcagtgtccccaaaaaggaacagcatctctcggacacacaaagataaggggccttttcacatactgagttcaaccagccagacaaacaaaggaccagaagggcagagccaggcccctgcgtccacctctgcctctacccgcctgtttgggttaacaaagccaaaggaaaagaaggagaaaaaaaagaagaacaaaaccagccgctctcagcccggtgatggtcccgcgtcagaagtatcagcagagggtgaagagatcttctgctgaccctcttcctctctgctgaggcagctgcctcctgatcctggccagcccacctctcctgctgtccccgcgtgcacaagtctcttacactggacgcccactgctcctcagcgtccagtcctcctgggcggccccaggtcctggacaataagcaacagatgatattgagtgtcgggtggggaaggaggcccagactctgcttcggccatgatttgtgactgcccaggactctcaggttgggctggccctactcaggattacactgaaagtaatggcctcgtaagtacaggtgatggttttggacacgtcaggaattcctaaaggctgaaagagtgtatccaagtaaggtctgaacctccgaatgccttttatttgggggaacacaaaaccaaacagcagatgttttggacttgatctgtgtacgtacatggggacctgtctgcatatacacacggggaatgccagaagaaggcccagtctgcaccaggcgtctggtcaacttagcacaagggcagtgcctggacggacccggagcccccgcatatcagcagttcacccagtactcctcagagactggtttccctctaaacccatcccgggcacataccacccgtgttttgcatgtatttctcatttcattttagggatgacaaacatttgtgaaaccagtgagagaaggcttgatgtgtataaaagacgtgatgtgcaccacctcgatctcggtgtttcaggcactaaagcaacaaaacaacccatagtatctcattctgtcatcagatccagaagaaatatcctggttttccagcatgtttacccacatgttttggccatggataaagtgaagaggcctactcaccattatccctgcagcgtgacaccttttgattgtcactgaccactcagaaggggccacggcctcctggctgtgttcctgagcccccgtcgtgcctctcccagacagcagctgtctggcccttgctgggtgagggcacaccactgccaggggtcagcctcgcacccaggccaggcagaagctgtgctctgaagctaggacagctggctgagaagtgggttcaggcgaagggtgaagccatgtgtagcagttcctgccagtgcagatctggagaggagctggcccggaaggcgtggttgtgaaagcgcccttcttatgttaggaggccttggcaaaattggatttcttcaaaaatacatgtaaaggtctgttgttgaattgtactctgcccctggaagcagatacagatggctgcctgctgctcggctttgcttttgcttttcccaccgtgttttcatctttgttcacttgaggctttccccagctggtgtgtgcaggacagttcatggtaatgttgccctctgaggccccgtacaccagaagggaggccctggaaaattttgtgcttccaacgtggccttcaattcttgcttttttgcccctcggaagcatggggcttttgagcacacttaaaaaaagaaa

SEQ ID NO: 427 - DNA, 5800 bp, Homo sapiens
  source 1..5800: mol_type = unassigned DNA
atgtatgaacggcacaagaggcgctacagcctctgtgacatctccaaggtggacaggactgtggacgtggtattgctgaagataaaccgagaaaactggtgtacaatagagccatgccctgatgcagcatctcttctggcttccaagcagagcccagaatgtgagaacttcctggatgttggactgggcagagagtgtacctcaaaacaaggtgtacttaaaagagaatctgggagtgattctgacctctttcactcacccagtgatgacatggacagcatcatcttcccaaagccagaggaagagcatttggcctgtgatatcaccggatccagttcatccaccgatgacacggcttcactggaccgacattcttctcatggcagtgatgtgtctctctcccagattttaaagccaaacaggtcaagagatcggcaaagccttgatggattctacagccatgggatgggagctgagggtcgagaaagtgagagtgagcctgctgacccaggcgacgtggaggaggaggagatggacagtatcactgaagtgcctgcaaactgctctgtcctaaggagctccatgcgctctctttctcccttccggaggcacagctgggggcctgggaaaaatgcagccagcgatgcagaaatgaaccaccggagtttcagtctagaaggcttgacaggaggagctggtgtcggaaacaagccatcctcatctctagaagtaagctctgcaaatgccgaagagctcagacacccattcagtggtgaggaacgggttgactctttggtgtcactttcagaagaggatctggagtcagaccagagagaacataggatgtttgatcagcagatatgtcacagatctaagcagcagggatttaattactgtacatcagccatttcctctccattgacaaaatccatctcattaatgacaatcagccatcctggattggacaattcacggcccttccacagtaccttccacaataccagtgctaatctgactgagagtataacagaagagaactataatttcctgccacatagcccctccaagaaagattctgaatggaagagtggaacaaaagtcagtcgtacattcagctacatcaagaataaaatgtctagcagcaagaagagcaaagaaaaggaaaaagaaaaagataagattaaggagaaggagaaagattctaaagacaaggagaaagataagaagactgtcaacgggcacactttcagttccattcctgttgtgggtcccatcagctgtagccagtgtatgaagcccttcaccaacaaagatgcctatacttgtgcaaattgcagtgcttttgtccacaaaggctgccgagaaagtctagcctcctgtgcaaaggtcaaaatgaagcagcccaaagggagccttcaggcacatgacacatcatcactgcccacggtcattatgagaaacaagccctcacagcccaaggagcgtcctcggtccgcagtcctcctggtggatgaaaccgctaccaccccaatatttgccaatagacgatcccagcagagtgtctcgctctccaaaagtgtctccatacagaacattactggagttggcaatgatgagaacatgtcaaacacctggaaattcctgtctcattcaacagactcactaaataaaatcagcaaggtcaatgagtcaacagaatcacttactgatgagggagtaggtacagacatgaatgaaggacaactactgggagactttgagattgagtccaaacagctggaagcagagtcttggagtcggataatagacagcaagtttctaaaacagcaaaagaaagatgtggtcaaacggcaagaagtaatatatgagttgatgcagacagagtttcatcatgtccgcactctcaagatcatgagtggtgtgtacagccaggggatgatggcggatctgctttttgagcagcagatggtagaaaagctgttcccctgtttggatgagctgatcagtatccatagccaattcttccagaggattctggagcggaagaaggagtctctggtggataaaagtgaaaagaactttctcatcaagaggataggggatgtgcttgtaaatcagttttcaggtgagaatgcagaacgtttaaagaagacatatggcaagttttgtgggcaacataaccagtctgtaaactacttcaaagacctttatgccaaggataagcgttttcaagcctttgtaaagaagaagatgagcagttcagttgttagaaggcttggaattccagagtgcatattgcttgtaactcagcggattaccaagtacccagttttattccaaagaatattgcagtgtaccaaagacaatgaagtggagcaggaagatctagcacagtccttgagcctggtgaaggatgtgattggagctgtagacagcaaagtggcaagttatgaaaagaaagtgcgtctcaatgagatttatacaaagacagatagcaagtcaatcatgaggatgaagagtggtcagatgtttgccaaggaagatttgaaacggaagaagcttgtacgtgatgggagtgtgtttctgaagaatgcagcaggaaggttgaaagaggttcaagcagttcttctcactgacattttagttttccttcaagaaaaagaccagaagtacatctttgcatcattggaccagaagtcaacagtgatctctttaaagaagctgattgtgagagaagtggcacatgaggagaaaggtttattcctgatcagcatggggatgacagatccagagatggtagaagtccatgccagctccaaagaggaacgaaacagctggattcagatcattcaggacacaatcaacaccctgaacagagatgaagatgaaggaattcctagtgagaatgaggaagaaaagaaaatgttggacaccagagcccgagaattaaaagaacaacttcaccagaaggaccaaaaaatcctactcttgttggaagagaaggagatgattttccgggacatggctgagtgcagcacccctctcccagaggattgctccccaacacatagccctagagttctcttccgctccaacacagaagaggctctcaaaggaggacctttaatgaaaagtgcaataaatgaggtggagatccttcagggtttggtgagtggaaatctgggaggcacacttgggccgactgtcagcagccccattgagcaagatgtggtcggtcccgtttccctgccccggagagcagagacctttggaggatttgacagccatcagatgaatgcttcaaaaggaggcgagaaggaagagggagatgatggccaagatcttaggagaacggaatcagatagtggcctaaaaaagggtggaaatgctaacctggtatttatgcttaaaagaaacagtgagcaggttgtccagagcgttgttcatctctacgagctcctcagcgctctgcagggtgtggtgctgcagcaggacagctacattgaggaccagaaactggtgctgagcgagagggcgctcactcgcagcttgtcccgcccgagctccctcattgagcaggagaagcagcgcagcctggagaagcagcgccaggacctggccaacctgcagaagcagcaggcccagtacctcgaggagaagcgcaggcgcgagcgtgagtgggaagctcgtgagagggagctgcgggagcgggaggccctcctggcccagcgcgaggaggaggtgcagcaggggcagcaggacctggaaaaggagcgggaggagctccagcagaagaagggcacataccagtatgacctggagcgactgcgtgctgcccagaaacagcttgagagggaacaggagcagctgcgccgggaggcagagcggctcagccagcggcagacagaacgggacctgtgtcaggtttcccatccacataccaagctgatgaggatcccatcgttcttccccagtcctgaggagcccccctcgccatctgcaccttccatagccaaatcagggtcattggactcagaactttcagtgtccccaaaaaggaacagcatctctcggacacacaaagataaggggccttttcacatactgagttcaaccagccagacaaacaaaggaccagaagggcagagccaggcccctgcgtccacctctgcctctacccgcctgtttgggttaacaaagccaaaggaaaagaaggagaaaaaaaagaagaacaaaaccagccgctctcagcccggtgatggtcccgcgtcagaagtatcagcagagggtgaagagatcttctgctgaccctcttcctctctgctgaggcagctgcctcctgatcctggccagcccacctctcctgctgtccccgcgtgcacaagtctcttacactggacgcccactgctcctcagcgtccagtcctcctgggcggccccaggtcctggacaataagcaacagatgatattgagtgtcgggtggggaaggaggcccagactctgcttcggccatgatttgtgactgcccaggactctcaggttgggctggccctactcaggattacactgaaagtaatggcctcgtaagtacaggtgatggttttggacacgtcaggaattcctaaaggctgaaagagtgtatccaagtaaggtctgaacctccgaatgccttttatttgggggaacacaaaaccaaacagcagatgttttggacttgatctgtgtacgtacatggggacctgtctgcatatacacacggggaatgccagaagaaggcccagtctgcaccaggcgtctggtcaacttagcacaagggcagtgcctggacggacccggagcccccgcatatcagcagttcacccagtactcctcagagactggtttccctctaaacccatcccgggcacataccacccgtgttttgcatgtatttctcatttcattttagggatgacaaacatttgtgaaaccagtgagagaaggcttgatgtgtataaaagacgtgatgtgcaccacctcgatctcggtgtttcaggcactaaagcaacaaaacaacccatagtatctcattctgtcatcagatccagaagaaatatcctggttttccagcatgtttacccacatgttttggccatggataaagtgaagaggcctactcaccattatccctgcagcgtgacaccttttgattgtcactgaccactcagaaggggccacggcctcctggctgtgttcctgagcccccgtcgtgcctctcccagacagcagctgtctggcccttgctgggtgagggcacaccactgccaggggtcagcctcgcacccaggccaggcagaagctgtgctctgaagctaggacagctggctgagaagtgggttcaggcgaagggtgaagccatgtgtagcagttcctgccagtgcagatctggagaggagctggcccggaaggcgtggttgtgaaagcgcccttcttatgttaggaggccttggcaaaattggatttcttcaaaaatacatgtaaaggtctgttgttgaattgtactctgcccctggaagcagatacagatggctgcctgctgctcggctttgcttttgcttttcccaccgtgttttcatctttgttcacttgaggctttccccagctggtgtgtgcaggacagttcatggtaatgttgccctctgaggccccgtacaccagaagggaggccctggaaaattttgtgcttccaacgtggccttcaattcttgcttttttgcccctcggaagcatggggcttttgagcacacttaaaaaaagaaa

SEQ ID NO: 428 - DNA, 13057 bp, Homo sapiens
  source 1..13057: mol_type = unassigned DNA
aaattattagaaaagcagcctcctattgaaggtgattgtgttgttacagtgctgcttgctgaagaggacaaagctgaagatgatgtagtgttttacttggtatttttgggttccaccctccgtcactgtacaagtactcggaaggtcagttctgatacattggagaccattgctcctggtcatgattgttgtgaaacagtgaaggtgcagctctgtgcttccaaagagggccttcccgtgtttgtggtggctgaagaagactttcatttcgtccaggatgaagcgtatgatgcagctcaattcctagcaaccagtgctggaaatcagcaggctttgaactttacccgttttcttgaccagtcaggacccccatctggggatgtgaattcccttgataagaagttggtgctggcattcaggcacctgaagctgcccacggagtggaatgtattggggacagatcagagtttgcatgatgctggcccgcgagagacattgatgcattttgctgtgcggctgggactgctgaggttgacgtggttcctgttgcagaagccaggtggccgcggagctctcagtatccacaaccaggaaggggcgacgcctgtgagcttggccttggagcgaggctatcacaagctgcaccagcttctaaccgaggagaatgctggagaaccagactcctggagcagtttatcctatgaaataccgtatggagactgttctgtgaggcatcatcgagagttggacatctatacattaacctctgagtctgattcacatcatgaacacccatttcctggagacggttgcactggaccaatttttaaacttatgaacatccaacagcaactaatgaaaacaaacctcaagcagatggacagtcttatgcccttaatgatgacagcacaggatccttccagtgccccagagacagatggccagtttcttccctgtgcaccggagcccacggaccctcagcgactttcttcttctgaagagactgagagcactcagtgctgcccagggagccctgttgcacagactgaaagtccctgtgatttgtcaagcatagttgaggaggagaatacagaccgttcctgtaggaagaaaaataaaggcgtggaaagaaaaggggaagaggtggagccagcacctattgtggactctggaactgtatctgatcaagacagctgccttcagagcttgcctgattgtggagtaaagggcacggaaggcctttcgtcctgtggaaacagaaatgaagaaactggaacaaaatcttctggaatgcccacagaccaggagtccctgagcagtggagatgctgtgcttcagagagacttggtcatggagccaggcacagcccagtattcctctggaggtgaactgggaggcatttcaacaacaaatgtcagtaccccagacactgcaggggaaatggaacatgggctcatgaacccagatgccactgtttggaagaatgtgcttcagggaggggaaagtacaaaggaaagatttgagaactctaatattggcacagctggagcctctgacgtgcacgtcacaagtaagcctgtggataaaatcagtgttccaaactgtgcccctgctgccagttccctggatggtaacaaacctgctgagtcttcacttgcatttagtaatgaagaaacctccactgaaaaaacagcagaaacggaaacttcacgaagtcgtgaggagagtgctgatgctccagtagatcagaattctgtggtgattccagctgctgcaaaagacaagatttcagatggattagaaccttatactctcttagcagcaggcataggtgaggcaatgtcaccctcagatttagcccttcttgggctggaagaagatgtaatgccacaccagaactcagaaacaaattcatctcatgctcaaagccaaaagggcaaatcctcacccatttgttctacaactggagacgataaactttgtgcagactctgcatgtcaacagaacacagtgacttctagtggcgatttggttgcaaaactgtgtgataacatagttagcgagtccgaaagcaccacagcaaggcaacccagctcacaagatccacccgatgcctcccactgtgaagacccacaggctcatacagtcacctctgaccctgtaagggatacccaggaacgtgcggatttttgtcctttcaaagtggtggataacaaaggccaacgaaaagatgtgaaactagataaacctttaacaaatatgcttgaggtggtttcacatccacatccagttgtccctaaaatggagaaagaactggtgccagaccaggcagtaatatcagacagtactttctctctggcaaacagtccaggcagtgaatcagtaaccaaggatgacgcactttcttttgtcccctcccagaaagaaaagggaacagcaactcctgaactacatacagctacagattatagagatggcccagatggaaattcgaatgagcctgatacgcggccactagaagacagggcagtaggcctgtccacatcctccactgctgcagagcttcagcacgggatggggaataccagtctcacaggacttggtggagagcatgagggtcccgcccctccagcaatcccagaagctctgaatatcaaggggaacactgactcttccctgcaaagtgtgggtaaggccactttggctttagattcagttttgactgaagaaggaaaacttctggtggtttcagaaagctctgcagctcaggaacaagataaggataaagcggtgacctgttcctctattaaggaaaatgctctctcttcaggaactttgcaggaagagcagagaacaccacctcctggacaagatactcaacaatttcatgaaaaatcaatctcagctgactgtgccaaggacaaagcacttcagctaagtaattcaccgggtgcatcctctgcctttcttaaggcagaaactgaacataacaaggaagtggccccacaagtctcactgctgactcaaggtggggctgcccagagcctggtgccaccaggagcaagtctggccacagagtcaaggcaggaagccttgggggcagagcacaacagctccgctctgttgccatgtctgttgccagatgggtctgatgggtccgatgctcttaactgcagtcagccttctcctctggatgttggagtgaagaacactcaatcccagggaaaaactagtgcctgtgaggtgagtggagatgtgacggtggatgttacaggggttaatgctctacaaggtatggctgagcccagaagagagaatatatcacacaacacccaagacatcctgattccaaacgtcttgttgagccaagagaagaatgccgttctaggtttgccagtggctctacaggacaaagctgtgactgacccacagggagttggaaccccagagatgatacctcttgattgggagaaagggaagctggagggagcagaccacagctgtaccatgggtgacgctgaggaagcccaaatagacgatgaagcacatcctgtcctactgcagcctgttgccaaggagctccccacagacatggagctctcagcccatgatgatggggccccagctggtgtgagggaagtcatgcgagccccgccttcaggcagggaaaggagcactccctctctaccttgcatggtctctgcccaggacgcacctctgcctaagggggcagacttgatagaggaggctgccagccgtatagtggatgctgtcatcgaacaagtcaaggccgctggagcactgcttactgagggggaggcctgtcacatgtcactgtccagccctgagttgggtcctctcactaaaggactagagagtgcttttacagaaaaagtgagtactttcccacctggggagagcctaccaatgggcagtactcctgaggaagccacggggagccttgcaggatgttttgctggaagggaggagccagagaagatcattttacctgtccaggggcctgagccagcagcagaaatgccagacgtgaaagctgaagatgaagtggattttagagcaagttcaatttctgaagaagtggctgtagggagcatagctgctacactgaagatgaagcaaggcccaatgacccaggcgataaaccgagaaaactggtgtacaatagagccatgccctgatgcagcatctcttctggcttccaagcagagcccagaatgtgagaacttcctggatgttggactgggcagagagtgtacctcaaaacaaggtgtacttaaaagagaatctgggagtgattctgacctctttcactcacccagtgatgacatggacagcatcatcttcccaaagccagaggaagagcatttggcctgtgatatcaccggatccagttcatccaccgatgacacggcttcactggaccgacattcttctcatggcagtgatgtgtctctctcccagattttaaagccaaacaggtcaagagatcggcaaagccttgatggattctacagccatgggatgggagctgagggtcgagaaagtgagagtgagcctgctgacccaggcgacgtggaggaggaggagatggacagtatcactgaagtgcctgcaaactgctctgtcctaaggagctccatgcgctctctttctcccttccggaggcacagctgggggcctgggaaaaatgcagccagcgatgcagaaatgaaccaccggagtttcagtctagaaggcttgacaggaggagctggtgtcggaaacaagccatcctcatctctagaagtaagctctgcaaatgccgaagagctcagacacccattcagtggtgaggaacgggttgactctttggtgtcactttcagaagaggatctggagtcagaccagagagaacataggatgtttgatcagcagatatgtcacagatctaagcagcagggatttaattactgtacatcagccatttcctctccattgacaaaatccatctcattaatgacaatcagccatcctggattggacaattcacggcccttccacagtaccttccacaataccagtgctaatctgactgagagtataacagaagagaactataatttcctgccacatagcccctccaagaaagattctgaatggaagagtggaacaaaagtcagtcgtacattcagctacatcaagaataaaatgtctagcagcaagaagagcaaagaaaaggaaaaagaaaaagataagattaaggagaaggagaaagattctaaagacaaggagaaagataagaagactgtcaacgggcacactttcagttccattcctgttgtgggtcccatcagctgtagccagtgtatgaagcccttcaccaacaaagatgcctatacttgtgcaaattgcagtgcttttgtccacaaaggctgccgagaaagtctagcctcctgtgcaaaggtcaaaatgaagcagcccaaagggagccttcaggcacatgacacatcatcactgcccacggtcattatgagaaacaagccctcacagcccaaggagcgtcctcggtccgcagtcctcctggtggatgaaaccgctaccaccccaatatttgccaatagacgatcccagcagagtgtctcgctctccaaaagtgtctccatacagaacattactggagttggcaatgatgagaacatgtcaaacacctggaaattcctgtctcattcaacagactcactaaataaaatcagcaaggtcaatgagtcaacagaatcacttactgatgagggtacagacatgaatgaaggacaactactgggagactttgagattgagtccaaacagctggaagcagagtcttggagtcggataatagacagcaagtttctaaaacagcaaaagaaagatgtggtcaaacggcaagaagtaatatatgagttgatgcagacagagtttcatcatgtccgcactctcaagatcatgagtggtgtgtacagccaggggatgatggcggatctgctttttgagcagcagatggtagaaaagctgttcccctgtttggatgagctgatcagtatccatagccaattcttccagaggattctggagcggaagaaggagtctctggtggataaaagtgaaaagaactttctcatcaagaggataggggatgtgcttgtaaatcagttttcaggtgagaatgcagaacgtttaaagaagacatatggcaagttttgtgggcaacataaccagtctgtaaactacttcaaagacctttatgccaaggataagcgttttcaagcctttgtaaagaagaagatgagcagttcagttgttagaaggcttggaattccagagtgcatattgcttgtaactcagcggattaccaagtacccagttttattccaaagaatattgcagtgtaccaaagacaatgaagtggagcaggaagatctagcacagtccttgagcctggtgaaggatgtgattggagctgtagacagcaaagtggcaagttatgaaaagaaagtgcgtctcaatgagatttatacaaagacagatagcaagtcaatcatgaggatgaagagtggtcagatgtttgccaaggaagatttgaaacggaagaagcttgtacgtgatgggagtgtgtttctgaagaatgcagcaggaaggttgaaagaggttcaagcagttcttctcactgacattttagttttccttcaagaaaaagaccagaagtacatctttgcatcattggaccagaagtcaacagtgatctctttaaagaagctgattgtgagagaagtggcacatgaggagaaaggtttattcctgatcagcatggggatgacagatccagagatggtagaagtccatgccagctccaaagaggaacgaaacagctggattcagatcattcaggacacaatcaacaccctgaacagagatgaagatgaaggaattcctagtgagaatgaggaagaaaagaaaatgttggacaccagagcccgagaattaaaagaacaacttcaccagaaggaccaaaaaatcctactcttgttggaagagaaggagatgattttccgggacatggctgagtgcagcacccctctcccagaggattgctccccaacacatagccctagagttctcttccgctccaacacagaagaggctctcaaaggaggacctttaatgaaaagtgcaataaatgaggtggagatccttcagggtttggtgagtggaaatctgggaggcacacttgggccgactgtcagcagccccattgagcaagatgtggtcggtcccgtttccctgccccggagagcagagacctttggaggatttgacagccatcagatgaatgcttcaaaaggaggcgagaaggaagagggagatgatggccaagatcttaggagaacggaatcagatagtggcctaaaaaagggtggaaatgctaacctggtatttatgcttaaaagaaacagtgagcaggttgtccagagcgttgttcatctctacgagctcctcagcgctctgcagggtgtggtgctgcagcaggacagctacattgaggaccagaaactggtgctgagcgagagggcgctcactcgcagcttgtcccgcccgagctccctcattgagcaggagaagcagcgcagcctggagaagcagcgccaggacctggccaacctgcagaagcagcaggcccagtacctcgaggagaagcgcaggcgcgagcgtgagtgggaagctcgtgagagggagctgcgggagcgggaggccctcctggcccagcgcgaggaggaggtgcagcaggggcagcaggacctggaaaaggagcgggaggagctccagcagaagaagggcacataccagtatgacctggagcgactgcgtgctgcccagaaacagcttgagagggaacaggagcagctgcgccgggaggcagagcggctcagccagcggcagacagaacgggacctgtgtcaggtttcccatccacataccaagctgatgaggatcccatcgttcttccccagtcctgaggagcccccctcgccatctgcaccttccatagccaaatcagggtcattggactcagaactttcagtgtccccaaaaaggaacagcatctctcggacacacaaagataaggggccttttcacatactgagttcaaccagccagacaaacaaaggaccagaagggcagagccaggcccctgcgtccacctctgcctctacccgcctgtttgggttaacaaagccaaaggaaaagaaggagaaaaaaaagaagaacaaaaccagccgctctcagcccggtgatggtcccgcgtcagaagtatcagcagagggtgaagagatcttctgctgaccctcttcctctctgctgaggcagctgcctcctgatcctggccagcccacctctcctgctgtccccgcgtgcacaagtctcttacactggacgcccactgctcctcagcgtccagtcctcctgggcggccccaggtcctggacaataagcaacagatgatattgagtgtcgggtggggaaggaggcccagactctgcttcggccatgatttgtgactgcccaggactctcaggttgggctggccctactcaggattacactgaaagtaatggcctcgtaagtacaggtgatggttttggacacgtcaggaattcctaaaggctgaaagagtgtatccaagtaaggtctgaacctccgaatgccttttatttgggggaacacaaaaccaaacagcagatgttttggacttgatctgtgtacgtacatggggacctgtctgcatatacacacggggaatgccagaagaaggcccagtctgcaccaggcgtctggtcaacttagcacaagggcagtgcctggacggacccggagcccccgcatatcagcagttcacccagtactcctcagagactggtttccctctaaacccatcccgggcacataccacccgtgttttgcatgtatttctcatttcattttagggatgacaaacatttgtgaaaccagtgagagaaggcttgatgtgtataaaagacgtgatgtgcaccacctcgatctcggtgtttcaggcactaaagcaacaaaacaacccatagtatctcattctgtcatcagatccagaagaaatatcctggttttccagcatgtttacccacatgttttggccatggataaagtgaagaggcctactcaccattatccctgcagcgtgacaccttttgattgtcactgaccactcagaaggggccacggcctcctggctgtgttcctgagcccccgtcgtgcctctcccagacagcagctgtctggcccttgctgggtgagggcacaccactgccaggggtcagcctcgcacccaggccaggcagaagctgtgctctgaagctaggacagctggctgagaagtgggttcaggcgaagggtgaagccatgtgtagcagttcctgccagtgcagatctggagaggagctggcccggaaggcgtggttgtgaaagcgcccttcttatgttaggaggccttggcaaaattggatttcttcaaaaatacatgtaaaggtctgttgttgaattgtactctgcccctggaagcagatacagatggctgcctgctgctcggctttgcttttgcttttcccaccgtgttttcatctttgttcacttgaggctttccccagctggtgtgtgcaggacagttcatggtaatgttgccctctgaggccccgtacaccagaagggaggccctggaaaattttgtgcttccaacgtggccttcaattcttgcttttttgcccctcggaagcatggggcttttgagcacacttaaaaaaagaaaaatctgtaacttggtgcttattgatgaattgcaagctggccttgcagatggagatatttatctttcagtttatttgaaagaggtctggtttaaaatttgtagcctacatttgttttatttattgtatttgtgtgtttgtgtttgtttttttttaagggtgagccaggtctagcccaacagtctaaactatccagtcaataccgagtgaagtggcagccagcactgttcactctgtgtcttttgaagtgccttgaaggcccagatgaaattttaaagggagggggtccatgtccttccctcccccaccccgcctcattctttaatcaaaggatgtcttctcccttgtttgagaatgaagaaactcgccacctctgacctacctttgcctttttctgtcatggagaatactcacccttcagaaacagaccaaaggccaaaacctgctgatttttctattgaaaatatgtccccttgcaaagaccctaaacaaaaagttaagtttctttctttcacctatttgtacaactccaagttacagctgaatctgtcgtgactttcctgagatctacccggggcttggctgtctgttctgggcactggctccgagttcccctcctgggatttgcaggagggcagtactgaacctgcattcttctccttgtaaatgtaggccgggtgcccctgttctccgggtttggaacaatacgaggttggtgctgatgggatttacttgcgtacgtgctcttcacaaaaacaccgtggatgctgaagttagagcacgtcgccacagagcttgacatcaatgttagagggtctcttactccccgcccagctgtgatgtttcatctgctttggttgttttggtggtcttttttaaaaatagagatttcacatctgcccagaccccactcaaaacgatttggtcaggttctggttggacaagtttaaaatcaaagtagtgcccggaattccctcaaaccacccaacttcatccaggaatacagtctgcagtgcagcaacagaaccgcttaccaagaactgtgcttacatacctttgtcatctctcttccccccttggaagttgtcctcagggggatttgttcctgtcctggggatttacctgggatggtggctgcctgtgcttttgctcatggccttgacagtgctctagttgctggatctaatggcctgtcttggtttctatcacatgagaaggggttgtttttttggggtgactcggactgaattccccatactgtttccacgccgggacaccatgttctccatcaagctaaagaaatcacgtgcctgaaactgtgcttaagttttgggggaaagatggagttcctatccagagcccccagatttccagaatcgagtgagcttcctggaaggagactgcgtcttctctcaattccagtcatctcagtcgttgtcgttaggtgacatgtgcactttaaatgctctcatcggttggcttcattttcaagacaatcaaatgtattgactgtgttttcttcttagaaaatggagagggttaaaaacatgcaaactgccactttcaacctttgccagtattccctctacccccgtgagagctatctggggggaagaatccttaccaaggtttttttggaaaggtacgaatcttaacttttttccccttctgtgtctcagggtaatactattcagagtcgcccctttgctcattttctcccgtatttgttaccttcctgaggcctcagtattagtcgtgagcacaaagttttgagacctttggcgttgtttcttgatgtgggaggggaggtgttagtgcatgcaagggttgaactagatagaccctgccttagtagagggtgggactataaccttagaggccagaacttgatccagaagttgctgtccacagaagtgctttctatttcatcatttttgtttctagggctctttttctgtagccaggtcttcccaaggattttagtatttgcattggagttgaggtttactctaatgatggtggcccagctgtgcccagaggacagccaggcaggccctgggagggagtttagaaagacagtcctggtgaatgggcttcaagtggtcacaaagagggtggctgtgaggtgaccccagacactgcagaacgatgtgcaccctctgcgttttggatgtccttggaatgtgggagcctagaaataaccctgtggatggaattggggcagcggctgctggagatctgtgtgccttgccttccttcagcaggaccgtctaggtgcgcagccacctatggatgcgtcccagccagccccgtcgctctcgtccatcctcagagacaaagaagagggcagggagtttgggcttggttttgaactttcctttcaatgtagcaaagcattcctagttaaccagagccttggaatctactgcctgctggccaggctttaaaatgaaaagtgttttaatgctgccataaaagggaggcgggggggaggaagggaaaataaaggcatctttccaagtactcatctaatttaattgtcaaaagattgataggccatgaattacttctccatctcactaagggttaaaggcgtgcaaccccccactggctgtgtcccctgccaccgaagtgagtgacctgccctacaaccaggtgggaccacctgtgctgcagtccggaggggcttctgcaggaagcactcaccccccacaccttccccggcctgagcttcccctacctttcgtcaccacctgagggcatgagcacaggccatggggcgtgcctggtgagtctgcctgtggttcaggcttagcctgtggtctcctgtgtgctgctgcccgcatgggatgcgcaggggaggcgtggggatccgcaggagggtggttgggatacaccggatacctctgctctcattgcttgtttgcaaatgctctatggacatttgtgtgctaaatcctattaaataaaaaagacgggttaaaacccagatgctgtatattcatttgtaattatgtataaagtgaagcagttttaaactgtaaagatttttttcagtgtgttttctcgaattttgccacaacatactggcttcgtattttatttatctttctttctagttaccagcttcagacccttgtaaagtctccctcagccctttcaaaaaataataaatttcctgtgaagtt

SEQ ID NO: 429 - DNA, 5459 bp, Homo sapiens
  source 1..5459: mol_type = unassigned DNA
tgcgcggactggagctgtgtgcagggccagcgcggagcccgagcagccgcggtgaagcgcctgtgctctgccgagactgccgtgcccattgctcgcctcggtcgccgccgctttagccgcctccgggggagcggccgcctattgtctttctccgcggcgaaggtgaagagttgtcccagctcggcccgcgggggagccccgggagccgcacgtgtcctgggtcatgaaacttaatccacagcaagctcccttatatggtgattgtgttgttacagtgctgcttgctgaagaggacaaagctgaagatgatgtagtgttttacttggtatttttgggttccaccctccgtcactgtacaagtactcggaaggtcagttctgatacattggagaccattgctcctggtcatgattgttgtgaaacagtgaaggtgcagctctgtgcttccaaagagggccttcccgtgtttgtggtggctgaagaagactttcatttcgtccaggatgaagcgtatgatgcagctcaattcctagcaaccagtgctggaaatcagcaggctttgaactttacccgttttcttgaccagtcaggacccccatctggggatgtgaattcccttgataagaagttggtgctggcattcaggcacctgaagctgcccacggagtggaatgtattggggacagatcagagtttgcatgatgctggcccgcgagagacattgatgcattttgctgtgcggctgggactgctgaggttgacgtggttcctgttgcagaagccaggtggccgcggagctctcagtatccacaaccaggaaggggcgacgcctgtgagcttggccttggagcgaggctatcacaagctgcaccagcttctaaccgaggagaatgctggagaaccagactcctggagcagtttatcctatgaaataccgtatggagactgttctgtgaggcatcatcgagagttggacatctatacattaacctctgagtctgattcacatcatgaacacccatttcctggagacggttgcactggaccaatttttaaacttatgaacatccaacagcaactaatgaaaacaaacctcaagcagatggacagtcttatgcccttaatgatgacagcacaggatccttccagtgccccagagacagatggccagtttcttccctgtgcaccggagcccacggaccctcagcgactttcttcttctgaagagactgagagcactcagtgctgcccagggagccctgttgcacagactgaaagtccctgtgatttgtcaagcatagttgaggaggagaatacagaccgttcctgtaggaagaaaaataaaggcgtggaaagaaaaggggaagaggtggagccagcacctattgtggactctggaactgtatctgatcaagacagctgccttcagagcttgcctgattgtggagtaaagggcacggaaggcctttcgtcctgtggaaacagaaatgaagaaactggaacaaaatcttctggaatgcccacagaccaggagtccctgagcagtggagatgctgtgcttcagagagacttggtcatggagccaggcacagcccagtattcctctggaggtgaactgggaggcatttcaacaacaaatgtcagtaccccagacactgcaggggaaatggaacatgggctcatgaacccagatgccactgtttggaagaatgtgcttcagggaggggaaagtacaaaggaaagatttgagaactctaatattggcacagctggagcctctgacgtgcacgtcacaagtaagcctgtggataaaatcagtgttccaaactgtgcccctgctgccagttccctggatggtaacaaacctgctgagtcttcacttgcatttagtaatgaagaaacctccactgaaaaaacagcagaaacggaaacttcacgaagtcgtgaggagagtgctgatgctccagtagatcagaattctgtggtgattccagctgctgcaaaagacaagatttcagatggattagaaccttatactctcttagcagcaggcataggtgaggcaatgtcaccctcagatttagcccttcttgggctggaagaagatgtaatgccacaccagaactcagaaacaaattcatctcatgctcaaagccaaaagggcaaatcctcacccatttgttctacaactggagacgataaactttgtgcagactctgcatgtcaacagaacacagtgacttctagtggcgatttggttgcaaaactgtgtgataacatagttagcgagtccgaaagcaccacagcaaggcaacccagctcacaagatccacccgatgcctcccactgtgaagacccacaggctcatacagtcacctctgaccctgtaagggatacccaggaacgtgcggatttttgtcctttcaaagtggtggataacaaaggccaacgaaaagatgtgaaactagataaacctttaacaaatatgcttgaggtggtttcacatccacatccagttgtccctaaaatggagaaagaactggtgccagaccaggcagtaatatcagacagtactttctctctggcaaacagtccaggcagtgaatcagtaaccaaggatgacgcactttcttttgtcccctcccagaaagaaaagggaacagcaactcctgaactacatacagctacagattatagagatggcccagatggaaattcgaatgagcctgatacgcggccactagaagacagggcagtaggcctgtccacatcctccactgctgcagagcttcagcacgggatggggaataccagtctcacaggacttggtggagagcatgagggtcccgcccctccagcaatcccagaagctctgaatatcaaggggaacactgactcttccctgcaaagtgtgggtaaggccactttggctttagattcagttttgactgaagaaggaaaacttctggtggtttcagaaagctctgcagctcaggaacaagataaggataaagcggtgacctgttcctctattaaggaaaatgctctctcttcaggaactttgcaggaagagcagagaacaccacctcctggacaagatactcaacaatttcatgaaaaatcaatctcagctgactgtgccaaggacaaagcacttcagctaagtaattcaccgggtgcatcctctgcctttcttaaggcagaaactgaacataacaaggaagtggccccacaagtctcactgctgactcaaggtggggctgcccagagcctggtgccaccaggagcaagtctggccacagagtcaaggcaggaagccttgggggcagagcacaacagctccgctctgttgccatgtctgttgccagatgggtctgatgggtccgatgctcttaactgcagtcagccttctcctctggatgttggagtgaagaacactcaatcccagggaaaaactagtgcctgtgaggtgagtggagatgtgacggtggatgttacaggggttaatgctctacaaggtatggctgagcccagaagagagaatatatcacacaacacccaagacatcctgattccaaacgtcttgttgagccaagagaagaatgccgttctaggtttgccagtggctctacaggacaaagctgtgactgacccacagggagttggaaccccagagatgatacctcttgattgggagaaagggaagctggagggagcagaccacagctgtaccatgggtgacgctgaggaagcccaaatagacgatgaagcacatcctgtcctactgcagcctgttgccaaggagctccccacagacatggagctctcagcccatgatgatggggccccagctggtgtgagggaagtcatgcgagccccgccttcaggcagggaaaggagcactccctctctaccttgcatggtctctgcccaggacgcacctctgcctaagggggcagacttgatagaggaggctgccagccgtatagtggatgctgtcatcgaacaagtcaaggccgctggagcactgcttactgagggggaggcctgtcacatgtcactgtccagccctgagttgggtcctctcactaaaggactagagagtgcttttacagaaaaagtgagtactttcccacctggggagagcctaccaatgggcagtactcctgaggaagccacggggagccttgcaggatgttttgctggaagggaggagccagagaagatcattttacctgtccaggggcctgagccagcagcagaaatgccagacgtgaaagctgaagatgaagtggattttagagcaagttcaatttctgaagaagtggctgtagggagcatagctgctacactgaagatgaagcaaggcccaatgacccaggcgataaaccgagaaaactggtgtacaatagagccatgccctgatgcagcatctcttctggcttccaagcagagcccagaatgtgagaacttcctggatgttggactgggcagagagtgtacctcaaaacaaggtgtacttaaaagagaatctgggagtgattctgacctctttcactcacccagtgatgacatggacagcatcatcttcccaaagccagaggaagagcatttggcctgtgatatcaccggatccagttcatccaccgatgacacggcttcactggaccgacattcttctcatggcagtgatgtgtctctctcccagattttaaagccaaacaggtcaagagatcggcaaagccttgatggattctacagccatgggatgggagctgagggtcgagaaagtgagagtgagcctgctgacccaggcgacgtggaggaggaggagatggacagtatcactgaagtgcctgcaaactgctctgtcctaaggagctccatgcgctctctttctcccttccggaggcacagctgggggcctgggaaaaatgcagccagcgatgcagaaatgaaccaccggagtttcagtctagaaggcttgacaggaggagctggtgtcggaaacaagccatcctcatctctagaagtaagctctgcaaatgccgaagagctcagacacccattcagtggtgaggaacgggttgactctttggtgtcactttcagaagaggatctggagtcagaccagagagaacataggatgtttgatcagcagatatgtcacagatctaagcagcagggatttaattactgtacatcagccatttcctctccattgacaaaatccatctcattaatgacaatcagccatcctggattggacaattcacggcccttccacagtaccttccacaataccagtgctaatctgactgagagtataacagaagagaactataatttcctgccacatagcccctccaagaaagattctgaatggaagagtggaacaaaagtcagtcgtacattcagctacatcaagaataaaatgtctagcagcaagaagagcaaag

SEQ ID NO: 430 - DNA, 827 bp, Homo sapiens
  source 1..827: mol_type = unassigned DNA
cccagtgatgacatggacagcatcatcttcccaaagccagaggaagagcatttggcctgtgatatcaccggatccagttcatccaccgatgacacggcttcactggaccgacattcttctcatggcagtgatgtgtctctctcccagattttaaagccaaacaggtcaagagatcggcaaagccttgatggattctacagccatgggatgggagctgagggtcgagaaagtgagagtgagcctgctgacccaggcgacgtggaggaggaggagatggacagtatcactgaagtgcctgcaaactgctctgtcctaaggagctccatgcgctctctttctcccttccggaggcacagctgggggcctgggaaaaatgcagccagcgatgcagaaatgaaccaccggagttcaatgcgagttcttggggatgttgtcaggagacctcccattcataggagaagtatgagctggtgcccctctggtgtgcagtactctgctggcctgagtgctgactttaattacagaagtttcagtctagaaggcttgacaggaggagctggtgtcggaaacaagccatcctcatctctagaagtaagctctgcaaatgccgaagagctcagacacccattcagtggtgaggaacgggttgactctttggtgtcactttcagaagaggatctggagtcagaccagagagaacataggatgtttgatcagcagatatgtcacagatctaagcagcagggatttaattactgtacatcagccatttcctctccattgacaaaatccatctcattaatgacaatcagccatcctggattgga

SEQ ID NO: 431 - DNA, 322 bp, Homo sapiens
  source 1..322: mol_type = unassigned DNA
gttgtcccagctcggcccgcgggggagccccgggagccgcacgggacatgtatagtttcaccatgttggccaggatggtctgaaactccttatctgaagtgatcagcctgccttgacctcccaaaattctgggattacaggcgtgtgccaccgcgtctgtcctaaggagacacactgtttctctggcttattaagagtgtcctgggtcatgaaacttaatccacagcaagctcccttatatggtgattgtgttgttacagtgctgcttgctgaagaggacaaagctgaagatgatgtagtgttttacttggtatttttgggt

SEQ ID NO: 432 - DNA, 3765 bp, Homo sapiens
  source 1..3765: mol_type = unassigned DNA
gaagcgcctgtgctctgccgagactgccgtgcccattgctcgcctcggtcgccgccgctttagccgcctccgggggagcggccgcctattgtctttctccgcggcgaaggtgaagagttgtcccagctcggcccgcgggggagccccgggagccgcacgtgtcctgggtcatgaaacttaatccacagcaagctcccttatatggtgattgtgttgttacagtgctgcttgctgaagaggacaaagctgaagatgatgtagtgttttacttggtatttttgggttccaccctccgtcactgtacaagtactcggaaggtcagttctgatacattggagaccattgctcctggtcatgattgttgtgaaacagtgaaggtgcagctctgtgcttccaaagagggccttcccgtgtttgtggtggctgaagaagactttcatttcgtccaggatgaagcgtatgatgcagctcaattcctagcaaccagtgctggaaatcagcaggctttgaactttacccgttttcttgaccagtcaggacccccatctggggatgtgaattcccttgataagaagttggtgctggcattcaggcacctgaagctgcccacggagtggaatgtattggggacagatcagagtttgcatggtgagaatttatatgatctacaaacacactttaagtttgtgatatttctactttttttttaatggggctacttttctatggtcatcatattcaggtcttccacagaggctgcgtaaatcttagaattactgtaggaaagtggcctcaatggcatctcttctaggttcttcaattgagctgttaagcatgttgttgcagcgaaatgaccctagggattacccaaggagagtggcacgtcaccttcctgtgggtctggatttcagatttgatctctcaagtgtagaaagtgacatgctcttcatgaggagagtagcagagttactttttggtgtttaatgatcaaagacatggttttcattattgtattctgaagttctctaaagatagcctggaagtgaaggagaggaaagattgggcagtgagtgggaggagcatgagaacagggtgtgctctgagaaaccacacacttccttaaccaggttagtgtcactcttactgactttatctgttggccctccctatgagagttcactgaagaaaggactttttgtttgttttttgtttttttttgagaacgggctttcactcttgtagtccaggctggagtgcagtggcatgatctcggctcactgcagcctccacctcctgggttcaggtgattctgctgcctcagcctcccaaatagctgggattacaggcatgtaccaccatgcctagcaaatttttttttttttttaattagagacagggtttcaccgtgttagtcaggctggtctcgaactcctgacctcaggtaatctacccacctcggcctcccaaagtgctgggattataggcatgagccactgcgcccggccagaactccactttttcaaaaatatttacatagtaagtcctcttactcaaacaagggttttcccacataattctagtagccaatgacatctacttgatgtcataattgtatagatattttttaatgaaacataatgtgtacctggagttcaataagtaacatccagtttcccttctgagttcaagtccaattgaacgatttgggagtcctgagatagaaaccaaaatgtttattactgatgaaatctagattggaagcctgatgttagagctcctgccagaagggtctgcttgtactttctatgtcttcaatgaaagagctggtcagtcacaccattgccctgtagagtccacccagccttgagtattgaattattttgggtaagcagaccacaagtcactctccccacaggtgagcagttcctgaggagaaatacccagaggggcctgagccatagcatagttagtttctacactcagatgaattttgtcttcttccatggaagaatggtaaagaggtctttgccagctttgattctcttaaatctacactaaatttaacagttaaacctgtggtcagccgtcagaacggtgtcccatactgtcaggtgcatactgtcagattctacctggatagtcctgcccaggtaaaacctgaaaggaagtatcaaatcaaggaagaaaggatttatccttttcttcttctttttttaagtatagtgtccaagaaacttctgtcttgctaatatttagagatcagaatatttgacattctgaaaaggcactcatgccttatataaacctggtgatgggccttaatacctctagctcctcctatttctgtattgatacaggaatgtttattctggctgcctttcacaaatcagtgtcaagatagtactgcattagttatttgtggggcttatggtgttttatggttttgttttgtcttgtttaaagaggggcccaggagttggatagttttatgttgccatgattaaaaacaactattagaaaaagcaaacatctgaaactttggacatatcacttcctctttctctctcttttttttttttttttttgagatagagtcttgctctgtcgcccaggctggagtgcaatggtgcaatctcggctcactgcaacctccatctcctgggttgaagcgattctcctgccttagcctcccaagtagctgggaatacaggcacatgccaccacaccctgctgcttttttgtgtgttttagtagagacggggtttcaccatgttgcccaggctggtcttgaactcctgagctcaggcaatccacccgcctcagcctcccaaagtgctaggattacaggcgtgagccactgtgcccggccacttcctctctttgggccttaacttccttgtctttaataggagggaattggccagctttaatttttttttgtactgtcagtgtactggtaaattttctgttgcacaaaattgctcaagcagtgctaacaaaggccaaaccaaatttgaacacttgaggaaggaaatacatattaaaaccacaatgagatatcattacacatttatcataatggctaagatgaagaataccaagtgctggcaaagatgaagaacatatcatatgttgcttgtaggaatgcaaaatgtataaccactctagaaatatttggcagtttcttgtaaagttaaacatacacttagcgtatgacccagtaatcccacttttgggtgtttatcctagagaaatgaaaatctgtagtcaccaaaaagtctgtgcacggacgtgctcatagtaatgttattcataatcttcaaaaactggaaataacccagatttccctcactgagtgaatacagaagcaaactataatatatccatacagtggaatactactcagcaataaaaagaagcaaactgttgacatgtgcaacaacttggatgtgttttaaatgcattatgcgggaaaatgaagtcagtttccaaaggttccatactatgtgattctatttatatgatattctggaagatgcaaaattatagaaaaagagaacagatgagtagttgctaggggctgggagtgggggaagtctgactggaaagaggtatcatgagggaattctttgggttgttggagttgttttgtcttgttcgtggtggtggctgtaagaatctatgcatgtgttaaaactcataggagtgtacatcccctaaaggtgaattttattgtacatatatttaaaataataaaataacaaa

SEQ ID NO: 433 - DNA, 608 bp, Homo sapiens
  source 1..608: mol_type = unassigned DNA
actgagagaatcctgagacatccccagccacctaccactgctcctgttccaagcaaagaagatctgctcactccggaaaaagaaaatgagtgagactcaaaattcaacaagccagaaagcaatggatgaggataacaaagccgcaagccaaacaatgccgaatacacaagacaagaactacgaggatgaattgactcaagtagctctagctctggttgaggatgtcatcaattatgctgttaagattgtggaagaggagcgaaaccctttgaaaaacatcaagtggatgactcacggtgaattcactgtggaaaagggtcttaaacaaattgacgaatatttttcggatgcacccattgttgtttcttatgtaggtgaccaccaagcattagttcacagaccaggaatggttcgctttcgagaaaactggcagaagaatcttactgatgccaaatatagtttcatggagtcattccccttcttattcaatcgtgtctgatacttacaggatgtcttaggattgtttttctcatcaggatacattaaaaatacaatacagcacgtcaaaccacagaatatttattgagtaataaacttgtggcacacaa

SEQ ID NO: 434 - DNA, 412 bp, Homo sapiens
  source 1..412: mol_type = unassigned DNA
actgagagaatcctgagacatccccagccacctaccactgctcctgttccaagcaaagaagatctgctcactccggaaaaagaaaatgagtgagactcaaaattcaacaagccagaaagcaatggatgaggataacaaagccgcaagccaaacaatgccgaatacacaagacaagaactacgaggatgaattgactcaagtagctctagctctggttgaggatgtcatcaattatgctgttaagattgtggaagaggagcgaaaccctttgaaaaacatcaagtggatgactcacggtgaattcactgtggaaaagggtcttaaacaaattgacgaatatttttcggtaagttaggccgaccactccagcatggtacaccggtgtgaagaacaataaagagactctcagcag

SEQ ID NO: 435 - DNA, 796 bp, Homo sapiens
  source 1..796: mol_type = unassigned DNA
ttgtgaggagtaaatgacttcagacactgaaggcttaacacagtgactggcatatcatagggatgcccaatacataccagctgtgaggcttatcaccactgttcttcctggcatggccctgtaagctcatcttcggctgaagagaagctagcacttgcaaacattccatctggcaatctgagagaagctactgagagaatcctgagacatccccagccacctaccactgctcctgttccaagcaaagaagatctgctcactccggaaaaagaaaatgagtgagactcaaaattcaacaagccagaaagcaatggatgaggataacaaagccgcaagccaaacaatgccgaatacacaagacaagaactacgaggatgaattgactcaagtagctctagctctggttgaggatgtcatcaattatgctgttaagattgtggaagaggagcgaaaccctttgaaaaacatcaagtggatgactcacggtgaattcactgtggaaaagggtcttaaacaaattgacgaatatttttcgccggatgcacccattgttgtttcttatgtaggtgaccaccaagcattagttcacagaccaggaatggttcgctttcgagaaaactggcagaagaatcttactgatgccaaatatagtttcatggagtcattccccttcttattcaatcgtgtctgatacttacaggatgtcttaggattgtttttctcatcaggatacattaaaaatacaatacagcacgtcaaaccacagaatatttattgagtaataaacttgtggcac

SEQ ID NO: 436 - DNA, 657 bp, Homo sapiens
  source 1..657: mol_type = unassigned DNA
ctgaagagaagctagcacttgcaaacattccatctggcaatctgagagaagctactgagagaatcctgagacatccccagccacctaccactgctcctgttccaagcaaagaagatctgctcactccggaaaaagaaaatgagtgagactcaaaattcaacaagccagaaagcaatggatgaggataacaaagccgcaagccaaacaatgccgaatacacaagacaagaactacgaggatgaattgactcaagtagctctagctctggttgaggatgtcatcaattatgctgttaagattgtggaagaggagcgaaaccctttgaaaaacatcaagtggatgactcacggtgaattcactgtggaaaagggtcttaaacaaattgacgaatatttttcggatgcacccattgttgtttcttatgtaggtgaccaccaagcattagttcacagaccaggaatggttcgctttcgagaaaactggcagaagaatcttactgatgccaaatatagtttcatggagtcattccccttcttattcaatcgtgtctgatacttacaggatgtcttaggattgtttttctcatcaggatacattaaaaatacaatacagcacgtcaaaccacagaatatttattgagtaataaacttgtggcac

SEQ ID NO: 437 - DNA, 977 bp, Homo sapiens
  source 1..977: mol_type = unassigned DNA
ttgtgaggagtaaatgacttcagacactgaaggcttaacacagtgactggcatatcatagggatgcccaatacataccagctgtgaggcttatcaccactgttcttcctggcatggccctgtaagctcatcttcggctgaagagaagctagcacttgcaaacattccatctggcaatctgagagaagctactgagagaatcctgagacatccccagccacctaccactgctcctgttccaagcaaagaagatctgctcactccggaaaaagaaaatgagtgagactcaaaattcaacaagccagaaagcaatggatgaggataacaaagccgcaagccaaacaatgccgaatacacaagacaagaactacgaggatgaattgactcaagtagctctagctctggttgaggatgtcatcaattatgctgttaagattgtggaagaggagcgaaaccctttgaaaaacatcaagtggatgactcacggtgaattcactgtggaaaagggtcttaaacaaattgacgaatatttttcgaagtgtgtttctaaaaaatgctgggcacatggcgtagagtttgtagagaggaaagacttaattcacagcttcctctacatctactatgtacactggagtatctcaactgctgacctacccgtagcacgaatctctgctggtacctacttcaccatgaaggtctccaaaaccaaaccaccggatgcacccattgttgtttcttatgtaggtgaccaccaagcattagttcacagaccaggaatggttcgctttcgagaaaactggcagaagaatcttactgatgccaaatatagtttcatggagtcattccccttcttattcaatcgtgtctgatacttacaggatgtcttaggattgtttttctcatcaggatacattaaaaatacaatacagcacgtcaaaccacagaatatttattgagtaataaacttgtggcacacaa

SEQ ID NO: 438 - DNA, 468 bp, Homo sapiens
  source 1..468: mol_type = unassigned DNA
ctgaagagaagctagcacttgcaaacattccatctggcaatctgagagaagctactgagagaatcctgagacatccccagccacctaccactgctcctgttccaagcaaagaagatctgctcactccggaaaaagaaaatgagtgagactcaaaattcaacaagccagaaagcaatggatgaggataacaaagccgcaagccaaacaatgccgaatacacaagacaagaactacgaggatgaattgactcaagtagctctagctctggttgaggatgtcatcaattatgctgttaagattgtggaagaggagcgaaaccctttgaaaaacatcaagtggatgactcacggtgaattcactgtggaaaagggtcttaaacaaattgacgaatatttttcggtaagttaggccgaccactccagcatggtacaccggtgtgaagaacaataaagagactctcagcagatc

SEQ ID NO: 439 - DNA, 3204 bp, Homo sapiens
  source 1..3204: mol_type = unassigned DNA
agtggaaatgcgtcatagagggcgggcggcgacggcggtggcggcgtcggaggcgcctccgggggacggtggcggctcccggcggtgaggccgcgcctgtccggggatcgtcgagggacggcgggagcttgggccagcggcggcggcggcctgggacgcaggcggagccccgcgcaggcccaaggtcccggaggctatggcagcggctaccatcgtgcacgacacgtctgaggccgtggagctctgccctgcttacggcttgtacctgaagcccatcaccaagatgaccatcagcgtggcactcccgcagctgaagcagccggggaagtccatctccaactgggaggtgatggagaggctgaagggcatggtgcagaaccaccagttctccacgctgcgtatttccaagagcaccatggacttcatccgcttcgagggggaggtggagaacaagagcctggtcaagtcttttctggcctgcctggacggcaagaccatcaagctcagcggcttctccgacatcctgaaggtgcgcgcggccgagttcaagatcgacttccccacccgccacgactgggactccttcttccgcgacgccaaggacatgaacgagaccctgccgggggagcggccggacaccatccacctggaggggctgccctgcaagtggttcgccctgaaggagtcgggctccgagaagcccagcgaggacgtcctggtcaaggtgtttgagaagttcggggagatccggaatgtggacatccccatgctggacccctaccgggaggagatgacgggccgcaacttccacaccttcagtttcggggggcacttgaacttcgaggcctatgtgcagtaccgcgagtacatgggcttcatccaggccatgagcgccctgcgcgggatgaaactcatgtacaagggcgaggacggcaaggccgtggcctgcaacatcaaggtttcttttgattcgaccaaacacctgagtgatgcctcaattaagaagcggcagctggagaggcagaagcttcaggaactggagcagcaaagagaagaacaaaagcgcagagagaaggaagcggaggagaggcagcgagcggaggaaaggaaacaaaaggagctggaagagctggagcgagagaggaaaagagaagagaagcttcgcaagagggagcagaagcagagggaccgtgagctgcgccggaatcagaagaagctggagaagctgcaggcggaggagcagaagcagctgcaggagaagatcaagctggaggagcgcaagctgctgctggcccagaggaacctgcagtccatccggctcatcgccgagctgctcagcagagccaaggctgtgaagctacgggaacaggagcagaaggaggagaagctgaggctccagcagcaggaggagcggcggcggctgcaggaggccgagctgcggcgcgtggaggaggagaaggagcgcgcgctgggcctgcagcggaaagagcgggagctgcgcgagcggctgctgagcatcctgctgagcaagaagccggacgacagccacacacacgacgagctgggcgtggcacacgccgacctgctgcagcccgtcctggacatcctgcagaccgtgtcgtccggctgtgtgagcgccaccacgctgcaccccctcgggggccagcccccggccggtgcccccaaggagagcccggcccacccagaggccgacggcgctcccaaaagcgtgaacgggagcgtggccgaggaggccccatgcaaggaggttcagagctcctgtcgtgtggtccccgaggatggctctccagagaagaggtgcccgggcggcgtcctctcctgcattcctgacaacaaccaacagcccaagggcatccctgcctgcgagcagaatgtctccagaaaggacacccggtcagaacaggacaagtgcaaccgggagcccagcaagggccggggccgggccaccggagacgggcttgctgaccggcacaagcgggagaggagccgggccaggcgggccagcagcagggaggacgggaggccacgcaaggagcggcggccccacaagaagcacgcctacaaggatgacagcccccgccggcgcagcacgagcccggaccacacccggtcccggaggtcccacagcaaagacaggcaccggagggagcggagccgggagcggaggggcagcgccagcaggaagcacagccgccaccgccgccgaagcgagcggtcgcgctcccggtccccgagcaggcaccgcagtacctggaacaggtaatgacgggcacggcctccccacggcctgtccgggaaagaccaggacctgctcgagcctcctggccgctccttggccgctctccgtccacccctgcaaagccaagacccttctgcagccacgaatgtccacggagcccgccggcaggaaggaagacaccatgctttagagatccatctttctccactcaccgcagcgtacttggcacttcagtttcaaacacgtagtcctttaaaacttgatccgatagctttaatgcggccggtcctctctcagtcaggaaaattgcacagaccgacagtcgtgaggatggcagagctgctgcattcccccacacggggatttctgtgtctgcttggcgacctccctgcgtgcacggcctaggaggtgcacgggccaccatagtcacactggcactgaaaagaaagcgttgccctggtgattctttcccccccgtttgtaatgttaactgatcaggaagtgcagtttgggtgggatgccgaatcgtcgtgctgacattgagtcacggatgaggaaggtacaagtcctttaagatcaaaactcaaacgggccgttctttctaaggtgtcggtatgtggggagtggtacaaaatggtctgatgctccttcaaaaacattcactttttacaacgtcaaggaattaagcataaaaaagattggttaaaagctttggtttctagtaaaggttagtgtgtgtggtttttttaagaagctgttttgctaaattatttttacttggaatgtttcaaacagatttcaggctgcaaacttgttttataatcgtttgcttctccaagtgaagctcagaaatacctaaaaatagctgtaacgttcgcgttaggaaagatggtgtttattccagtttgcatttttatggtgaaataaaatccttttccaatgaa

SEQ ID NO: 440 - DNA, 2187 bp, Homo sapiens
  source 1..2187: mol_type = unassigned DNA
cggcggtggcggcgtcggaggcgcctccgggggacggtggcggctcccggcggtgaggccgcgcctgtccggggatcgtcgagggacggcgggagcttgggccagcggcggcggcggcctgggacgcaggcggagccccgcgcaggcccaaggtcccggaggctatggcagcggctaccatcgtgcacgacacgtctgaggccgtggagctctgccctgcttacggcttgtacctgaagcccatcaccaagatgaccatcagcgtggcactcccgcagctgaagcagccggggaagtccatctccaactgggaggtgatggagaggctgaagggcatggtgcagaaccaccagttctccacgctgcgtatttccaagagcaccatggacttcatccgcttcgagggggaggtggagaacaagagcctggtcaagtcttttctggcctgcctggacggcaagaccatcaagctcagcggcttctccgacatcctgaaggtgcgcgcggccgagttcaagatcgacttccccacccgccacgactgggactccttcttccgcgacgccaaggacatgaacgagaccctgccgggggagcggccggacaccatccacctggaggggctgccctgcaagtggttcgccctgaaggagtcgggctccgagaagcccagcgaggacgtcctggtcaaggtgtttgagaagttcggggagatccggaatgtggacatccccatgctggacccctaccgggaggagatgacgggccgcaacttccacaccttcagtttcggggggcacttgaacttcgaggcctatgtgcagtaccgcgagtacatgggcttcatccaggccatgagcgccctgcgcgggatgaaactcatgtacaagggcgaggacggcaaggccgtggcctgcaacatcaaggtttcttttgattcgaccaaacacctgagtgatgcctcaattaagaagcggcagctggagaggcagaagcttcaggaactggagcagcaaagagaagaacaaaagcgcagagagaaggaagcggaggagaggcagcgagcggaggaaaggaaacaaaaggagctggaagagctggagcgagagaggaaaagagaagagaagcttcgcaagagggagcagaagcagagggaccgtgagctgcgccggaatcagaagaagctggagaagctgcaggcggaggagcagaagcagctgcaggagaagatcaagctggaggagcgcaagctgctgctggcccagaggaacctgcagtccatccggctcatcgccgagctgctcagcagagccaaggtacccgggggctccctctgcagccgccagccgcgcccgggctgccctcagtgccctcccctgaaatgcgggcggcgtcacggcgccgtttccccgccggctgcagctgtagctacgaaaccagctttaatgccgaggatgacggctccttcccgggagggtgtagcgctcgtctgtcgttcccgatgatttcagagctgtgacggtttccttttgcaaagctggtgcattcaggttccccgagcaggctggcagcctcccgggggccagggcagaggctctctgtttcctttgggtcggggcagtggcagagagtgcagggggccgctccctctggcccgcgcctctgtgtgtggtcagctggcctggctgtgacctcaccagtggcccagagcagaggggcaaggtgggctggggggagggctgagcgcacagagggggcctgccgtgggcccgggtccctcctccgcagcgtgaacctgacaggtctcaccagcgccggtactgacgaccccctcagcaccaagagcctccctgctcctcctgcaggcgcgactggtaactcccatgagcccggggccagggcccacagacagacagacctccccaggacagacgtccccggcacgctccttgtcctcaggagggctgcgtccccctggagtccaacgcggggcgaccccataacctgttgtctgattacagttgtgataagtccccgggaaggagcatgacaagaggctgagacatgtggcagcccagtccttacctcatggtgaatattgaagacactaacccaggctaggccaggctcgccccgcagctacggcggtggcatgcgtctgcggcgtcatctcagctccctgttgct

SEQ ID NO: 441 - DNA, 3101 bp, Homo sapiens
  source 1..3101: mol_type = unassigned DNA
aggaatttgtccagcttgagccagggtgcacgcaggaatctgtctggaaaaaggcagttctcactgaggaggtttgaggcgcgcgctctgggcaggaagcctccccagctttctgaggatgatatctggctaaaaagcgagggagacaactatagtgccaccctcctggagcctgctgccagctctctttccccagatcacaaaaacatggaaattgaggtgtctgttgcagaatgtaaaagtgttcctggaatcacctctaccccacatcccatggaccatccctccgctttctattcacccccgcataatggcctccttactgatcaccacgaatccctggataatgatgttgccagagagatccgctatctagatgaggtgctagaggccaactgctgtgattctgctgtggatggaacgtacaatggaacatcctccccagagcctggtgcagtggttctggtgggcggcctaagcccccctgtccacgaggcgacccagccagaacccactgaaagaacagctagccggcaggcacctcctcacatcgagctcagtaatagcagccctgaccccatggcagaggcagaaagaacaaatggccattcccccagccagcctagagatgcgctgggggacagcctgcaggtgcctgtcagccccagctccacaaccagctcacggtgttcttcccgagatggagagttcactctcaccacactgaaaaaggaggccaagtttgagctgcgtgccttccatgaggacaagaagccctccaagctctttgaggatgacgagcatgagaaagaacaatactgcattagaaaagtgaggccttcagaggagatgctggagctggaaaaggagaggagagagctcatccgcagccaggccgtcaagaagaatcctggcattgcagcaaaatggtggaatcccccgcaggaaaaaaccatcgaggagcagctggacgaggaacatctggagtcgcacaaaaagtacaaggagcgcaaagagagaagggcacagcaggaacagttgctgctgcagaagcagttacagcagcagcagcagcagcccccatcgcagctctgcacagcccctgcctcttctcatgaacgcgcaagcatgattgacaaagcaaaggaggacattgtcacagagcagatagatttctctgctgctcgcaaacaatttcagctgatggagaattccaggcaagcggtggccaagggccagagtacacccaggctgttctccatcaagcctttctacaggcctctggggtcagtcaactcagacaagccactgactaatccgagaccaccttctgtcgggggacctccagaagacagtggtgcctcagccgccaagggacagaaatcccccggtgccctggagaccccatcggcagcaggaagccagggcaacacagcctctcaggggaaggaagggccctacagcgagccttctaaacgtgggcccttatctaaactgtgggctgaggatggagaatttacgagcgcccgggctgtcctcactgtggtcaaggatgatgaccatgggattttggatcagttctcaagatctgtcaatgtctccttgacccaagaggagcttgactctggtctggacgaattgtcggtgaggtctcaggataccacagtcctggagaccctatccaatgatttcagcatggacaacatcagtgacagcggggcatccaatgagacaaccaatgccctccaggaaaattcactggctgatttttctctgccccagacaccacaaactgacaacccctcagagggccgaggagaaggcgtctccaagtcatttagtgatcatggtttctattccccttcctccacgctgggggactctccgttggttgatgaccccttggagtatcaggctggcctcctggtgcagaatgccattcaacaagccatagccgagcaggtggataaagctgtgtccaaaaccagcagggatggagcagagcaacagggacctgaagcgactgtagaggaagctgaagctgcggctttcggctcagaaaagcctcagagcatgtttgagccacctcaggtgtcttctcctgttcaagagaaaagggatgtattaccaaagattctgcctgctgaagacagggcgctcagggaaagggggcccccccagccactgccagctgtgcagcccagtggcccgattaacatggaggagaccaggcccgaaggaagctatttcagcaagtactcggaggcagctgagctgagaagcacagcctccctcctggccactcaagaatctgacgtgatggttgggcctttcaagctgaggtccaggaaacagcggactttgtccatgattgaggaagagatccgagcagctcaggaaagggaagaggagctgaagaggcagagacaagtcttgcagagtacgcagagccccaggacaaagaatgccccatcactgccctccagaacatgctacaaaactgctccagggaaaatagagaaagtcaaacctcctccatcccccaccactgaaggccccagcttgcagcctgacttagcccctgaagaggctgccggaacccagcggcccaagaatctgatgcagaccctcatggaagactatgagacacacaaatctaaaaggcgcgagagaatggatgatagtagtgtcctcgaggccacacgggttaatcgaagaaagagcgcactggctttgcgctgggaagcagggatctatgccaaccaggaggaagaagacaacgaataaacttccttcaacccaggaagcgtctttggtgcttgggagaccaagaaaccaagaaattaacaactgaaagcattttaatggactatttattaaagtgcaaacaaactcagcaatccttatgtagaccagaagctgcaatatacaatgatgaaaatgaaacgaaaaggaagtccccccatcagactctggacacccaggaatcaaaagagaaaggacttttttggtgactcaatcccagtgtctggtttggggccaatctacaatggatccaaaaggacaaaacatgttacaagcaaatcaacatagttgctgca

SEQ ID NO: 442 - DNA, 6866 bp, Homo sapiens
  source 1..6866: mol_type = unassigned DNA
gcagatgcgctggccccagcccggggctgccgctcgccttcccccggagtctcctggacccccggagtctcctggacccccggagcgggaggcagcggccgcgcggcgctggactggagcagaaccccaggactgcgcccccgggagcgggcgcccagagaagcctccccagctttctgaggatgatatctggctaaaaagcgagggagacaactatagtgccaccctcctggagcctgctgccagctctctttccccagatcacaaaaacatggaaattgaggtgtctgttgcagaatgtaaaagtgttcctggaatcacctctaccccacatcccatggaccatccctccgctttctattcacccccgcataatggcctccttactgatcaccacgaatccctggataatgatgttgccagagagatccgctatctagatgaggtgctagaggccaactgctgtgattctgctgtggatggaacgtacaatggaacatcctccccagagcctggtgcagtggttctggtgggcggcctaagcccccctgtccacgaggcgacccagccagaacccactgaaagaacagctagccggcaggcacctcctcacatcgagctcagtaatagcagccctgaccccatggcagaggcagaaagaacaaatggccattcccccagccagcctagagatgcgctgggggacagcctgcaggtgcctgtcagccccagctccacaaccagctcacggtgttcttcccgagatggagagttcactctcaccacactgaaaaaggaggccaagtttgagctgcgtgccttccatgaggacaagaagccctccaagctctttgaggatgacgagcatgagaaagaacaatactgcattagaaaagtgaggccttcagaggagatgctggagctggaaaaggagaggagagagctcatccgcagccaggccgtcaagaagaatcctggcattgcagcaaaatggtggaatcccccgcaggaaaaaaccatcgaggagcagctggacgaggaacatctggagtcgcacaaaaagtacaaggagcgcaaagagagaagggcacagcaggaacagttgctgctgcagaagcagttacagcagcagcagcagcagcccccatcgcagctctgcacagcccctgcctcttctcatgaacgcgcaagcatgattgacaaagcaaaggaggacattgtcacagagcagatagatttctctgctgctcgcaaacaatttcagctgatggagaattccaggcaagcggtggccaagggccagagtacacccaggctgttctccatcaagcctttctacaggcctctggggtcagtcaactcagacaagccactgactaatccgagaccaccttctgtcgggggacctccagaagacagtggtgcctcagccgccaagggacagaaatcccccggtgccctggagaccccatcggcagcaggaagccagggcaacacagcctctcaggggaaggaagggccctacagcgagccttctaaacgtgggcccttatctaaactgtgggctgaggatggagaatttacgagcgcccgggctgtcctcactgtggtcaaggatgatgaccatgggattttggatcagttctcaagatctgtcaatgtctccttgacccaagaggagcttgactctggtctggacgaattgtcggtgaggtctcaggataccacagtcctggagaccctatccaatgatttcagcatggacaacatcagtgacagcggggcatccaatgagacaaccaatgccctccaggaaaattcactggctgatttttctctgccccagacaccacaaactgacaacccctcagagggccgaggagaaggcgtctccaagtcatttagtgatcatggtttctattccccttcctccacgctgggggactctccgttggttgatgaccccttggagtatcaggctggcctcctggtgcagaatgccattcaacaagccatagccgagcaggtggataaagctgtgtccaaaaccagcagggatggagcagagcaacagggacctgaagcgactgtagaggaagctgaagctgcggctttcggctcagaaaagcctcagagcatgtttgagccacctcaggtgtcttctcctgttcaagagaaaagggatgtattaccaaagattctgcctgctgaagacagggcgctcagggaaagggggcccccccagccactgccagctgtgcagcccagtggcccgattaacatggaggagaccaggcccgaaggaagctatttcagcaagtactcggaggcagctgagctgagaagcacagcctccctcctggccactcaagaatctgacgtgatggttgggcctttcaagctgaggtccaggaaacagcggactttgtccatgattgaggaagagatccgagcagctcaggaaagggaagaggagctgaagaggcagagacaagtcttgcagagtacgcagagccccaggacaaagaatgccccatcactgccctccagaacatgctacaaaactgctccagggaaaatagagaaagtcaaacctcctccatcccccaccactgaaggccccagcttgcagcctgacttagcccctgaagaggctgccggaacccagcggcccaagaatctgatgcagaccctcatggaagactatgagacacacaaatctaaaaggcgcgagagaatggatgatagtagtgtcctcgaggccacacgggttaatcgaagaaagagcgcactggctttgcgctgggaagcagggatctatgccaaccaggaggaagaagacaacgaataaacttccttcaacccaggaagcgtctttggtgcttgggagaccaagaaaccaagaaattaacaactgaaagcattttaatggactatttattaaagtgcaaacaaactcagcaatccttatgtagaccagaagctgcaatatacaatgatgaaaatgaaacgaaaaggaagtccccccatcagactctggacacccaggaatcaaaagagaaaggacttttttggtgactcaatcccagtgtctggtttggggccaatctacaatggatccaaaaggacaaaacatgttacaagcaaatcaacatagttgctgcaggcggaactgagaccagcctctctgggcgatgaaggacaatggtggtagggccacttagagagcagtagggcccaggctggtgcagcctacatggcacaggatatttccctgcaccagtttcccacctgtcacttgcagcatcagagggtgttgcattaactccattttctccagcagccataaaatgaatggcgtttctctccatatttgcccagaagaggcagttatgattccacttctcctacatttaattatttttaattgagaacaactcatgatcacaattcataaaatccatattttaagacaatagttcttcatgtcacaaacacaatctattctacatgaggaggctgagaaaggggaagagaaaaacaaaccaaatggatgatgttagctttaggatcgtgtctgcttataatattcactgatctgcagtttatgagaacacattttcacagttatgtttcttcataggaaaactatatttagtgggcaacaactatttttatgatgggatgggggagtatatacacgtatagaatctgtacgcgttgaacaacttggttcaagatggtgggggcatttttagagcggcaataattgaaaaaaaaggcgaactctgccttggagaggtagatgataagaaataaaaaggtgtttataactattttgtattataaagtgggccttagagataggaagaagaatgatggattccttttggatcaatcagaaaggaaacacgaaagaaaagtcaggaaggtagagagagaaaaagggagggaaggagaaagaatgggaataaaataaggaggtaagagatactatttttgctgagcaaccagtgtgtttcaggatgatacaaagaaaaatatagaatagaaataagtgcaggcttggaatcagctacaaatcctaaagatggggtgtgtgtggatgtgtgtgtgtgtgtgtgtacaccattgtgtgtttgtaaaatgtgtatgttcatgagtaagggtgtgtgtgtgtgtgtattaaaattccagagtgaccgtggcacttgggtgtacaggtaattcctccagagctgtttgctggcttcaggagtggagtgagaatttcttttttatgaaaagggatataaaggcaccgagctgatgcagtatttgtaatattaagttgacctaacaaggtatttgcatgagtcacaattacaaagttttgagcggttttgtaatttgacatttaggagagtctcctatttattctcatactttacattcatgcttagtatactatagaggatgccagctttaatctttctgtcatttaaagcaatatgataagggtattcaataattgggtgccctaaatttctggatgagaaaattttcaattctggccatgagaaagaaaaaaaaataaacagccttctttttttttcctttgttttaaaactgtggttttttaaaaaagcaataattaactcagacctcactaaaaatcatttttgtttttatattgttatgtcataagctctattatgttattctaacaagtagcaatttcacaaaatttgtatgtagatgttaacgcacatttcctttgcttcttttattagactagtgttgactttggggggggacatttattcacaaatgagaagtaggcacaaagtaaaaaatggaaccatctactaacaaggatcctttaaaactgccaagggagctctaacttgaagccacatcctacagatggcagcccaaatagcacatgggcaattggcaccatctttatatggttgagtctcctgaatattttgaatgaattctcaacaaaatgtgctagccactggggacgcaaaacaagtaagatccctgttgcaagaaattcattttatagtgagggaggttggcatggagactaaaattctcaggaaaatgagatccgtgttagattagaagtcctgatgtgaaatgggaggactcaggaaggaggatcgtctttacctgaggatttctagccagaggtcccagatgcctgggctgagaacccagcgataagggggcgttcccaaagcagacacagggataagaacagaggaggcagcagcattgcacagccccaggcacagtggcagttaggatggctggagagtaggatagttctatgggttgcccaaaaaatgtgatgcgcttcatgttttctctgactcatggatctggtagagaccatagacatgatatagactaacttccccatttttcacaagaggaaaccatccttatgacttaccttaaagttttttgttctgttttgaaggaaaccatgtgcttcatgaaacctacagttgacaagagaatgtacagctaagagaaaagcttaagaggccacactattcgcggaatggctttagaggcagatgaagtggtctttgaccacagttgattgaaccagagcacttattgcttaaagaataacagagttctagagctgggggttcttgggccatgctccgtgtgtggataaggaaagaaatactgtttctgggactctcccacagtcacaaagctgttttcactgtggcccctacatctcttaacttttgctattactcctatgctgccttccggattactgctgtctatcttcttgctccactcactgaagatcctattataatcccatgaaaatgtaaattacagtttacttgggagagccagattttctctgtgctcttgagttttttattcattcaagaaaccttgggccaccgctttgtacatagcaccgtgctaggctctgggatcccaaatggacccttttaactttctgaagatgggaccgtcccctggaggaaagtcattcctgcctaatccatcgagagaaagaggcttacgaaaaactttgcctctgatgctcagccccacccccaaatagcacacaagcttgttaaccccacctcttacaaaatgtttagattctgtaggtgttaaaagcctttctggaagtattgcattctgccgtgtttataggtgttcactttcctccagagctgattaactactgacatgacttggctttctcatccagaaattatggaaacagggtctgtcagtggcaggaggccgtgctgtgttttacttggatgacacaatgcagtttacttgcctcttcatacccatgcatgctgctcaccctagacaatgacatataagccgtatatagatcaatgtccacatatatatacacacacacatatatatatataaagtgtaacaaggaacactaaaacagtgttgattcttgtctctgaagacaaataattaaaccttttttttcccaactaaagaatggatttaattaaactatgtattgaaaaaaaagtagcctaagtgttagagatggtgaatatattccattttagttaaagaacaaatttcctgaattttaagcattcagtgagctgccaattttgattttgtgttgctctttacccaaattattttttctttgtttttctttttttgggggaggaggggaaaaaagcagcaatactgtgtttggaaattatactctgtatctggttttcctgtgtatgttaaccacttaaatgttattatcctgctttggttttagagtgattgtgaggcattcaatgcaagtatacagttattttctcattaaaatccaatgtgtgttgagtttttataaa

SEQ ID NO: 443 - DNA, 3273 bp, Homo sapiens
  source 1..3273: mol_type = unassigned DNA
atggcagaggcggaattgcacaaggaaaggctgcaagccatagcagaaaaaagaaagaggcagactgaaatagaaggcaagcgacaacagcttgacgagcagatacttctgctgcagcattccaagtccaaagtgcttcgggagaaatggctgctgcagggcatacccgctggaactgccgaagaggaggaagccaggaggcggcagtctgaagaggatgagttcagagtcaagcaacttgaagataacattcagaggctggagcaagaaatacaaacgctagaaagtgaagagtcccagatatctgccaaagagcaaatcatcctagagaaactgaaggaaacagaaaaatccttcaaggactttcagaagggtttctccagtacggatggagatgcagtaaattacatttcctcccagcttcccgacctgccaatcctctgttcacgaacagcagaaccatcacctgggcaggacgggaccagcagagcggctggagtcgggtgggagaatgtgctgctaaaggaaggtgagtcagcctcgaacgccacagaaacatccggcccagacatgactatcaagaagcctccccagctttctgaggatgatatctggctaaaaagcgagggagacaactatagtgccaccctcctggagcctgctgccagctctctttccccagatcacaaaaacatggaaattgaggtgtctgttgcagaatgtaaaagtgttcctggaatcacctctaccccacatcccatggaccatccctccgctttctattcacccccgcataatggcctccttactgatcaccacgaatccctggataatgatgttgccagagagatccgctatctagatgaggtgctagaggccaactgctgtgattctgctgtggatggaacgtacaatggaacatcctccccagagcctggtgcagtggttctggtgggcggcctaagcccccctgtccacgaggcgacccagccagaacccactgaaagaacagctagccggcaggcacctcctcacatcgagctcagtaatagcagccctgaccccatggcagaggcagaaagaacaaatggccattcccccagccagcctagagatgcgctgggggacagcctgcaggtgcctgtcagccccagctccacaaccagctcacggtgttcttcccgagatggagagttcactctcaccacactgaaaaaggaggccaagtttgagctgcgtgccttccatgaggacaagaagccctccaagctctttgaggatgacgagcatgagaaagaacaatactgcattagaaaagtgaggccttcagaggagatgctggagctggaaaaggagaggagagagctcatccgcagccaggccgtcaagaagaatcctggcattgcagcaaaatggtggaatcccccgcaggaaaaaaccatcgaggagcagctggacgaggaacatctggagtcgcacaaaaagtacaaggagcgcaaagagagaagggcacagcaggaacagttgctgctgcagaagcagttacagcagcagcagcagcagcccccatcgcagctctgcacagcccctgcctcttctcatgaacgcgcaagcatgattgacaaagcaaaggaggacattgtcacagagcagatagatttctctgctgctcgcaaacaatttcagctgatggagaattccaggcaagcggtggccaagggccagagtacacccaggctgttctccatcaagcctttctacaggcctctggggtcagtcaactcagacaagccactgactaatccgagaccaccttctgtcgggggacctccagaagacagtggtgcctcagccgccaagggacagaaatcccccggtgccctggagaccccatcggcagcaggaagccagggcaacacagcctctcaggggaaggaagggccctacagcgagccttctaaacgtgggcccttatctaaactgtgggctgaggatggagaatttacgagcgcccgggctgtcctcactgtggtcaaggatgatgaccatgggattttggatcagttctcaagatctgtcaatgtctccttgacccaagaggagcttgactctggtctggacgaattgtcggtgaggtctcaggataccacagtcctggagaccctatccaatgatttcagcatggacaacatcagtgacagcggggcatccaatgagacaaccaatgccctccaggaaaattcactggctgatttttctctgccccagacaccacaaactgacaacccctcagagggccgaggagaaggcgtctccaagtcatttagtgatcatggtttctattccccttcctccacgctgggggactctccgttggttgatgaccccttggagtatcaggctggcctcctggtgcagaatgccattcaacaagccatagccgagcaggtggataaagctgtgtccaaaaccagcagggatggagcagagcaacagggacctgaagcgactgtagaggaagctgaagctgcggctttcggctcagaaaagcctcagagcatgtttgagccacctcaggtgtcttctcctgttcaagagaaaagggatgtattaccaaagattctgcctgctgaagacagggcgctcagggaaagggggcccccccagccactgccagctgtgcagcccagtggcccgattaacatggaggagaccaggcccgaaggaagctatttcagcaagtactcggaggcagctgagctgagaagcacagcctccctcctggccactcaagaatctgacgtgatggttgggcctttcaagctgaggtccaggaaacagcggactttgtccatgattgaggaagagatccgagcagctcaggaaagggaagaggagctgaagaggcagagacaagtcttgcagagtacgcagagccccaggacaaagaatgccccatcactgccctccagaacatgctacaaaactgctccagggaaaatagagaaagtcaaacctcctccatcccccaccactgaaggccccagcttgcagcctgacttagcccctgaagaggctgccggaacccagcggcccaagaatctgatgcagaccctcatggaagactatgagacacacaaatctaaaaggcgcgagagaatggatgatagtagtgtcctcgaggccacacgggttaatcgaagaaagagcgcactggctttgcgctgggaagcagggatctatgccaaccaggaggaagaagacaacgaataa

SEQ ID NO: 444 - DNA, 3312 bp, Homo sapiens
  source 1..3312: mol_type = unassigned DNA
atggcagaggcggaattgcacaaggaaaggctgcaagccatagcagaaaaaagaaagaggcagactgaaatagaaggcaagcgacaacagcttgacgagcagatacttctgctgcagcattccaagtccaaagtgcttcgggagaaatggctgctgcagggcatacccgctggaactgccgaagaggaggaagccaggaggcggcagtctgaagaggatgagttcagagtcaagcaacttgaagataacattcagaggctggagcaagaaatacaaacgctagaaagtgaagagtcccagatatctgccaaagagcaaatcatcctagagaaactgaaggaaacagaaaaatccttcaaggactttcagaagggtttctccagtacggatggagatgcagtaaattacatttcctcccagcttcccgacctgccaatcctctgttcacgaacagcagaaccatcacctgggcaggacgggaccagcagagcggctggagtcgggtgggagaatgtgctgctaaaggaaggtgagtcagcctcgaacgccacagaaacatccggcccagacatgactatcaagaagcctccccagctttctgaggatgatatctggctaaaaagcgagggagacaactatagtgccaccctcctggagcctgctgccagctctctttccccagatcacaaaaacatggaaattgaggtgtctgttgcagaatgtaaaagtgttcctggaatcacctctaccccacatcccatggaccatccctccgctttctattcacccccgcataatggcctccttactgatcaccacgaatccctggataatgatgttgccagagagatccgctatctagatgaggtgctagaggccaactgctgtgattctgctgtggatggaacgtacaatggaacatcctccccagagcctggtgcagtggttctggtgggcggcctaagcccccctgtccacgaggcgacccagccagaacccactgaaagaacagctagccggcaggcacctcctcacatcgagctcagtaatagcagccctgaccccatggcagaggcagaaagaacaaatggccattcccccagccagcctagagatgcgctgggggacagcctgcaggtgcctgtcagccccagctccacaaccagctcacggtgttcttcccgagatggagagttcactctcaccacactgaaaaaggaggccaagtttgagctgcgtgccttccatgaggacaagaagccctccaagctctttgaggatgacgagcatgagaaagaacaatactgcattagaaaagtgaggccttcagaggagatgctggagctggaaaaggagaggagagagctcatccgcagccaggccgtcaagaagaatcctggcattgcagcaaaatggtggaatcccccgcaggaaaaaaccatcgaggagcagctggacgaggaacatctggagtcgcacaaaaagtacaaggagcgcaaagagagaagggcacagcaggaacagttgctgctgcagaagcagttacagcagcagcagcagcagcccccatcgcagctctgcacagcccctgcctcttctcatgaacgcgcaagcatgattgacaaagcaaaggaggacattgtcacagagcagatagatttctctgctgctcgcaaacaatttcagctgatggagaattccaggcaagcggtggccaagggccagagtacacccaggctgttctccatcaagcctttctacaggcctctggggtcagtcaactcagacaagccactgactaatccgagaccaccttctgtcgggggacctccagaagacagtggtgcctcagccgccaagggacagaaatcccccggtgccctggagaccccatcggcagcaggaagccagggcaacacagcctctcaggggaaggaagggccctacagcgagccttctaaacgtgggcccttatctaaactgtgggctgaggatggagaatttacgagcgcccgggctgtcctcactgtggtcaaggatgatgaccatgggattttggatcagttctcaagatctgtcaatgtctccttgacccaagaggagcttgactctggtctggacgaattgtcggtgaggtctcaggataccacagtcctggagaccctatccaatgatttcagcatggacaacatcagtgacagcggggcatccaatgagacaaccaatgccctccaggaaaattcactggctgatttttctctgccccagacaccacaaactgacaacccctcagagggccgaggagaaggcgtctccaagtcatttagtgatcatggtttctattccccttcctccacgctgggggactctccgttggttgatgaccccttggagtatcaggctggcctcctggtgcagaatgccattcaacaagccatagccgagcaggtggataaagctgtgtccaaaaccagcagggatggagcagagcaacagggacctgaagcgactgtagaggaagctgaagctgcggctttcggctcagaaaagcctcagagcatgtttgagccacctcaggtgtcttctcctgttcaagagaaaagggatgtattaccaaagattctgcctgctgaagacagggcgctcagggaaagggggcccccccagccactgccagctgtgcagcccagtggcccgattaacatggaggagaccaggcccgaaggaagctatttcagcaagtactcggaggcagctgagctgagaagcacagcctccctcctggccactcaagaatctgacgtgatggttgggcctttcaagctgaggtccaggaaacagcggactttgtccatgattgaggaagagatccgagcagctcaggaaagggaagaggagctgaagaggcagagacaagtcttgcagagtacgcagagccccaggacaaagaatgccccatcactgccctccagaacatgctacaaaactgctccagggaaaatagagaaagtcaaacctcctccatcccccaccactgaaggccccagcttgcagcctgacttagcccctgaagaggctgccggaacccagcggcccaagaatctgatgcagaccctcatggaagactatgagacacacaaatctaaaaggcgcgagagaatggatgatagtagttacacttctaagttactgtcttgcaaggtgacttccgaggtcctcgaggccacacgggttaatcgaagaaagagcgcactggctttgcgctgggaagcagggatctatgccaaccaggaggaagaagacaacgaataa

SEQ ID NO: 445 - DNA, 4400 bp, Homo sapiens
  source 1..4400: mol_type = unassigned DNA
tactggaggggaagcgaggaggcggggaaggggcgggccccaggagcaggcgggcggggctccccgccctccagcgcgcccggaggctaccactccctgcagatgcgctggccccagcccggggctgccgctcgccttcccccggagtctcctggacccccggagtctcctggacccccggagcgggaggcagcggccgcgcggcgctggactggagcagaaccccaggactgcgcccccgggagcgggcgcccagagaagcctccccagctttctgaggatgatatctggctaaaaagcgagggagacaactatagtgccaccctcctggagcctgctgccagctctctttccccagatcacaaaaacatggaaattgaggtgtctgttgcagaatgtaaaagtgttcctggaatcacctctaccccacatcccatggaccatccctccgctttctattcacccccgcataatggcctccttactgatcaccacgaatccctggataatgatgttgccagagagatccgctatctagatgaggtgctagaggccaactgctgtgattctgctgtggatggaacgtacaatggaacatcctccccagagcctggtgcagtggttctggtgggcggcctaagcccccctgtccacgaggcgacccagccagaacccactgaaagaacagctagccggcaggcacctcctcacatcgagctcagtaatagcagccctgaccccatggcagaggcagaaagaacaaatggccattcccccagccagcctagagatgcgctgggggacagcctgcaggtgcctgtcagccccagctccacaaccagctcacggtgttcttcccgagatggagagttcactctcaccacactgaaaaaggaggccaagtttgagctgcgtgccttccatgaggacaagaagccctccaagctctttgaggatgacgagcatgagaaagaacaatactgcattagaaaagtgaggccttcagaggagatgctggagctggaaaaggagaggagagagctcatccgcagccaggccgtcaagaagaatcctggcattgcagcaaaatggtggaatcccccgcaggaaaaaaccatcgaggagcagctggacgaggaacatctggagtcgcacaaaaagtacaaggagcgcaaagagagaagggcacagcaggaacagttgctgctgcagaagcagttacagcagcagcagcagcagcccccatcgcagctctgcacagcccctgcctcttctcatgaacgcgcaagcatgattgacaaagcaaaggaggacattgtcacagagcagatagatttctctgctgctcgcaaacaatttcagctgatggagaattccaggcaagcggtggccaagggccagagtacacccaggctgttctccatcaagcctttctacaggcctctggggtcagtcaactcagacaagccactgactaatccgagaccaccttctgtcgggggacctccagaagacagtggtgcctcagccgccaagggacagaaatcccccggtgccctggagaccccatcggcagcaggaagccagggcaacacagcctctcaggggaaggaagggccctacagcgagccttctaaacgtgggcccttatctaaactgtgggctgaggatggagaatttacgagcgcccgggctgtcctcactgtggtcaaggatgatgaccatgggattttggatcagttctcaagatctgtcaatgtctccttgacccaagaggagcttgactctggtctggacgaattgtcggtgaggtctcaggataccacagtcctggagaccctatccaatgatttcagcatggacaacatcagtgacagcggggcatccaatgagacaaccaatgccctccaggaaaattcactggctgatttttctctgccccagacaccacaaactgacaacccctcagagggccgaggagaaggcgtctccaagtcatttagtgatcatggtttctattccccttcctccacgctgggggactctccgttggttgatgaccccttggagtatcaggctggcctcctggtgcagaatgccattcaacaagccatagccgagcaggtggataaagctgtgtccaaaaccagcagggatggagcagagcaacagggacctgaagcgactgtagaggaagctgaagctgcggctttcggctcagaaaagcctcagagcatgtttgagccacctcaggtgtcttctcctgttcaagagaaaagggatgtattaccaaagattctgcctgctgaagacagggcgctcagggaaagggggcccccccagccactgccagctgtgcagcccagtggcccgattaacatggaggagaccaggcccgaaggaagctatttcagcaagtactcggaggcagctgagctgagaagcacagcctccctcctggccactcaagaatctgacgtgatggttgggcctttcaagctgaggtccaggaaacagcggactttgtccatgattgaggaagagatccgagcagctcaggaaagggaagaggagctgaagaggcagagacaagtcttgcagagtacgcagagccccaggacaaagaatgccccatcactgccctccagaacatgctacaaaactgctccagggaaaatagagaaagtcaaacctcctccatcccccaccactgaaggccccagcttgcagcctgacttagcccctgaagaggctgccggaacccagcggcccaagaatctgatgcagaccctcatggaagactatgagacacacaaatctaaaaggcgcgagagaatggatgatagtagttacacttctaagttactgtcttgcaaggtgacttccgaggtcctcgaggccacacgggttaatcgaagaaagagcgcactggctttgcgctgggaagcagggatctatgccaaccaggaggaagaagacaacgaataaacttccttcaacccaggaagcgtctttggtgcttgggagaccaagaaaccaagaaattaacaactgaaagcattttaatggactatttattaaagtgcaaacaaactcagcaatccttatgtagaccagaagctgcaatatacaatgatgaaaatgaaacgaaaaggaagtccccccatcagactctggacacccaggaatcaaaagagaaaggacttttttggtgactcaatcccagtgtctggtttggggccaatctacaatggatccaaaaggacaaaacatgttacaagcaaatcaacatagttgctgcaggcggaactgagaccagcctctctgggcgatgaaggacaatggtggtagggccacttagagagcagtagggcccaggctggtgcagcctacatggcacaggatatttccctgcaccagtttcccacctgtcacttgcagcatcagagggtgttgcattaactccattttctccagcagccataaaatgaatggcgtttctctccatatttgcccagaagaggcagttatgattccacttctcctacatttaattatttttaattgagaacaactcatgatcacaattcataaaatccatattttaagacaatagttcttcatgtcacaaacacaatctattctacatgaggaggctgagaaaggggaagagaaaaacaaaccaaatggatgatgttagctttaggatcgtgtctgcttataatattcactgatctgcagtttatgagaacacattttcacagttatgtttcttcataggaaaactatatttagtgggcaacaactatttttatgatgggatgggggagtatatacacgtatagaatctgtacgcgttgaacaacttggttcaagatggtgggggcatttttagagcggcaataattgaaaaaaaaggcgaactctgccttggagaggtagatgataagaaataaaaaggtgtttataactattttgtattataaagtgggccttagagataggaagaagaatgatggattccttttggatcaatcagaaaggaaacacgaaagaaaagtcaggaaggtagagagagaaaaagggagggaaggagaaagaatgggaataaaataaggaggtaagagatactatttttgctgagcaaccagtgtgtttcaggatgatacaaagaaaaatatagaatagaaataagtgcaggcttggaatcagctacaaatcctaaagatggggtgtgtgtggatgtgtgtgtgtgtgtgtgtacaccattgtgtgtttgtaaaatgtgtatgttcatgagtaagggtgtgtgtgtgtgtgtattaaaattccagagtgaccgtggcacttgggtgtacaggtaattcctccagagctgtttgctggcttcaggagtggag

SEQ ID NO: 446 - DNA, 2881 bp, Homo sapiens
  source 1..2881: mol_type = unassigned DNA
ccagctggcagtcaaggctgtaggagggcatggagagttgaagaaaaaagcagtatcttgaggcagactggaagagtcatcacagcatccaaatcaacaagaaaacatcattccagggtcctacatgatggcgtactctgatactacaatgatgtctgatgatattgactggttacgcagccacaggggtgtgtgcaaggtagatctctacaacccagaaggacagcaagatcaggaccggaaagtgatatgctttgtcgatgtgtccaccctgaatgtagaagataaagattacaaggatgctgctagttccagctcagaaggcaacttaaacctgggaagtctggaagaaaaagagattatcgtgatcaaggacactgagaagaaagaccagtctaagacagagggatctgtatgccttttcaaacaagctccctctgatcctgtaagtgtcctcaactggcttctcagtgatctccagaagtatgccttgggtttccaacatgcactgagcccctcaacctctacctgtaaacataaagtaggagacacagagggcgaatatcacagagcatcctctgagaactgctacagtgtctatgccgatcaagtgaacatagattatttgatgaacagacctcaaaacctacgtctagaaatgacagcagctaaaaacaccaacaataatcaaagtccttcagctcctccagccaaacctcctagcactcagagagcagtcatttcccctgatggagaatgttctatagatgacctttccttctacgtcaaccgactatcttctctggtaatccagatggcccataaggaaatcaaggagaagttggaaggtaaaagcaaatgccttcatcattcaatctgtccatcccctgggaacaaagagagaatcagtccccgaactcctgcgagcaagattgcttctgaaatggcctatgaagctgtggaactgacagctgcagaaatgcgtggcactggagaggagtccagggaaggtggccagaaaagctttctatatagcgaattatccaacaagagcaaaagtggagacaaacagatgtcccagagagagagcaaagaatttgcagattccatcagcaaggggctcatggtttatgcaaatcaggtggcatctgacatgatggtctctctcatgaagaccttgaaagtgcacagctctgggaagccaattccagcatctgtggtcctgaagagggtgttgctaaggcacaccaaggagattgtgtccgatttgattgattcttgcatgaagaacctgcataatattactggggtcctgatgactgactcagactttgtctcagctgtcaagagaaatctgttcaaccagtggaaacaaaatgctacagacatcatggaggccatgctgaagcgcttggtcagtgcccttataggtgaggagaaggagactaagtctcagagtctgtcatatgcatctttaaaagctgggtcccatgatcccaaatgcaggaatcagagtcttgaattctccaccatgaaagctgaaatgaaagagagggacaaaggcaaaatgaaatcagacccatgcaagtcactgactagtgctgagaaagtcggtgaacacattctcaaagagggcctaaccatctggaaccaaaagcaaggaaactcatgcaaggtggctaccaaagcatgcagcaataaagatgagaaaggagaaaagatcaatgcttccacagattcactggccaaggacctgattgtctctgcccttaagctgatccagtaccatctgacccagcagactaagggcaaagatacatgtgaagaagactgtcctggttccaccatgggctatatggctcagagtactcaatatgaaaagtgtggaggtggccaaagtgccaaagcactttcagtgaaacaactagaatctcacagagcccctggaccatccacctgtcaaaaggagaaccaacacctggactcccagaaaatggatatgtcaaacatcgttctaatgctgattcagaaactgcttaatgagaaccccttcaaatgtgaggatccatgcgaaggtgagaacaagtgttctgagcccagggcaagcaaagcagcttccatgtccaacagatctgacaaagcggaagaacaatgccaggagcatcaagaacttgactgtaccagtgggatgaagcaagcgaacgggcaatttatagataaactagtagaatctgtgatgaagctctgccttatcatggctaagtatagcaacgatggggcagcccttgctgagttggaagaacaagcagcctcggcaaataagcccaatttcaggggcaccagatgcattcacagtggtgcaatgccacagaactatcaagactctcttggacatgaagtaattgtcaataatcagtgctctacaaatagcttgcagaagcagctccaggctgtcctgcagtggattgcagcctcccagtttaacgtgcccatgctctacttcatgggagataaggatggacaactggaaaagcttcctcaggtttcagctaaagcagcagagaaggggtacagtgtaggaggtcttcttcaagaggtcatgaagtttgccaaggaacggcaaccagatgaagctgtgggaaaggtggccaggaaacagttgctggactggctgctcgctaacctgtgagctgatccttgactcctcttcatcttagcccccctagcagcattccatcccagccagagcacccccaccatcaggccagtcaactgcacaatacacaactgtatttcccaatacacttgagcagttgcctgtgaatgtaagaggtgtcaacaaactgggaaataaaataaaaaaaaataataataaatgtgt

SEQ ID NO: 447 - DNA, 2886 bp, Homo sapiens
  source 1..2886: mol_type = unassigned DNA
ccagctggcagtcaaggctgtaggagggcatggagagttgaagaaaaaagcagtatcttgaggcagactggaagagtcatcacagcatccaaatcaacaagaaaacatcattccagggtcctacatgatggcgtactctgatactacaatgatgtctgatgatattgactggttacgcagccacaggggtgtgtgcaaggtagatctctacaacccagaaggacagcaagatcaggaccggaaagtgatatgctttgtcgatgtgtccaccctgaatgtagaagataaagattacaaggatgctgctagttccagctcagaaggcaacttaaacctgggaagtctggaagaaaaagagattatcgtgatcaaggacactgagaagaaagaccagtctaagacagagggatctgtatgccttttcaaacaagctccctctgatcctgtaagtgtcctcaactggcttctcagtgatctccagaagtatgccttgggtttccaacatgcactgagcccctcaacctctacctgtaaacataaagtaggagacacagagggcgaatatcacagagcatcctctgagaactgctacagtgtctatgccgatcaagtgaacatagattatttgatgaacagacctcaaaacctacgtctagaaatgacagcagctaaaaacaccaacaataatcaaagtccttcagctcctccagccaaacctcctagcactcagagagcagtcatttcccctgatggagaatgttctatagatgacctttccttctacgtcaaccgactatcttctctggtaatccagatggcccataaggaaatcaaggagaagttggaaggtaaaagcaaatgccttcatcattcaatctgtccatcccctgggaacaaagagagaatcagtccccgaactcctgcgagcaagattgcttctgaaatggcctatgaagctgtggaactgacagctgcagaaatgcgtggcactggagaggagtccagggaaggtggccagaaaagctttctatatagcgaattatccaacaagagcaaaagtggagacaaacagatgtcccagagagagagcaaagaatttgcagattccatcagcaaggggctcatggtttatgcaaatcaggtggcatctgacatgatggtctctctcatgaagaccttgaaagtgcacagctctgggaagccaattccagcatctgtggtcctgaagagggtgttgctaaggcacaccaaggagattgtgtccgatttgattgattcttgcatgaagaacctgcataatattactggggtcctgatgactgactcagactttgtctcagctgtcaagagaaatctgttcaaccagtggaaacaaaatgctacagacatcatggaggccatgctgaagcgcttggtcagtgcccttataggtgaggagaaggagactaagtctcagagtctgtcatatgcatctttaaaagctgggtcccatgatcccaaatgcaggaatcagagtcttgaattctccaccatgaaagctgaaatgaaagagagggacaaaggcaaaatgaaatcagacccatgcaagtcactgactagtgctgagaaagtcggtgaacacattctcaaagagggcctaaccatctggaaccaaaagcaaggaaactcatgcaaggtggctaccaaagcatgcagcaataaagatgagaaaggagaaaagatcaatgcttccacagattcactggccaaggacctgattgtctctgcccttaagctgatccagtaccatctgacccagcagactaagggcaaagatacatgtgaagaagactgtcctggttccaccatgggctatatggctcagagtactcaatatgaaaagtgtggaggtggccaaagtgccaaagcactttcagtgaaacaactagaatctcacagagcccctggaccatccacctgtcaaaaggagaaccaacacctggactcccagaaaatggatatgtcaaacatcgttctaatgctgattcagaaactgcttaatgagaaccccttcaaatgtgaggatccatgcgaaggtgagaacaagtgttctgagcccagggcaagcaaagcagcttccatgtccaacagatctgacaaagcggaagaacaatgccaggagcatcaagaacttgactgtaccagtgggatgaagcaagcgaacgggcaatttatagataaactagtagaatctgtgatgaagctctgccttatcatggctaagtatagcaacgatggggcagcccttgctgagttggaagaacaagcagcctcggcaaataagcccaatttcaggggcaccagatgcattcacagtggtgcaatgccacagaactatcaagactctcttggacatgaagtaattgtcaataatcagtgctctacaaatagcttgcagaagcagctccaggctgtcctgcagtggattgcagcctcccagtttaacgtgcccatgctctacttcatgggagataaggatggacaactggaaaagcttcctcaggtttcagctaaagcagcagagaaggggtacagtgtaggaggtcttcttcaagaggtcatgaagtttgccaaggaacggcaaccagatgaagctgtgggaaaggtggccaggaaacagttgctggactggctgctcgctaacctgtgagctgatccttgactcctcttcatcttagcccccctagcagcattccatcccagccagagcacccccaccatcaggccagtcaactgcacaatacacaactgtatttcccaatacacttgagcagttgcctgtgaatgtaagaggtgtcaacaaactgggaaataaaataaaaaaaaataataataaatgtgtcattg

SEQ ID NO: 448 - DNA, 1764 bp, Homo sapiens
  source 1..1764: mol_type = unassigned DNA
ccagctggcagtcaaggctgtaggagggcatggagagttgaagaaaaaagcagtatcttgaggcagactggaagagtcatcacagcatccaaatcaacaagaaaacatcattccagggtcctacatgatggcgtactctgatactacaatgatgtctgatgatattgactggttacgcagccacaggggtgtgtgcaaggtagatctctacaacccagaaggacagcaagatcaggaccggaaagtgatatgctttgtcgatgtgtccaccctgaatgtagaagataaagattacaaggatgctgctagttccagctcagaaggcaacttaaacctgggaagtctggaagaaaaagagattatcgtgatcaaggacactgagaagaaagaccagtctaagacagagggatctgtatgccttttcaaacaagctccctctgatcctgtaagtgtcctcaactggcttctcagtgatctccagaagtatgccttgggtttccaacatgcactgagcccctcaacctctacctgtaaacataaagtaggagacacagagggcgaatatcacagagcatcctctgagaactgctacagtgtctatgccgatcaagtgaacatagattatttgatgaacagacctcaaaacctacgtctagaaatgacagcagctaaaaacaccaacaataatcaaaatacatgtgaagaagactgtcctggttccaccatgggctatatggctcagagtactcaatatgaaaagtgtggaggtggccaaagtgccaaagcactttcagtgaaacaactagaatctcacagagcccctggaccatccacctgtcaaaaggagaaccaacacctggactcccagaaaatggatatgtcaaacatcgttctaatgctgattcagaaactgcttaatgagaaccccttcaaatgtgaggatccatgcgaaggtgagaacaagtgttctgagcccagggcaagcaaagcagcttccatgtccaacagatctgacaaagcggaagaacaatgccaggagcatcaagaacttgactgtaccagtgggatgaagcaagcgaacgggcaatttatagataaactagtagaatctgtgatgaagctctgccttatcatggctaagtatagcaacgatggggcagcccttgctgagttggaagaacaagcagcctcggcaaataagcccaatttcaggggcaccagatgcattcacagtggtgcaatgccacagaactatcaagactctcttggacatgaagtaattgtcaataatcagtgctctacaaatagcttgcagaagcagctccaggctgtcctgcagtggattgcagcctcccagtttaacgtgcccatgctctacttcatgggagataaggatggacaactggaaaagcttcctcaggtttcagctaaagcagcagagaaggggtacagtgtaggaggtcttcttcaagaggtcatgaagtttgccaaggaacggcaaccagatgaagctgtgggaaaggtggccaggaaacagttgctggactggctgctcgctaacctgtgagctgatccttgactcctcttcatcttagcccccctagcagcattccatcccagccagagcacccccaccatcaggccagtcaactgcacaatacacaactgtatttcccaatacacttgagcagttgcctgtgaatgtaagaggtgtcaacaaactgggaaataaaataaaaaaaaataataataaatgtgtcattg

SEQ ID NO: 449 - DNA, 2864 bp, Homo sapiens
  source 1..2864: mol_type = unassigned DNA
agtctggtccaacagctgacaggggtggcagccaactgcaggtgcccaagaacttggcacttctcagttccatctaaaggggcacatctcccttctgggtgtcacgttttcagccaaacatctaaaagaacttcatcatcaagatgtctgatgatattgactggttacgcagccacaggggtgtgtgcaaggtagatctctacaacccagaaggacagcaagatcaggaccggaaagtgatatgctttgtcgatgtgtccaccctgaatgtagaagataaagattacaaggatgctgctagttccagctcagaaggcaacttaaacctgggaagtctggaagaaaaagagattatcgtgatcaaggacactgagaagaaagaccagtctaagacagagggatctgtatgccttttcaaacaagctccctctgatcctgtaagtgtcctcaactggcttctcagtgatctccagaagtatgccttgggtttccaacatgcactgagcccctcaacctctacctgtaaacataaagtaggagacacagagggcgaatatcacagagcatcctctgagaactgctacagtgtctatgccgatcaagtgaacatagattatttgatgaacagacctcaaaacctacgtctagaaatgacagcagctaaaaacaccaacaataatcaaagtccttcagctcctccagccaaacctcctagcactcagagagcagtcatttcccctgatggagaatgttctatagatgacctttccttctacgtcaaccgactatcttctctggtaatccagatggcccataaggaaatcaaggagaagttggaaggtaaaagcaaatgccttcatcattcaatctgtccatcccctgggaacaaagagagaatcagtccccgaactcctgcgagcaagattgcttctgaaatggcctatgaagctgtggaactgacagctgcagaaatgcgtggcactggagaggagtccagggaaggtggccagaaaagctttctatatagcgaattatccaacaagagcaaaagtggagacaaacagatgtcccagagagagagcaaagaatttgcagattccatcagcaaggggctcatggtttatgcaaatcaggtggcatctgacatgatggtctctctcatgaagaccttgaaagtgcacagctctgggaagccaattccagcatctgtggtcctgaagagggtgttgctaaggcacaccaaggagattgtgtccgatttgattgattcttgcatgaagaacctgcataatattactggggtcctgatgactgactcagactttgtctcagctgtcaagagaaatctgttcaaccagtggaaacaaaatgctacagacatcatggaggccatgctgaagcgcttggtcagtgcccttataggtgaggagaaggagactaagtctcagagtctgtcatatgcatctttaaaagctgggtcccatgatcccaaatgcaggaatcagagtcttgaattctccaccatgaaagctgaaatgaaagagagggacaaaggcaaaatgaaatcagacccatgcaagtcactgactagtgctgagaaagtcggtgaacacattctcaaagagggcctaaccatctggaaccaaaagcaaggaaactcatgcaaggtggctaccaaagcatgcagcaataaagatgagaaaggagaaaagatcaatgcttccacagattcactggccaaggacctgattgtctctgcccttaagctgatccagtaccatctgacccagcagactaagggcaaagatacatgtgaagaagactgtcctggttccaccatgggctatatggctcagagtactcaatatgaaaagtgtggaggtggccaaagtgccaaagcactttcagtgaaacaactagaatctcacagagcccctggaccatccacctgtcaaaaggagaaccaacacctggactcccagaaaatggatatgtcaaacatcgttctaatgctgattcagaaactgcttaatgagaaccccttcaaatgtgaggatccatgcgaaggtgagaacaagtgttctgagcccagggcaagcaaagcagcttccatgtccaacagatctgacaaagcggaagaacaatgccaggagcatcaagaacttgactgtaccagtgggatgaagcaagcgaacgggcaatttatagataaactagtagaatctgtgatgaagctctgccttatcatggctaagtatagcaacgatggggcagcccttgctgagttggaagaacaagcagcctcggcaaataagcccaatttcaggggcaccagatgcattcacagtggtgcaatgccacagaactatcaagactctcttggacatgaagtaattgtcaataatcagtgctctacaaatagcttgcagaagcagctccaggctgtcctgcagtggattgcagcctcccagtttaacgtgcccatgctctacttcatgggagataaggatggacaactggaaaagcttcctcaggtttcagctaaagcagcagagaaggggtacagtgtaggaggtcttcttcaagaggtcatgaagtttgccaaggaacggcaaccagatgaagctgtgggaaaggtggccaggaaacagttgctggactggctgctcgctaacctgtgagctgatccttgactcctcttcatcttagcccccctagcagcattccatcccagccagagcacccccaccatcaggccagtcaactgcacaatacacaactgtatttcccaatacacttgagcagttgcctgtgaatgtaagaggtgtcaacaaactgggaaataaaataaaaaaaaataataa

SEQ ID NO: 450 - DNA, 892 bp, Homo sapiens
  source 1..892: mol_type = unassigned DNA
gctgacaggggtggcagccaactgcaggtgcccaagaacttggcacttctcagttccatctaaaggggcacatctcccttctgggtgtcacgttttcagccaaacatctaaaagaacttcatcatcaagatgtctgatgatattgactggttacgcagccacaggggtgtgtgcaaggtagatctctacaacccagaaggacagcaagatcaggaccggaaagtgatatgctttgtcgatgtgtccaccctgaatgtagaagataaagattacaaggatgctgctagttccagctcagaaggcaacttaaacctgggaagtctggaagaaaaagagattatcgtgatcaaggacactgagaagaaagaccagtctaagacagagggatctgtatgccttttcaaacaagctccctctgatcctgtaagtgtcctcaactggcttctcagtgatctccagaagtatgccttgggtttccaacatgcactgagcccctcaacctctacctgtaaacataaagtaggagacacagagggcgaatatcacagagcatcctctgagaactgctacagtgtctatgccgatcaagtgaacatagattatttgatgaacagacctcaaaacctacgtctagaaatgacagcagctaaaaacaccaacaataatcaaagtccttcagctcctccagccaaacctcctagcactcagagagcagtcatttcccctgatggagaatgttctatagatgacctttccttctacgtcaaccgactatcttctctggtaatccagatggcccataaggaaatcaaggagaagttggaaggtaaaagcaaatgccttcatcattcaatctgtccatcccctgggaacaaagagagaatcagtcccc

SEQ ID NO: 451 - DNA, 783 bp, Homo sapiens
  source 1..783: mol_type = unassigned DNA
agtctggtccaacagctgacaggggtggcagccaactgcaggtgcccaagaacttggcacttctcagttccatctaaaggggcacatctcccttctgggtgtcacgttttcagccaaacatctaaaagaacttcatcatcaagatgtctgatgatattgactggttacgcagccacaggggtgtgtgcaaggtagatctctacaacccagaaggacagcaagatcaggaccggaaagtgatatgctttgtcgatgtgtccaccctgaatgtagaagataaagattacaaggatgctgctagttccagctcagaaggcaacttaaacctgggaagtctggaagaaaaagagattatcgtgatcaaggacactgagaagaaagaccagtctaagacagagggatctgtatgccttttcaaacaagctccctctgatcctgtaagtgtcctcaactggcttctcagtgatctccagaagtatgccttgggtttccaacatgcactgagcccctcaacctctacctgtaaacataaagtaggagacacagagggcgaatatcacagagcatcctctgagaactgctacagtgtctatgccgatcaagtgaacatagattatttgatgaacagacctcaaaacctacgtctagaaatgacagcagctaaaaacaccaacaataatcaaaatacatgtgaagaagactgtcctggttccaccatgggctatatggctcagagtactcaatatgaaaagtgtggaggtggccaaagtgccaaagcacttt

SEQ ID NO: 452 - DNA, 1247 bp, Homo sapiens
  source 1..1247: mol_type = unassigned DNA
gctgcgccggcgccgccgggagcgctaggcctggtccctcttcctagaatagcgttgcgcgcatgcgccttgacgagtgagccggggagccatggacaactgtttggcggccgcagcgctgaatggggtggaccgacgttccctgcagcgttcagcaaggctggctctagaagtgctggagagggccaagaggagggcggtggactggcatgccctggagcgtcccaaaggctgcatgggggtccttgcccgggaggcgccccacctagagaaacagccggcagccggcccgcagcgcgttctcccgggagagaaatattattcatctgtgccagaggaaggaggggcaacccatgtctatcgttatcacagaggcgagtcgaagctgcacatgtgcttggacatagggaatggtcagagaaaagacagaaaaaagacatcccttggtcctggaggcagctatcaaatatcagagcatgctccagaggcatcccagcctgctgagaacatctctaaggacctctacatagaagtatatccagggacctattctgtcactgtgggctcaaatgacttaaccaagaagactcatgtggtagcagttgattctggacaaagcgtggacctggtcttccctgtgtgatgttgaccatcactgccatcacatcacctttttttaagtagtaagaataaagccactgtatgattctcttaatagctatacattaatcctgtttttagtgctgactgggtcagccttccgggaactggagtctgtctctttcagtgcttttttgtttgtttggttggtttttttttgagacagtctcactctgttgcccaggctggagtgcagtggcgtgatctcggctcactgcaagttccgcctcccgggttcacaccattctcctgcctcagcctcccgagtagctggcactacaggcacccgccaccatgcccggctattttttttgtatttttagtagagacggggtttcaccatgttggccaggatggtctcgatctcttgacctcgtgatccacccaccttggcctcccaaagtgttgggattacaggcgtgagccaccgcgcccggcctcagtgccttttttaacttgagggtgtagaggtcctccacgcttgtttgcctgaaagtaatataatgatgctgtctgaacaggttttactgcttgctttccaagtaaaggttaattatgataataaagagatttggaaatgaagagaa

SEQ ID NO: 453 - DNA, 1232 bp, Homo sapiens
  source 1..1232: mol_type = unassigned DNA
ccgggagcgctaggcctggtccctcttcctagaatagcgttgcgcgcatgcgccttgacgagtgagccggggagccatggacaactgtttggcggccgcagcgctgaatggggtggaccgacgttccctgcagcgttcagcaaggctggctctagaagtgctggagagggccaagaggagggcggtggactggcatgccctggagcgtcccaaaggctgcatgggggtccttgcccgggaggcgccccacctagagaaacagccggcagccggcccgcagcgcgttctcccgggagagagagaagagagacccccaacccttagtgcttccttcagaacaatggctgaattcatggactatacttcaagtcagtgtgggaaatattattcatctgtgccagaggaaggaggggcaacccatgtctatcgttatcacagaggcgagtcgaagctgcacatgtgcttggacatagggaatggtcaggctgagaacatctctaaggacctctacatagaagtatatccagggacctattctgtcactgtgggctcaaatgacttaaccaagaagactcatgtggtagcagttgattctggacaaagcgtggacctggtcttccctgtgtgatgttgaccatcactgccatcacatcacctttttttaagtagtaagaataaagccactgtatgattctcttaatagctatacattaatcctgtttttagtgctgactgggtcagccttccgggaactggagtctgtctctttcagtgcttttttgtttgtttggttggtttttttttgagacagtctcactctgttgcccaggctggagtgcagtggcgtgatctcggctcactgcaagttccgcctcccgggttcacaccattctcctgcctcagcctcccgagtagctggcactacaggcacccgccaccatgcccggctattttttttgtatttttagtagagacggggtttcaccatgttggccaggatggtctcgatctcttgacctcgtgatccacccaccttggcctcccaaagtgttgggattacaggcgtgagccaccgcgcccggcctcagtgccttttttaacttgagggtgtagaggtcctccacgcttgtttgcctgaaagtaatataatgatgctgtctgaacaggttttactgcttgctttccaagtaaaggttaattatgataataaagagatttggaaatgaagagaa

SEQ ID NO: 454 - DNA, 1327 bp, Homo sapiens
  source 1..1327: mol_type = unassigned DNA
ctgcgccggcgccgccgggagcgctaggcctggtccctcttcctagaatagcgttgcgcgcatgcgccttgacgagtgagccggggagccatggacaactgtttggcggccgcagcgctgaatggggtggaccgacgttccctgcagcgttcagcaaggctggctctagaagtgctggagagggccaagaggagggcggtggactggcatgccctggagcgtcccaaaggctgcatgggggtccttgcccgggaggcgccccacctagagaaacagccggcagccggcccgcagcgcgttctcccgggagagagagaagagagacccccaacccttagtgcttccttcagaacaatggctgaattcatggactatacttcaagtcagtgtgggaaatattattcatctgtgccagaggaaggaggggcaacccatgtctatcgttatcacagaggcgagtcgaagctgcacatgtgcttggacatagggaatggtcagagaaaagacagaaaaaagacatcccttggtcctggaggcagctatcaaatatcagagcatgctccagaggcatcccagcctgctgagaacatctctaaggacctctacatagaagtatatccagggacctattctgtcactgtgggctcaaatgacttaaccaagaagactcatgtggtagcagttgattctggacaaagcgtggacctggtcttccctgtgtgatgttgaccatcactgccatcacatcacctttttttaagtagtaagaataaagccactgtatgattctcttaatagctatacattaatcctgtttttagtgctgactgggtcagccttccgggaactggagtctgtctctttcagtgcttttttgtttgtttggttggtttttttttgagacagtctcactctgttgcccaggctggagtgcagtggcgtgatctcggctcactgcaagttccgcctcccgggttcacaccattctcctgcctcagcctcccgagtagctggcactacaggcacccgccaccatgcccggctattttttttgtatttttagtagagacggggtttcaccatgttggccaggatggtctcgatctcttgacctcgtgatccacccaccttggcctcccaaagtgttgggattacaggcgtgagccaccgcgcccggcctcagtgccttttttaacttgagggtgtagaggtcctccacgcttgtttgcctgaaagtaatataatgatgctgtctgaacaggttttactgcttgctttccaagtaaaggttaattatgataataaagagatttggaaatgaagagaa

SEQ ID NO: 455 - DNA, 1084 bp, Homo sapiens
  source 1..1084: mol_type = unassigned DNA
cggtggtctccagggaggtcgaggctggggctcccacccggatttggagcagggtcgccgcggcccagctgacccgccggcgtttgtacgttgtgtgcccactcagggagccatggacaactgtttggcggccgcagcgctgaatggggtggaccgacgttccctgcagcgttcagcaaggctggctctagaagtgctggagagggccaagaggagggcggtggactggcatgccctggagcgtcccaaaggctgcatgggggtccttgcccgggaggcgccccacctagagaaacagccggcagccggcccgcagcgcgttctcccgggagagaaatattattcatctgtgccagaggaaggaggggcaacccatgtctatcgttatcacagaggcgagtcgaagctgcacatgtgcttggacatagggaatggtcagagaaaagacagaaaaaagacatcccttggtcctggaggcagctatcaaatatcagagcatgctccagaggcatcccagcctgctgagaacatctctaaggacctctacatagaagtatatccagggacctattctgtcactgtgggctcaaatgacttaaccaagaagactcatgtggtagcagttgattctggacaaagcgtggacctggtcttccctgtgtgatgttgaccatcactgccatcacatcacctttttttaagtagtaagaataaagccactgtatgattctcttaatagctatacattaatcctgtttttagtgctgactgggtcagccttccgggaactggagtctgtctctttcagtgcttttttgtttgtttggttggtttttttttgagacagtctcactctgttgcccaggctggagtgcagtggcgtgatctcggctcactgcaagttccgcctcccgggttcacaccattctcctgcctcagcctcccgagtagctggcactacaggcacccgccaccatgcccggctattttttttgtatttttagtagagacggggtttcaccatgttggccaggatggtctcgatctcttgacctcgtgatccacccaccttggcctcccaaag

SEQ ID NO: 456 - DNA, 1022 bp, Homo sapiens
  source 1..1022: mol_type = unassigned DNA
gggagccatggacaactgtttggcggccgcagcgctgaatggggtggaccgacgttccctgcagcgttcagcaaggctggctctagaagtgctggagagggccaagaggagggcggtggactggcatgccctggagcgtcccaaaggctgcatgggggtccttgcccgggaggcgccccacctagagaaacagccggcagccggcccgcagcgcgttctcccgggagagagagaagagagacccccaacccttagtgcttccttcagaacaatggctgaattcatggactatacttcaagtcagtgtgggaaatattattcatctgtgccagaggaaggaggggcaacccatgtctatcgttatcacagaggcgagtcgaagctgcacatgtgcttggacatagggaatggtcagagaaaagacagaaaaaagacatcccttggtcctggaggcagctatcaaatatcagagcatgctccagaggcatcccagcctgctgagaacatctctaaggacctctacatagaagtatatccagggacctattctgtcactgtgggctcaaatgacttaaccaagaagactcatgtggtagcagttgattctggacaaagcgtggacctggtcttccctgtgtgatgttgaccatcactgccatcacatcacctttttttaagtagtaagaataaagccactgtatgattctcttaatagctatacattaatcctgtttttagtgctgactgggtcagccttccgggaactggagtctgtctctttcagtgcttttttgtttgtttggttggtttttttttgagacagtctcactctgttgcccaggctggagtgcagtggcgtgatctcggctcactgcaagttccgcctcccgggttcacaccattctcctgcctcagcctcccgagtagctggcactacaggcacccgccaccatgcccggctattttttttgtatttttagtagagacggggtttcaccatgttggccaggatggtctcgatc

SEQ ID NO: 457 - DNA, 2660 bp, Homo sapiens
  source 1..2660: mol_type = unassigned DNA
agatccggagcgcgtggcgggcgtcagcgcggtggccagcgcgcagaggcgggcgcggaggcggctagaaggtgaccgcggatcccagcttcctgcagccagccctgaaggatggctgccatattgggagacaccatcatggtggctaaaggccttgtcaagctgacccaggcggccgtggaaacccacctgcagcctccgctcccgaccagtcagcgcccccatccctgggtcatgcccacagcgagggcccagctcctgcctacgtggccagtggaccctttagagaagccgggttccccggccaggcctcctcccctctgggcagggccaacgggaggctctttgcaaaccccagagactcattctctgccatgggctttcagcgaaggttcttccaccaggaccaatcccctgttgggggcctcacagccgaggacattgagaaggcccggcaggctaaggctcgccccgagaacaagcagcacaaacagacgctcagcgagcatgcccgggagcggaaggtgcctgtgacgaggattggccggctggccaacttcggaggtctggccgtgggcctgggcttcggggcactggcagaggtcgccaagaagagcctgcgctccgaggacccctcagggaagaaggccgtgctgggttccagtcctttcctgtccgaggccaatgcagagcggatcgtgcgcacgctctgcaaggtgcgtggtgcggcactcaagctgggccagatgctgagcatccaggatgatgcctttatcaacccccacctggctaagatcttcgagcgggtgcggcagagcgcggacttcatgccactgaagcagatgatgaaaactctcaacaacgacctgggccccaactggcgggacaagttggaatacttcgaggagcggcccttcgccgccgcatccattgggcaggtgcacttggcccgaatgaagggcggccgcgaggtggccatgaagatccagtaccctggcgtggcccagagcatcaacagtgatgtcaacaacctcatggccgtgttgaacatgagcaacatgcttccagaaggcctgttccccgagcacctgatcgacgtgctgaggcgggagctggccctggagtgtgactaccagcgagaggccgcctgtgcccgcaagttcagggacctgctgaagggccaccccttcttctatgtgcctgagattgtggatgagctctgcagcccacatgtgctgaccacagagctggtgtctggcttccccctggaccaggccgaagggctcagccaggagattcggaacgagatctgctacaacatcctggttctgtgcctgagggagctgttcgagttccacttcatgcaaacagaccccaactggtccaacttcttctatgacccccagcagcacaaggtggctcttttggattttggggcaacgcgggaatatgacagatccttcaccgacctctacattcagatcatcagggctgctgccgacagggacagggagactgtgcgggcgaaatccatagagatgaagttcctcaccggctacgaggtcaaggtcatggaagacgcccacttggatgccatcctcatcctgggggaggccttcgcctctgatgagccttttgattttggcactcagagcaccaccgagaagatccacaacctgattcccgtcatgctgaggcaccgtctcgtccccccacccgaggaaacctactccctgcacaggaagatggggggctccttcctcatctgctccaagctgaaggcccgcttcccctgcaaggccatgttcgaggaggcctacagcaactactgcaagaggcaggcccagcagtagggctgcgggccacgcccaggccggctccgcgggaactctctccctcagacaggccaaaaaccagtagcgaggtcgtggtgatgctctttttaactcctttgcccaataaggggggtggctgcctggagccccgtagccagcgctttccacggtttctgttgctaaatggttgtagggtgagaagtgcaagaatgaagatgaagccccactgctcggtcagtctgcctccgtgtgtcctctgaaataagcagatgaagatgaaagggcaactttgttttcttctttttcctgatgtgaatgttaagcagaagggagagagtccttactcccttccaatctctgttcagtgcaaaacccagaaacatgaacagatacgattgtgggattttatcatctgtgtagtaggtgtgtgtatgtgtttctagagtgagatttgtgttttctgcccttttcctctccagccgatgggctggagctgggagaggtgctgagctaacagtgccaacaagtgctccttaagcctgcgaggcccaggcctgtggggctggttctcacctttgacagctgaatgttcctaaagaactgctgccccacagtgagggtgggagcagcggaacagggaatgccagacacaggctcgctgctgctggaaggcggggtgggacttccttcctctgtccggagaggcacaggtgtcaccagttccagccaaaggctcctcacaggcgctgtgaatttttgtacaagtcttgtaattatcgaatcaacaacttgtttcaatttaataaaaatgctcatgggaagtgc

SEQ ID NO: 458 - DNA, 2642 bp, Homo sapiens
  source 1..2642: mol_type = unassigned DNA
aaacagatccggagcgcgtggcgggcgtcagcgcggtggccagcgcgcagaggcgggcgcggaggcggctagaaggtgaccgcggatcccagcttcctgcagccagccctgaaggatggctgccatattgggagacaccatcatggtggctaaaggccttgtcaagctgacccaggcggccgtggaaacccacctgcagcacttgggcatcggaggggagctgatcatgggcccagctcctgcctacgtggccagtggaccctttagagaagccgggttccccggccaggcctcctcccctctgggcagggccaacgggaggctctttgcaaaccccagagactcattctctgccatgggctttcagcgaaggttcttccaccaggaccaatcccctgttgggggcctcacagccgaggacattgagaaggcccggcaggctaaggctcgccccgagaacaagcagcacaaacagacgctcagcgagcatgcccgggagcggaaggtgcctgtgacgaggattggccggctggccaacttcggaggtctggccgtgggcctgggcttcggggcactggcagaggtcgccaagaagagcctgcgctccgaggacccctcagggaagaaggccgtgctgggttccagtcctttcctgtccgaggccaatgcagagcggatcgtgcgcacgctctgcaaggtgcgtggtgcggcactcaagctgggccagatgctgagcatccaggatgatgcctttatcaacccccacctggctaagatcttcgagcgggtgcggcagagcgcggacttcatgccactgaagcagatgatgaaaactctcaacaacgacctgggccccaactggcgggacaagttggaatacttcgaggagcggcccttcgccgccgcatccattgggcaggtgcacttggcccgaatgaagggcggccgcgaggtggccatgaagatccagtaccctggcgtggcccagagcatcaacagtgatgtcaacaacctcatggccgtgttgaacatgagcaacatgcttccagaaggcctgttccccgagcacctgatcgacgtgctgaggcgggagctggccctggagtgtgactaccagcgagaggccgcctgtgcccgcaagttcagggacctgctgaagggccaccccttcttctatgtgcctgagattgtggatgagctctgcagcccacatgtgctgaccacagagctggtgtctggcttccccctggaccaggccgaagggctcagccaggagattcggaacgagatctgctacaacatcctggttctgtgcctgagggagctgttcgagttccacttcatgcaaacagaccccaactggtccaacttcttctatgacccccagcagcacaaggtggctcttttggattttggggcaacgcgggaatatgacagatccttcaccgacctctacattcagatcatcagggctgctgccgacagggacagggagactgtgcgggcgaaatccatagagatgaagttcctcaccggctacgaggtcaaggtcatggaagacgcccacttggatgccatcctcatcctgggggaggccttcgcctctgatgagccttttgattttggcactcagagcaccaccgagaagatccacaacctgattcccgtcatgctgaggcaccgtctcgtccccccacccgaggaaacctactccctgcacaggaagatggggggctccttcctcatctgctccaagctgaaggcccgcttcccctgcaaggccatgttcgaggaggcctacagcaactactgcaagaggcaggcccagcagtagggctgcgggccacgcccaggccggctccgcgggaactctctccctcagacaggccaaaaaccagtagcgaggtcgtggtgatgctctttttaactcctttgcccaataaggggggtggctgcctggagccccgtagccagcgctttccacggtttctgttgctaaatggttgtagggtgagaagtgcaagaatgaagatgaagccccactgctcggtcagtctgcctccgtgtgtcctctgaaataagcagatgaagatgaaagggcaactttgttttcttctttttcctgatgtgaatgttaagcagaagggagagagtccttactcccttccaatctctgttcagtgcaaaacccagaaacatgaacagatacgattgtgggattttatcatctgtgtagtaggtgtgtgtatgtgtttctagagtgagatttgtgttttctgcccttttcctctccagccgatgggctggagctgggagaggtgctgagctaacagtgccaacaagtgctccttaagcctgcgaggcccaggcctgtggggctggttctcacctttgacagctgaatgttcctaaagaactgctgccccacagtgagggtgggagcagcggaacagggaatgccagacacaggctcgctgctgctggaaggcggggtgggacttccttcctctgtccggagaggcacaggtgtcaccagttccagccaaaggctcctcacaggcgctgtgaatttttgtacaagtcttgtaattatcgaatcaacaacttgtttcaatttaataaaaatgctcatgggaagtgct

SEQ ID NO: 459 - DNA, 2872 bp, Homo sapiens
  source 1..2872: mol_type = unassigned DNA
gttggtaaacagatccggagcgcgtggcgggcgtcagcgcggtggccagcgcgcagaggcgggcgcggaggcggctagaaggtgaccgcggatcccagcttcctgcagccagccctgaaggatggctgccatattgggagacaccatcatggtggctaaaggccttgtcaagctgacccaggcggccgtggaaacccacctgcagcacttgggcatcggaggggagctgatcatggcggccagggccctgcagtccacggctgtggagcagattggcatgttcttggggaaggtgcagggtcaggataaacatgaagaatattttgctgagaacttcggcggcccagaaggggagttccacttctcagtcccgcatgcagccggagcctccacagacttctcttcagcctccgctcccgaccagtcagcgcccccatccctgggtcatgcccacagcgagggcccagctcctgcctacgtggccagtggaccctttagagaagccgggttccccggccaggcctcctcccctctgggcagggccaacgggaggctctttgcaaaccccagagactcattctctgccatgggctttcagcgaaggttcttccaccaggaccaatcccctgttgggggcctcacagccgaggacattgagaaggcccggcaggctaaggctcgccccgagaacaagcagcacaaacagacgctcagcgagcatgcccgggagcggaaggtgcctgtgacgaggattggccggctggccaacttcggaggtctggccgtgggcctgggcttcggggcactggcagaggtcgccaagaagagcctgcgctccgaggacccctcagggaagaaggccgtgctgggttccagtcctttcctgtccgaggccaatgcagagcggatcgtgcgcacgctctgcaaggtgcgtggtgcggcactcaagctgggccagatgctgagcatccaggatgatgcctttatcaacccccacctggctaagatcttcgagcgggtgcggcagagcgcggacttcatgccactgaagcagatgatgaaaactctcaacaacgacctgggccccaactggcgggacaagttggaatacttcgaggagcggcccttcgccgccgcatccattgggcaggtgcacttggcccgaatgaagggcggccgcgaggtggccatgaagatccagtaccctggcgtggcccagagcatcaacagtgatgtcaacaacctcatggccgtgttgaacatgagcaacatgcttccagaaggcctgttccccgagcacctgatcgacgtgctgaggcgggagctggccctggagtgtgactaccagcgagaggccgcctgtgcccgcaagttcagggacctgctgaagggccaccccttcttctatgtgcctgagattgtggatgagctctgcagcccacatgtgctgaccacagagctggtgtctggcttccccctggaccaggccgaagggctcagccaggagattcggaacgagatctgctacaacatcctggttctgtgcctgagggagctgttcgagttccacttcatgcaaacagaccccaactggtccaacttcttctatgacccccagcagcacaaggtggctcttttggattttggggcaacgcgggaatatgacagatccttcaccgacctctacattcagatcatcagggctgctgccgacagggacagggagactgtgcgggcgaaatccatagagatgaagttcctcaccggctacgaggtcaaggtcatggaagacgcccacttggatgccatcctcatcctgggggaggccttcgcctctgatgagccttttgattttggcactcagagcaccaccgagaagatccacaacctgattcccgtcatgctgaggcaccgtctcgtccccccacccgaggaaacctactccctgcacaggaagatggggggctccttcctcatctgctccaagctgaaggcccgcttcccctgcaaggccatgttcgaggaggcctacagcaactactgcaagaggcaggcccagcagtagggctgcgggccacgcccaggccggctccgcgggaactctctccctcagacaggccaaaaaccagtagcgaggtcgtggtgatgctctttttaactcctttgcccaataaggggggtggctgcctggagccccgtagccagcgctttccacggtttctgttgctaaatggttgtagggtgagaagtgcaagaatgaagatgaagccccactgctcggtcagtctgcctccgtgtgtcctctgaaataagcagatgaagatgaaagggcaactttgttttcttctttttcctgatgtgaatgttaagcagaagggagagagtccttactcccttccaatctctgttcagtgcaaaacccagaaacatgaacagatacgattgtgggattttatcatctgtgtagtaggtgtgtgtatgtgtttctagagtgagatttgtgttttctgcccttttcctctccagccgatgggctggagctgggagaggtgctgagctaacagtgccaacaagtgctccttaagcctgcgaggcccaggcctgtggggctggttctcacctttgacagctgaatgttcctaaagaactgctgccccacagtgagggtgggagcagcggaacagggaatgccagacacaggctcgctgctgctggaaggcggggtgggacttccttcctctgtccggagaggcacaggtgtcaccagttccagccaaaggctcctcacaggcgctgtgaatttttgtacaagtcttgtaattatcgaatcaacaacttgtttcaatttaataaaaatgctcatgggaagtgc

SEQ ID NO: 460 - DNA, 2743 bp, Homo sapiens
  source 1..2743: mol_type = unassigned DNA
gagttggtaaacagatccggagcgcgtggcgggcgtcagcgcggtggccagcgcgcagaggcgggcgcggaggcggctagaaggtgaccgcggatcccagcttcctgcagccagggccctgcagtccacggctgtggagcagattggcatgttcttggggaaggtgcagggtcaggataaacatgaagaatattttgctgagaacttcggcggcccagaaggggagttccacttctcagtcccgcatgcagccggagcctccacagacttctcttcagcctccgctcccgaccagtcagcgcccccatccctgggtcatgcccacagcgagggcccagctcctgcctacgtggccagtggaccctttagagaagccgggttccccggccaggcctcctcccctctgggcagggccaacgggaggctctttgcaaaccccagagactcattctctgccatgggctttcagcgaaggttcttccaccaggaccaatcccctgttgggggcctcacagccgaggacattgagaaggcccggcaggctaaggctcgccccgagaacaagcagcacaaacagacgctcagcgagcatgcccgggagcggaaggtgcctgtgacgaggattggccggctggccaacttcggaggtctggccgtgggcctgggcttcggggcactggcagaggtcgccaagaagagcctgcgctccgaggacccctcagggaagaaggccgtgctgggttccagtcctttcctgtccgaggccaatgcagagcggatcgtgcgcacgctctgcaaggtgcgtggtgcggcactcaagctgggccagatgctgagcatccaggatgatgcctttatcaacccccacctggctaagatcttcgagcgggtgcggcagagcgcggacttcatgccactgaagcagatgatgaaaactctcaacaacgacctgggccccaactggcgggacaagttggaatacttcgaggagcggcccttcgccgccgcatccattgggcaggtgcacttggcccgaatgaagggcggccgcgaggtggccatgaagatccagtaccctggcgtggcccagagcatcaacagtgatgtcaacaacctcatggccgtgttgaacatgagcaacatgcttccagaaggcctgttccccgagcacctgatcgacgtgctgaggcgggagctggccctggagtgtgactaccagcgagaggccgcctgtgcccgcaagttcagggacctgctgaagggccaccccttcttctatgtgcctgagattgtggatgagctctgcagcccacatgtgctgaccacagagctggtgtctggcttccccctggaccaggccgaagggctcagccaggagattcggaacgagatctgctacaacatcctggttctgtgcctgagggagctgttcgagttccacttcatgcaaacagaccccaactggtccaacttcttctatgacccccagcagcacaaggtggctcttttggattttggggcaacgcgggaatatgacagatccttcaccgacctctacattcagatcatcagggctgctgccgacagggacagggagactgtgcgggcgaaatccatagagatgaagttcctcaccggctacgaggtcaaggtcatggaagacgcccacttggatgccatcctcatcctgggggaggccttcgcctctgatgagccttttgattttggcactcagagcaccaccgagaagatccacaacctgattcccgtcatgctgaggcaccgtctcgtccccccacccgaggaaacctactccctgcacaggaagatggggggctccttcctcatctgctccaagctgaaggcccgcttcccctgcaaggccatgttcgaggaggcctacagcaactactgcaagaggcaggcccagcagtagggctgcgggccacgcccaggccggctccgcgggaactctctccctcagacaggccaaaaaccagtagcgaggtcgtggtgatgctctttttaactcctttgcccaataaggggggtggctgcctggagccccgtagccagcgctttccacggtttctgttgctaaatggttgtagggtgagaagtgcaagaatgaagatgaagccccactgctcggtcagtctgcctccgtgtgtcctctgaaataagcagatgaagatgaaagggcaactttgttttcttctttttcctgatgtgaatgttaagcagaagggagagagtccttactcccttccaatctctgttcagtgcaaaacccagaaacatgaacagatacgattgtgggattttatcatctgtgtagtaggtgtgtgtatgtgtttctagagtgagatttgtgttttctgcccttttcctctccagccgatgggctggagctgggagaggtgctgagctaacagtgccaacaagtgctccttaagcctgcgaggcccaggcctgtggggctggttctcacctttgacagctgaatgttcctaaagaactgctgccccacagtgagggtgggagcagcggaacagggaatgccagacacaggctcgctgctgctggaaggcggggtgggacttccttcctctgtccggagaggcacaggtgtcaccagttccagccaaaggctcctcacaggcgctgtgaatttttgtacaagtcttgtaattatcgaatcaacaacttgtttcaatttaataaaaatgctcatgggaagtgc

SEQ ID NO: 461 - DNA, 5523 bp, Homo sapiens
  source 1..5523: mol_type = unassigned DNA
cttggaggtccccagagagcagggagacaaatgaacccagaacacaaatggcaaagaagaaaaatgagagaatttgtaaaagacagcattcgaacatgccgaacaagagcagggtactggtgttcaaacacctgtatctcccccgtgtaacccgtcaactaatatctttccatatttgctccagatttgtctttagaaataaaacccacgttctgaagtcctgtttgtatgtggccccagtcctgttgcctccgcctcctgtcctgaagtcgatttctgcccttctcatctatggttagttttgttttgtatgttggcatgttttcttaactttacagaaatggtatcatactgtacatatttgataattttttaaaatattgcattctggaggcatgtataaatgtagctccagttcatttattttatttattttttgagatggagttttgctcttgtcacccaggctagagtgcaatggcgtgatgttggctcactgcaacctctgcctcctgggttcaagcaattctcctgtctcaatttcctgagtagctgggattacagttgcccgccaccatgcctggctaattttgtattttagtagagacggggtttcaccacgttagccaggctggtctcaaactcctgactgcaggtgatccacgcaccttggcctccaaaagtgctgggattacaggcgtgagccaccgtgcccagcccagttattttaactattgtatagtgttccattgtatgagttctactgtttatatgctattgatcgacctgtaggggttttgcagtgtttctgtattacagctgtgctgcagtgagcatcccatcacattgtgtggatttgaggaagtattggaattcccccaattgactggacattcccaattaccctccaagtatgtgtctgtttatccttccatccgcaatctgagagttccccaactctataatacttggtgtcatcagacttttcatcttgtctgattggatgggtgtcatttcctttaggttttataattatcttttcatatgtgtattggctgtacaaggttccttctctgttcattattattaatttttttagacagagtctcgcgctgtcgcccaggctggagtgcagcagcgtgatcttggctcactgcaagctccgcctcccgggttcatgccattctcctgcctcagcctcctgagtagctgggattacaggtgcctgccatcacgcccggctagtttttttgtattttgagtagagatggggtttcaccgtgttagccaggagggtctcgatctcctgacctcgtgatccacccgcctcggcctcccaaagtgctgggattacaggtgtgagtcactgcgcccagcccaagtttccttctctgttacttgttcatatcctctgcccatttttcacttggattttttgtcttacggatatttaagcctcttaaaatatatattctggagagatgctaatctttgattaattatatgcattgcaaatgtctggtacattgtggcttgcctctcttccctgcctttaggagtgttttgctggacccaagtaatttttaaatgttaatgttattaaatctatcagttttttgcttgtatggcttatgccattgaatcttgttttaagagatccttccctaccctcaaggttttctaaatttttattttcataataagatttttagttcatctgaaatgtatttttatgattgtatttagtagggacctaattttgtttttctttgtaaccaggtgtcccagcactgtttactgaacagtctctcctttctcgctggtctgtagaactctcctgacatataccaagtttccataagtgggtggatgggttcctgagctctctactgttaatagaacttgctctctcgcaggccaatgcctcaccaggtgattgaagcagagaaacttaggtggtgaaaggagaagatggggcctgtcctgagagtttctgttcctgagatgctagaggcagaggtttccagaaccacaagacagacccaagagggctgtgttggcaaaacaaatggcagagtggagctggccagaggcatctgtgcgtggcgactccaagagagcacccgactccagatggcgacactgcaggatggagcggggcatgcctgcagacaggtgtcagagacggggtcttgctgtattgcccaggctagatttgaactcctggcctgaagtaatcctcccaccttggcctcccaaagttctgggactacagaccattcgtatatatcttctttggagaaatgtgtggtgcaatcttggttcactgcaacttccacctcctgagttccagcaattctccagtctcagcctctcgagtagctgggattacaggcatgtgccaccatgcctggccatcttcgctcttgagcacctgtgtcatgatggcgtctcactcttgttgcccaggctggagtgcaatggtgcgatttggctcactgtggcctctgcctcccgggttcaagcgattctcctgcctcagcctcccataccagttcaactttttcagattccacgtgagggagtgacggggcaaatctgcgtgctgctggtggcggtgcctcccagggctgctcggcggggacgccgagggctgcacccgagctccatcccgtgttggctgcgcgccctccaaaaccccggctgtcagcgactgcgggcacctgcacgccgacgagaccggcgggcggacagcgactccgccctgaaggatggctgccatattgggagacaccatcatggtggctaaaggccttgtcaagctgacccaggcggccgtggaaacccacctgcagcacttgggcatcggaggggagctgatcatggcggccagggccctgcagtccacggctgtggagcagattggcatgttcttggggaaggtgcagggtcaggataaacatgaagaatattttgctgagaacttcggcggcccagaaggggagttccacttctcagtcccgcatgcagccggagcctccacagacttctcttcagcctccgctcccgaccagtcagcgcccccatccctgggtcatgcccacagcgagggcccagctcctgcctacgtggccagtggaccctttagagaagccgggttccccggccaggcctcctcccctctgggcagggccaacgggaggctctttgcaaaccccagagactcattctctgccatgggctttcagcgaaggttcttccaccaggaccaatcccctgttgggggcctcacagccgaggacattgagaaggcccggcaggctaaggctcgccccgagaacaagcagcacaaacagacgctcagcgagcatgcccgggagcggaaggtgcctgtgacgaggattggccggctggccaacttcggaggtctggccgtgggcctgggcttcggggcactggcagaggtcgccaagaagagcctgcgctccgaggacccctcagggaagaaggccgtgctgggttccagtcctttcctgtccgaggccaatgcagagcggatcgtgcgcacgctctgcaaggtgcgtggtgcggcactcaagctgggccagatgctgagcatccaggatgatgcctttatcaacccccacctggctaagatcttcgagcgggtgcggcagagcgcggacttcatgccactgaagcagatgatgaaaactctcaacaacgacctgggccccaactggcgggacaagttggaatacttcgaggagcggcccttcgccgccgcatccattgggcaggtgcacttggcccgaatgaagggcggccgcgaggtggccatgaagatccagtaccctggcgtggcccagagcatcaacagtgatgtcaacaacctcatggccgtgttgaacatgagcaacatgcttccagaaggcctgttccccgagcacctgatcgacgtgctgaggcgggagctggccctggagtgtgactaccagcgagaggccgcctgtgcccgcaagttcagggacctgctgaagggccaccccttcttctatgtgcctgagattgtggatgagctctgcagcccacatgtgctgaccacagagctggtgtctggcttccccctggaccaggccgaagggctcagccaggagattcggaacgagatctgctacaacatcctggttctgtgcctgagggagctgttcgagttccacttcatgcaaacagaccccaactggtccaacttcttctatgacccccagcagcacaaggtggctcttttggattttggggcaacgcgggaatatgacagatccttcaccgacctctacattcagatcatcagggctgctgccgacagggacagggagactgtgcgggcgaaatccatagagatgaagttcctcaccggctacgaggtcaaggtcatggaagacgcccacttggatgccatcctcatcctgggggaggccttcgcctctgatgagccttttgattttggcactcagagcaccaccgagaagatccacaacctgattcccgtcatgctgaggcaccgtctcgtccccccacccgaggaaacctactccctgcacaggaagatggggggctccttcctcatctgctccaagctgaaggcccgcttcccctgcaaggccatgttcgaggaggcctacagcaactactgcaagaggcaggcccagcagtagggctgcgggccacgcccaggccggctccgcgggaactctctccctcagacaggccaaaaaccagtagcgaggtcgtggtgatgctctttttaactcctttgcccaataaggggggtggctgcctggagccccgtagccagcgctttccacggtttctgttgctaaatggttgtagggtgagaagtgcaagaatgaagatgaagccccactgctcggtcagtctgcctccgtgtgtcctctgaaataagcagatgaagatgaaagggcaactttgttttcttctttttcctgatgtgaatgttaagcagaagggagagagtccttactcccttccaatctctgttcagtgcaaaacccagaaacatgaacagatacgattgtgggattttatcatctgtgtagtaggtgtgtgtatgtgtttctagagtgagatttgtgttttctgcccttttcctctccagccgatgggctggagctgggagaggtgctgagctaacagtgccaacaagtgctccttaagcctgcgaggcccaggcctgtggggctggttctcacctttgacagctgaatgttcctaaagaactgctgccccacagtgagggtgggagcagcggaacagggaatgccagacacaggctcgctgctgctggaaggcggggtgggacttccttcctctgtccggagaggcacaggtgtcaccagttccagccaaaggctcctcacaggcgctgtgaatttttgtacaagtcttgtaattatcgaatcaacaacttgtttcaatttaataaaaatgctcatgggaagtgct

SEQ ID NO: 462 - DNA, 2337 bp, Homo sapiens
  source 1..2337: mol_type = unassigned DNA
agatccggagcgcgtggcgggcgtcagcgcggtggccagcgcgcagaggcgggcgcggaggcggctagaaggtgaccgcggatcccagcttcctgcagccagcccttcttgcattctcttcatgtgacagcgcagcttccccgcgagtttcgctggccgcgagcctcaggccttgtcaagctgacccaggcggccgtggaaacccacctgcagcacttgggcatcggaggggagctgatcatggcggccagggccctgcagtccacggctgtggagcagattggcatgttcttggggaaggtgcagggtcaggataaacatgaagaatattttgctgagaacttcggcggcccagaaggggagttccacttctcttcagcctccgctcccgaccagtcagcgcccccatccctgggtcatgcccacagcgagggcccagctcctgcctacgtggccagtggaccctttagagaagccgggttccccggccaggcctcctcccctctgggcagggccaacgggaggctctttgcaaaccccagagactcattctctgccatgggctttcagcgaaggttcttccaccaggaccaatcccctgttgggggcctcacagccgaggacattgagaaggcccggcaggctaaggctcgccccgagaacaagcagcacaaacagacgctcagcgagcatgcccgggagcggaaggtgcctgtgacgaggattggccggctggccaacttcggaggtctggccgtgggcctgggcttcggggcactggcagaggtcgccaagaagagcctgcgctccgaggacccctcagggaagaaggccgtgctgggttccagtcctttcctgtccgaggccaatgcagagcggatcgtgcgcacgctctgcaaggtgcgtggtgcggcactcaagctgggccagatgctgagcatccaggatgatgcctttatcaacccccacctggctaagatcttcgagcgggtgcggcagagcgcggacttcatgccactgaagcagatgatgaaaactctcaacaacgacctgggccccaactggcgggacaagttggaatacttcgaggagcggcccttcgccgccgcatccattgggcaggtgcacttggcccgaatgaagggcggccgcgaggtggccatgaagatccagtaccctggcgtggcccagagcatcaacagtgatgtcaacaacctcatggccgtgttgaacatgagcaacatgcttccagaaggcctgttccccgagcacctgatcgacgtgctgaggcgggagctggccctggagtgtgactaccagcgagaggccgcctgtgcccgcaagttcagggacctgctgaagggccaccccttcttctatgtgcctgagattgtggatgagctctgcagcccacatgtgctgaccacagagctggtgtctggcttccccctggaccaggccgaagggctcagccaggagattcggaacgagatctgctacaacatcctggttctgtgcctgagggagctgttcgagttccacttcatgcaaacagaccccaactggtccaacttcttctatgacccccagcagcacaaggtggctcttttggattttggggcaacgcgggaatatgacagatccttcaccgacctctacattcagatcatcagggctgctgccgacagggacagggagactgtgcgggcgaaatccatagagatgaagttcctcaccggctacgaggtcaaggtcatggaagacgcccacttggatgccatcctcatcctgggggaggccttcgcctctgatgagccttttgattttggcactcagagcaccaccgagaagatccacaacctgattcccgtcatgctgaggcaccgtctcgtccccccacccgaggaaacctactccctgcacaggaagatggggggctccttcctcatctgctccaagctgaaggcccgcttcccctgcaaggccatgttcgaggaggcctacagcaactactgcaagaggcaggcccagcagtagggctgcgggccacgcccaggccggctccgcgggaactctctccctcagacaggccaaaaaccagtagcgaggtcgtggtgatgctctttttaactcctttgcccaataaggggggtggctgcctggagccccgtagccagcgctttccacggtttctgttgctaaatggttgtagggtgagaagtgcaagaatgaagatgaagccccactgctcggtcagtctgcctccgtgtgtcctctgaaataagcagatgaagatgaaagggcaactttgttttcttctttttcctgatgtgaatg

SEQ ID NO: 463 - DNA, 1236 bp, Homo sapiens
  source 1..1236: mol_type = unassigned DNA
atgcccgggagcggaaggtgcctgtgacgaggattggccggctggccaacttcggaggtctggccgtgggcctgggcttcggggcactggcagaggtcgccaagaagagcctgcgctccgaggacccctcagggaagaaggccgtgctgggttccagtcctttcctgtccgaggccaatgcagagcggatcgtgcgcacgctctgcaaggtgcgtggtgcggcactcaagctgggccagatgctgagcatccaggatgatgcctttatcaacccccacctggctaagatcttcgagcgggtgcggcagagcgcggacttcatgccactgaagcagatgatgtaccctggcgtggcccagagcatcaacagtgatgtcaacaacctcatggccgtgttgaacatgagcaacatgcttccagaaggcctgttccccgagcacctgatcgacgtgctgaggcgggagctggccctggagtgtgactaccagcgagaggccgcctgtgcccgcaagttcagggacctgctgaagggccaccccttcttctatgtgcctgagattgtggatgagctctgcagcccacatgtgctgaccacagagctggtgtctggcttccccctggaccaggccgaagggctcagccaggagattcggaacgagatctgctacaacatcctggttctgtgcctgagggagctgttcgagttccacttcatgcaaacagaccccaactggtccaacttcttctatgacccccagcagcacaaggtggctcttttggattttggggcaacgcgggaatatgacagatccttcaccgacctctacattcagatcatcagggctgctgccgacagggacagggagactgtgcgggcgaaatccatagagatgaagttcctcaccggctacgaggtcaaggtcatggaagacgcccacttggatgccatcctcatcctgggggaggccttcgcctctgatgagccttttgattttggcactcagagcaccaccgagaagatccacaacctgattcccgtcatgctgaggcaccgtctcgtccccccacccgaggaaacctactccctgcacaggaagatggggggctccttcctcatctgctccaagctgaaggcccgcttcccctgcaaggccatgttcgaggaggcctacagcaactactgcaagaggcaggcccagcagtagggctgcgggccacgcccaggccggctccgcg

SEQ ID NO: 464 - DNA, 2007 bp, Homo sapiens
  source 1..2007: mol_type = unassigned DNA
aaacagatccggagcgcgtggcgggcgtcagcgcggtggccagcgcgcagaggcgggcgcggaggcggctagaaggtgaccgcggatcccagcttcctgcagccaggtctggccgtgggcctgggcttcggggcactggcagaggtcgccaagaagagcctgcgctccgaggacccctcagggaagaaggccgtgctgggttccagtcctttcctgtccgaggccaatgcagagcggatcgtgcgcacgctctgcaaggtgcgtggtgcggcactcaagctgggccagatgctgagcatccaggatgatgcctttatcaacccccacctggctaagatcttcgagcgggtgcggcagagcgcggacttcatgccactgaagcagatgatgaaaactctcaacaacgacctgggccccaactggcgggacaagttggaatacttcgaggagcggcccttcgccgccgcatccattgggcaggtgcacttggcccgaatgaagggcggccgcgaggtggccatgaagatccagtaccctggcgtggcccagagcatcaacagtgatgtcaacaacctcatggccgtgttgaacatgagcaacatgcttccagaaggcctgttccccgagcacctgatcgacgtgctgaggcgggagctggccctggagtgtgactaccagcgagaggccgcctgtgcccgcaagttcagggacctgctgaagggccaccccttcttctatgtgcctgagattgtggatgagctctgcagcccacatgtgctgaccacagagctggtgtctggcttccccctggaccaggccgaagggctcagccaggagattcggaacgagatctgctacaacatcctggttctgtgcctgagggagctgttcgagttccacttcatgcaaacagaccccaactggtccaacttcttctatgacccccagcagcacaaggtggctcttttggattttggggcaacgcgggaatatgacagatccttcaccgacctctacattcagatcatcagggctgctgccgacagggacagggagactgtgcgggcgaaatccatagagatgaagttcctcaccggctacgaggtcaaggtcatggaagacgcccacttggatgccatcctcatcctgggggaggccttcgcctctgatgagccttttgattttggcactcagagcaccaccgagaagatccacaacctgattcccgtcatgctgaggcaccgtctcgtccccccacccgaggaaacctactccctgcacaggaagatggggggctccttcctcatctgctccaagctgaaggcccgcttcccctgcaaggccatgttcgaggaggcctacagcaactactgcaagaggcaggcccagcagtagggctgcgggccacgcccaggccggctccgcgggaactctctccctcagacaggccaaaaaccagtagcgaggtcgtggtgatgctctttttaactcctttgcccaataaggggggtggctgcctggagccccgtagccagcgctttccacggtttctgttgctaaatggttgtagggtgagaagtgcaagaatgaagatgaagccccactgctcggtcagtctgcctccgtgtgtcctctgaaataagcagatgaagatgaaagggcaactttgttttcttctttttcctgatgtgaatgttaagcagaagggagagagtccttactcccttccaatctctgttcagtgcaaaacccagaaacatgaacagatacgattgtgggattttatcatctgtgtagtaggtgtgtgtatgtgtttctagagtgagatttgtgttttctgcccttttcctctccagccgatgggctggagctgggagaggtgctgagctaacagtgccaacaagtgctccttaagcctgcgaggcccaggcctgtggggctggttctcacctttgacagctgaatgttcctaaagaactgctgccccacagtgagggtgggagcagc

SEQ ID NO: 465 - DNA, 4335 bp, Homo sapiens
  source 1..4335: mol_type = unassigned DNA
tgacgtcagcaggcggcgcgctgtccgcactgcggcacagagccgcggcttgctttcaggacacgggtcgctggcgggttaggtggctgcgtggccgcctcacttcgcgcacgcgccgctaggctgggggagttgatttgcactgctccgggtgtcggctccggcgggacgggcggttctgcgtacccctctccagtgtcaacctggggctgaatcttcaacctgtcaaagccttcttaattatgtctgagaaaagtactaaaataggtgccattttaaattcccagacaaggaaaaaccaaggattagaaattaagtagcttgcccaaggccacacatcagatcctgattgagtcaatgctttgcattctcagtcctctgcataaagctgagagatgcctacagctgagagtgaagcaaaagtaaaaaccaaagttcgctttgaagaattgcttaagacccacagtgatctaatgcgtgaaaagaaaaaactgaagaaaaaacttgtcaggtctgaagaaaacatctcacctgacactattagaagcaatcttcactatatgaaagaaactacaagtgatgatcccgacactattagaagcaatcttccccatattaaagaaactacaagtgatgatgtaagtgctgctaacactaacaacctgaagaagagcacgagagtcactaaaaacaaattgaggaacacacagttagcaactgaaaatcctaatggtgatgctagtgtagaggaagacaaacaaggaaagccaaataaaaaggtgataaagacggtgccccagttgactacacaagacctgaaaccggaaactcctgagaataaggttgattctacacaccagaaaacacatacaaagccacagccaggcgttgatcatcagaaaagtgagaaggcaaatgagggaagagaagagactgatttagaagaggatgaagaattgatgcaagcatatcagtgccatgtaactgaagaaatggcaaaggagattaagaggaaaataagaaagaaactgaaagaacagttgacttactttccctcagatactttattccatgatgacaaactaagcagtgaaaaaaggaaaaagaaaaaggaagttccagtcttctctaaagctgaaacaagtacattgaccatctctggtgacacagttgaaggtgaacaaaagaaagaatcttcagttagatcagtttcttcagattctcatcaagatgatgaaataagctcaatggaacaaagcacagaagacagcatgcaagatgatacaaaacctaaaccaaaaaaaacaaaaaagaagactaaagcagttgcagataataatgaagatgttgatggtgatggtgttcatgaaataacaagccgagatagcccggtttatcccaaatgtttgcttgatgatgaccttgtcttgggagtttacattcaccgaactgatagacttaagtcagattttatgatttctcacccaatggtaaaaattcatgtggttgatgagcatactggtcaatatgtcaagaaagatgatagtggacggcctgtttcatcttactatgaaaaagagaatgtggattatattcttcctattatgacccagccatatgattttaaacagttaaaatcaagacttccagagtgggaagaacaaattgtatttaatgaaaattttccctatttgcttcgaggctctgatgagagtcctaaagtcatcctgttctttgagattcttgatttcttaagcgtggatgaaattaagaataattctgaggttcaaaaccaagaatgtggctttcggaaaattgcctgggcatttcttaagcttctgggagccaatggaaatgcaaacatcaactcaaaacttcgcttgcagctatattacccacctactaagcctcgatccccattaagtgttgttgaggcatttgaatggtggtcaaaatgtccaagaaatcattacccatcaacactgtacgtaactgtaagaggactgaaagttccagactgtataaagccatcttaccgctctatgatggctcttcaggaggaaaaaggtaaaccagtgcattgtgaacgtcaccatgagtcaagctcagtagacacagaacctggattagaagagtcaaaggaagtaataaagtggaaacgactccctgggcaggcttgccgtatcccaaacaaacacctcttctcactaaatgcaggagaacgaggatgtttttgtcttgatttctcccacaatggaagaatattagcagcagcttgtgccagccgggatggatatccaattattttatatgaaattccttctggacgtttcatgagagaattgtgtggccacctcaatatcatttatgatctttcctggtcaaaagatgatcactacatccttacttcatcatctgatggcactgccaggatatggaaaaatgaaataaacaatacaaatactttcagagttttacctcatccttcttttgtttacacggctaaattccatccagctgtaagagagctagtagttacaggatgctatgattccatgatacggatatggaaagttgagatgagagaagattctgccatattggtccgacagtttgatgttcacaaaagttttatcaactcactttgttttgatactgaaggtcatcatatgtattcaggagattgtacaggggtgattgttgtttggaatacctatgtcaagattaatgatttggaacattcagtgcaccactggactataaataaggaaattaaagaaactgagtttaagggaattccaataagttatttggagattcatcccaatggaaaacgtttgttaatccataccaaagacagtactttgagaattatggatctccggatattagtagcaaggaagtttgtaggagcagcaaattatcgggagaagattcatagtactttgactccatgtgggacttttctgtttgctggaagtgaggatggtatagtgtatgtttggaacccagaaacaggagaacaagtagccatgtattctgacttgccattcaagtcacccattcgagacatttcttatcatccatttgaaaatatggttgcattctgtgcatttgggcaaaatgagccaattcttctgtatatttacgatttccatgttgcccagcaggaggctgaaatgttcaaacgctacaatggaacatttccattacctggaatacaccaaagtcaagatgccctatgtacctgtccaaaactaccccatcaaggctcttttcagattgatgaatttgtccacactgaaagttcttcaacgaagatgcagctagtaaaacagaggcttgaaactgtcacagaggtgatacgttcctgtgctgcaaaagtcaacaaaaatctctcatttacttcaccaccagcagtttcctcacaacagtctaagttaaagcagtcaaacatgctgaccgctcaagagattctacatcagtttggtttcactcagaccgggattatcagcatagaaagaaagccttgtaaccatcaggtagatacagcaccaacggtagtggctctttatgactacacagcgaatcgatcagatgaactaaccatccatcgcggagacattatccgagtgtttttcaaagataatgaagactggtggtatggcagcataggaaagggacaggaaggttattttccagctaatcatgtggctagtgaaacactgtatcaagaactgcctcctgagataaaggagcgatcccctcctttaagccctgaggaaaaaactaaaatagaaaaatctccagctcctcaaaagcaatcaatcaataagaacaagtcccaggacttcagactaggctcagaatctatgacacattctgaaatgagaaaagaacagagccatgaggaccaaggacacataatggatacacggatgaggaagaacaagcaagcaggcagaaaagtcactctaatagagtaaagaattgaagaaaagttaagagctgccgaaatgcacagaggtgaaaatgacaaaccaaatggaatttctcttcagagttcagaattttcagatactaaggaggaagaaaggatccactacttcttgttcttatgaatgactctagaaaaatcagaatcaagttgtgggtggaaaaatcaacgtggcctttgagttcagttgttataaaccattgtgactattgttggtcaaagtattggtacttatattgttagtaattgcatcataattacattaccagtgttggaaaactaatgaagaaaacactgtaattgctactcagcaaatgtgaataaaaggtgtttgcgtt

SEQ ID NO: 466 - DNA, 3638 bp, Homo sapiens
  source 1..3638: mol_type = unassigned DNA
gcggcacagagccgcggcttgctttcaggacacgggtcgctggcgggttaggtggctgcgtggccgcctcacttcgcgcacgcgccgctaggctgggggagttgatttgcactgctccgggtgtcggctccggcgggacgggcggttctgcgtacccctctccagtgtcaacctggggctgaatcttcaacctgtcaaagccttcttaattatgtctgagaaaaggatcctgattgagtcaatgctttgcattctcagtcctctgcataaagctgagagatgcctacagctgagagtgaagcaaaagtaaaaaccaaagttcgctttgaagaattgcttaagacccacagtgatctaatgcgtgaaaagaaaaaactgaagaaaaaacttgtcaggtctgaagaaaacatctcacctgacactattagaagcaatcttcactatatgaaagaaactacaagtgatgatcccgacactattagaagcaatcttccccatattaaagaaactacaagtgatgatgtaagtgctgctaacactaacaacctgaagaagagcacgagagtcactaaaaacaaattgaggaacacacagttagcaactgaaaatcctaatggtgatgctagtgtagaggaagacaaacaaggaaagccaaataaaaaggtgataaagacggtgccccagttgactacacaagacctgaaaccggaaactcctgagaataaggttgattctacacaccagaaaacacatacaaagccacagccaggcgttgatcatcagaaaagtgagaaggcaaatgagggaagagaagagactgatttagaagaggatgaagaattgatgcaagcatatcagtgccatgtaactgaagaaatggcaaaggagattaagaggaaaataagaaagaaactgaaagaacagttgacttactttccctcagatactttattccatgatgacaaactaagcagtgaaaaaaggaaaaagaaaaaggaagttccagtcttctctaaagctgaaacaagtacattgaccatctctggtgacacagttgaaggtgaacaaaagaaagaatcttcagttagatcagtttcttcagattctcatcaagatgatgaaataagctcaatggaacaaagcacagaagacagcatgcaagatgatacaaaacctaaaccaaaaaaaacaaaaaagaagactaaagcagttgcagataataatgaagatgttgatggtgatggtgttcatgaaataacaagccgagatagcccggtttatcccaaatgtttgcttgatgatgaccttgtcttgggagtttacattcaccgaactgatagacttaagtcagattttatgatttctcacccaatggtaaaaattcatgtggttgatgagcatactggtcaatatgtcaagaaagatgatagtggacggcctgtttcatcttactatgaaaaagagaatgtggattatattcttcctattatgacccagccatatgattttaaacagttaaaatcaagacttccagagtgggaagaacaaattgtatttaatgaaaattttccctatttgcttcgaggctctgatgagagtcctaaagtcatcctgttctttgagattcttgatttcttaagcgtggatgaaattaagaataattctgaggttcaaaaccaagaatgtggctttcggaaaattgcctgggcatttcttaagcttctgggagccaatggaaatgcaaacatcaactcaaaacttcgcttgcagctatattacccacctactaagcctcgatccccattaagtgttgttgaggcatttgaatggtggtcaaaatgtccaagaaatcattacccatcaacactgtacgtaactgtaagaggactgaaagttccagactgtataaagccatcttaccgctctatgatggctcttcaggaggaaaaaggtaaaccagtgcattgtgaacgtcaccatgagtcaagctcagtagacacagaacctggattagaagagtcaaaggaagtaataaagtggaaacgactccctgggcaggcttgccgtatcccaaacaaacacctcttctcactaaatgcaggagaacgaggatgtttttgtcttgatttctcccacaatggaagaatattagcagcagcttgtgccagccgggatggatatccaattattttatatgaaattccttctggacgtttcatgagagaattgtgtggccacctcaatatcatttatgatctttcctggtcaaaagatgatcactacatccttacttcatcatctgatggcactgccaggatatggaaaaatgaaataaacaatacaaatactttcagagttttacctcatccttcttttgtttacacggctaaattccatccagctgtaagagagctagtagttacaggatgctatgattccatgatacggatatggaaagttgagatgagagaagattctgccatattggtccgacagtttgatgttcacaaaagttttatcaactcactttgttttgatactgaaggtcatcatatgtattcaggagattgtacaggggtgattgttgtttggaatacctatgtcaagattaatgatttggaacattcagtgcaccactggactataaataaggaaattaaagaaactgagtttaagggaattccaataagttatttggagattcatcccaatggaaaacgtttgttaatccataccaaagacagtactttgagaattatggatctccggatattagtagcaaggaagtttgtaggagcagcaaattatcgggagaagattcatagtactttgactccatgtgggacttttctgtttgctggaagtgaggatggtatagtgtatgtttggaacccagaaacaggagaacaagtagccatgtattctgacttgccattcaagtcacccattcgagacatttcttatcatccatttgaaaatatggttgcattctgtgcatttgggcaaaatgagccaattcttctgtatatttacgatttccatgttgcccagcaggaggctgaaatgttcaaacgctacaatggaacatttccattacctggaatacaccaaagtcaagatgccctatgtacctgtccaaaactaccccatcaaggctcttttcagattgatgaatttgtccacactgaaagttcttcaacgaagatgcagctagtaaaacagaggcttgaaactgtcacagaggtgatacgttcctgtgctgcaaaagtcaacaaaaatctctcatttacttcaccaccagcagtttcctcacaacagtctaagttaaagcagtcaaacatgctgaccgctcaagagattctacatcagtttggtttcactcagaccgacagtcactttgctgaattcaacacatgtatattatggtggaaaaagcactagactcagggtcagccagccagaagaactgagccgacctgggatcccaccacttcctaactgttttgttaggtagttcactttctctcttcggataaatgtctccacatttcctacttcatagaattgtcagaatcaacacaatacatttaatactttgaaactcataaaatattgggagaataaacagtatgaggtta

SEQ ID NO: 467 - DNA, 365 bp, Homo sapiens
  source 1..365: mol_type = unassigned DNA
gtgtcaacctggggctgaatcttcaacctgtcaaagccttcttaattatgtctgagaaaagtactaaaataggtgccattttaaattcccagacaaggaaaaaccaaggattagaaattaagtagcttgcccaaggccacacatcagatcctgattgagtcaatgctttgcattctcagtcctctgcataaagctgagagatgcctacagctgagagtgaagcaaaagtaaaaaccaaagttcgctttgaagaattgcttaagacccacagtgatctaatgcgtgaaaagaaaaaactgaagaaaaaacttgtcaggtctgaagaaaacatctcaaaccaggagaaatcaatggccgtatggtaa

SEQ ID NO: 468 - DNA, 5921 bp, Homo sapiens
  source 1..5921: mol_type = unassigned DNA
gcggcacagagccgcggcttgctttcaggacacgggtcgctggcgggttaggtggctgcgtggccgcctcacttcgcgcacgcgccgctaggctgggggagttgatttgcactgctccgggtgtcggctccggcgggacgggcggttctgcgtacccctctccgatcctgattgagtcaatgctttgcattctcagtcctctgcataaagctgagagatgcctacagctgagagtgaagcaaaagtaaaaaccaaagttcgctttgaagaattgcttaagacccacagtgatctaatgcgtgaaaagaaaaaactgaagaaaaaacttgtcaggtctgaagaaaacatctcacctgacactattagaagcaatcttcactatatgaaagaaactacaagtgatgatcccgacactattagaagcaatcttccccatattaaagaaactacaagtgatgatgtaagtgctgctaacactaacaacctgaagaagagcacgagagtcactaaaaacaaattgaggaacacacagttagcaactgaaaatcctaatggtgatgctagtgtagaggaagacaaacaaggaaagccaaataaaaaggtgataaagacggtgccccagttgactacacaagacctgaaaccggaaactcctgagaataaggttgattctacacaccagaaaacacatacaaagccacagccaggcgttgatcatcagaaaagtgagaaggcaaatgagggaagagaagagactgatttagaagaggatgaagaattgatgcaagcatatcagtgccatgtaactgaagaaatggcaaaggagattaagaggaaaataagaaagaaactgaaagaacagttgacttactttccctcagatactttattccatgatgacaaactaagcagtgaaaaaaggaaaaagaaaaaggaagttccagtcttctctaaagctgaaacaagtacattgaccatctctggtgacacagttgaaggtgaacaaaagaaagaatcttcagttagatcagtttcttcagattctcatcaagatgatgaaataagctcaatggaacaaagcacagaagacagcatgcaagatgatacaaaacctaaaccaaaaaaaacaaaaaagaagactaaagcagttgcagataataatgaagatgttgatggtgatggtgttcatgaaataacaagccgagatagcccggtttatcccaaatgtttgcttgatgatgaccttgtcttgggagtttacattcaccgaactgatagacttaagtcagattttatgatttctcacccaatggtaaaaattcatgtggttgatgagcatactggtcaatatgtcaagaaagatgatagtggacggcctgtttcatcttactatgaaaaagagaatgtggattatattcttcctattatgacccagccatatgattttaaacagttaaaatcaagacttccagagtgggaagaacaaattgtatttaatgaaaattttccctatttgcttcgaggctctgatgagagtcctaaagtcatcctgttctttgagattcttgatttcttaagcgtggatgaaattaagaataattctgaggttcaaaaccaagaatgtggctttcggaaaattgcctgggcatttcttaagcttctgggagccaatggaaatgcaaacatcaactcaaaacttcgcttgcagctatattacccacctactaagcctcgatccccattaagtgttgttgaggcatttgaatggtggtcaaaatgtccaagaaatcattacccatcaacactgtacgtaactgtaagaggactgaaagttccagactgtataaagccatcttaccgctctatgatggctcttcaggaggaaaaaggtaaaccagtgcattgtgaacgtcaccatgagtcaagctcagtagacacagaacctggattagaagagtcaaaggaagtaataaagtggaaacgactccctgggcaggcttgccgtatcccaaacaaacacctcttctcactaaatgcaggagaacgaggatgtttttgtcttgatttctcccacaatggaagaatattagcagcagcttgtgccagccgggatggatatccaattattttatatgaaattccttctggacgtttcatgagagaattgtgtggccacctcaatatcatttatgatctttcctggtcaaaagatgatcactacatccttacttcatcatctgatggcactgccaggatatggaaaaatgaaataaacaatacaaatactttcagagttttacctcatccttcttttgtttacacggctaaattccatccagctgtaagagagctagtagttacaggatgctatgattccatgatacggatatggaaagttgagatgagagaagattctgccatattggtccgacagtttgatgttcacaaaagttttatcaactcactttgttttgatactgaaggtcatcatatgtattcaggagattgtacaggggtgattgttgtttggaatacctatgtcaagattaatgatttggaacattcagtgcaccactggactataaataaggaaattaaagaaactgagtttaagggaattccaataagttatttggagattcatcccaatggaaaacgtttgttaatccataccaaagacagtactttgagaattatggatctccggatattagtagcaaggaagtttgtaggagcagcaaattatcgggagaagattcatagtactttgactccatgtgggacttttctgtttgctggaagtgaggatggtatagtgtatgtttggaacccagaaacaggagaacaagtagccatgtattctgacttgccattcaagtcacccattcgagacatttcttatcatccatttgaaaatatggttgcattctgtgcatttgggcaaaatgagccaattcttctgtatatttacgatttccatgttgcccagcaggaggctgaaatgttcaaacgctacaatggaacatttccattacctggaatacaccaaagtcaagatgccctatgtacctgtccaaaactaccccatcaaggctcttttcagattgatgaatttgtccacactgaaagttcttcaacgaagatgcagctagtaaaacagaggcttgaaactgtcacagaggtgatacgttcctgtgctgcaaaagtcaacaaaaatctctcatttacttcaccaccagcagtttcctcacaacagtctaagttaaagcagtcaaacatgctgaccgctcaagagattctacatcagtttggtttcactcagaccgggattatcagcatagaaagaaagccttgtaaccatcaggtagatacagcaccaacggtagtggctctttatgactacacagcgaatcgatcagatgaactaaccatccatcgcggagacattatccgagtgtttttcaaagataatgaagactggtggtatggcagcataggaaagggacaggaaggttattttccagctaatcatgtggctagtgaaacactgtatcaagaactgcctcctgagataaaggagcgatcccctcctttaagccctgaggaaaaaactaaaatagaaaaatctccagctcctcaaaagcaatcaatcaataagaacaagtcccaggacttcagactaggctcagaatctatgacacattctgaaatgagaaaagaacagagccatgaggaccaaggacacataatggatacacggatgaggaagaacaagcaagcaggcagaaaagtcactctaatagagtaaagaattgaagaaaagttaagagctgccgaaatgcacagaggtgaaaatgacaaaccaaatggaatttctcttcagagttcagaattttcagatactaaggaggaagaaaggatccactacttcttgttcttatgaatgactctagaaaaatcagaatcaagttgtgggtggaaaaatcaacgtggcctttgagttcagttgttataaaccattgtgactattgttggtcaaagtattggtacttatattgttagtaattgcatcataattacattaccagtgttggaaaactaatgaagaaaacactgtaattgctactcagcaaatgtgaataaaaggtgtttgcgttattaggatgtctgttaagtaatcatttaatattattatattggtaatggttgtatgtgtgatgctatgcccagaatatgaagtatctgtttttgaaattcactttatttaaaagataagcagctgactgggcacggtgcctcatgcctgtaatcctagcaccttgggaggctgaggcaggtggatcacctaaggtcaggagttcaacaacaccagcctgaccaacatggtgaaaccccatctctactaaaaatacaaaaatcagccgggtctcatggcaggcacctgtaatcccatctactgaggcaggagaattgcttgacccaggaggcagaggttgcagtgagccaagatcacgccattgcactccagcctgggggacagagcaagactctatctccaaaaaacaaaaaagataagcagctttagaatatggcgcattcaaaacagtctcagtaacaaagacattaaaagaaaacaatttactttctaattaaaattttgtgtttcttaagatcaaatcatataggtaacttcatagacctaaattaaaagtgatttttggctggactggcaacaatgttcccaatgtctttactttttaaaaaaggcttttcatatttaagcacatacctattttgtagacttacattgtttaatatttattttaatcttaatatttttacattattatattgcattatttattttttctaagttccagaataatagtgtcattattatagactatatgttttgaagtttgatattataatgggatattcattttttgttcttttcttgactcctttctcaagtgtgtgataaggtctgctgataaaatatttaaccccaagaaagtgaaaactaatataaaattagaaagacctatccaaattagacagtcaattccattaaaataagaagtgagaaaaacaatgttgggcattgaggtgtaaattttgcccagatgtatacccagtgtgaaatatcttctaataaaaatatatttggctcttatccctgcacatgtagaggcataaaaattggtaaacatgtcccgctgtgtagaactttaaaaaaaaggcatttttgaaagtgttgagtggcactgataactggtgaagcctacagccatccgcccaaaagtctgttctgatggcactgagttttcattgttctggatgtataagtctgtgtgtcaggtacagctgggcccagccagcttgagtcactcttgtacaagcttgtttttttctgtcttgtgaatgcacttgataatttaaaaataaaaatatctgtttctctgcagtttcagctaataattttgagatatgtgttgattttctgattgaatcaccaagaatttcaacaagtttagaaataatttaagatgaatgaaaaatatgtcagggggagctaagcatttgctaagctcttgatgtttatatgaaaaataaagggttgtttttatattgcaactactaaagagaaaaatagcagttgaagcaaacaccaggaaaatttggctctactgaaagcccagtccttttcccctttgtctcgctgacaaagtaagactagggttatgttcatgaatagattaataaaagatgtttctttaccacacaatctgagatgagatggggtgggggagatcatgacagtgccctccaagcaatagatccagctgataatcaagcagaaaatcagacaccagaatccatttgatgatgtacggcattaaacatttccttataacaaa

SEQ ID NO: 469 - DNA, 3358 bp, Homo sapiens
  source 1..3358: mol_type = unassigned DNA
atgccaacaactgagagtgaagcaaaagtaaaaaccaaagttcgctttgaagaattgcttaagacccacagtgatctaatgcgtgaaaagaaaaaactgaagaaaaaacttgtcaggtctgaagaaaacatctcacctgacactattagaagcaatcttcactatatgaaagaaactacaagtgatgatcccgacactattagaagcaatcttccccatattaaagaaactacaagtgatgatgtaagtgctgctaacactaacaacctgaagaagagcacgagagtcactaaaaacaaattgaggaacacacagttagcaactgaaaatcctaatggtgatgctagtgtagaggaagacaaacaaggaaagccaaataaaaaggtgataaagacggtgccccagttgactacacaagacctgaaaccggaaactcctgagaataaggttgattctacacaccagaaaacacatacaaagccacagccaggcgttgatcatcagaaaagtgagaaggcaaatgagggaagagaagagactgatttagaagaggatgaagaattgatgcaagcatatcagtgccatgtaactgaagaaatggcaaaggagattaagaggaaaataagaaagaaactgaaagaacagttgacttactttccctcagatactttattccatgatgacaaactaagcagtgaaaaaaggaaaaagaaaaaggaagttccagtcttctctaaagctgaaacaagtacattgaccatctctggtgacacagttgaaggtgaacaaaagaaagaatcttcagttagatcagtttcttcagattctcatcaagatgatgaaataagctcaatggaacaaagcacagaagacagcatgcaagatgatacaaaacctaaaccaaaaaaaacaaaaaagaagactaaagcagttgcagataataatgaagatgttgatggtgatggtgttcatgaaataacaagccgagatagcccggtttatcccaaatgtttgcttgatgatgaccttgtcttgggagtttacattcaccgaactgatagacttaagtcagattttatgatttctcacccaatggtaaaaattcatgtggttgatgagcatactggtcaatatgtcaagaaagatgatagtggacggcctgtttcatcttactatgaaaaagagaatgtggattatattcttcctattatgacccagccatatgattttaaacagttaaaatcaagacttccagagtgggaagaacaaattgtatttaatgaaaattttccctatttgcttcgaggctctgatgagagtcctaaagtcatcctgttctttgagattcttgatttcttaagcgtggatgaaattaagaataattctgaggttcaaaaccaagaatgtggctttcggaaaattgcctgggcatttcttaagcttctgggagccaatggaaatgcaaacatcaactcaaaacttcgcttgcagctatattacccacctactaagcctcgatccccattaagtgttgttgaggcatttgaatggtggtcaaaatgtccaagaaatcattacccatcaacactgtacgtaactgtaagaggactgaaagttccagactgtataaagccatcttaccgctctatgatggctcttcaggaggaaaaaggtaaaccagtgcattgtgaacgtcaccatgagtcaagctcagtagacacagaacctggattagaagagtcaaaggaagtaataaagtggaaacgactccctgggcaggcttgccgtatcccaaacaaacacctcttctcactaaatgcaggagaacgaggatgtttttgtcttgatttctcccacaatggaagaatattagcagcagcttgtgccagccgggatggatatccaattattttatatgaaattccttctggacgtttcatgagagaattgtgtggccacctcaatatcatttatgatctttcctggtcaaaagatgatcactacatccttacttcatcatctgatggcactgccaggatatggaaaaatgaaataaacaatacaaatactttcagagttttacctcatccttcttttgtttacacggctaaattccatccagctgtaagagagctagtagttacaggatgctatgattccatgatacggatatggaaagttgagatgagagaagattctgccatattggtccgacagtttgatgttcacaaaagttttatcaactcactttgttttgatactgaaggtcatcatatgtattcaggagattgtacaggggtgattgttgtttggaatacctatgtcaagattaatgatttggaacattcagtgcaccactggactataaataaggaaattaaagaaactgagtttaagggaattccaataagttatttggagattcatcccaatggaaaacgtttgttaatccataccaaagacagtactttgagaattatggatctccggatattagtagcaaggaagtttgtaggagcagcaaattatcgggagaagattcatagtactttgactccatgtgggacttttctgtttgctggaagtgaggatggtatagtgtatgtttggaacccagaaacaggagaacaagtagccatgtattctgacttgccattcaagtcacccattcgagacatttcttatcatccatttgaaaatatggttgcattctgtgcatttgggcaaaatgagccaattcttctgtatatttacgatttccatgttgcccagcaggaggctgaaatgttcaaacgctacaatggaacatttccattacctggaatacaccaaagtcaagatgccctatgtacctgtccaaaactaccccatcaaggctcttttcagattgatgaatttgtccacactgaaagttcttcaacgaagatgcagctagtaaaacagaggcttgaaactgtcacagaggtgatacgttcctgtgctgcaaaagtcaacaaaaatctctcatttacttcaccaccagcagtttcctcacaacagtctaagttaaagcagtcaaacatgctgaccgctcaagagattctacatcagtttggtttcactcagaccgacagtcactttgctgaattcaacacatgtatattatggtggaaaaagcactagactcagggtcagccagccagaagaactgagccgacctgggatcccaccacttcctaactgttttgttaggtagttcactttctctcttcggataaatgtctccacatttcctacttcatagaattgtcagaatcaacacaatacatttaatactttgaaactcataaaatattgggagaataaacagtatgaggtt

SEQ ID NO: 470 - DNA, 2920 bp, Homo sapiens
  source 1..2920: mol_type = unassigned DNA
ctcactaaatgcaggagaacgaggatgtttttgtcttgatttctcccacaatggaagaatattagcagcagcttgtgccagccgggatggatatccaattattttatatgaaattccttctggacgtttcatgagagaattgtgtggccacctcaatatcatttatgatctttcctggtcaaaagatgatcactacatccttacttcatcatctgatggcactgccaggatatggaaaaatgaaataaacaatacaaatactttcagagttttacctcatccttcttttgtttacacggctaaattccatccagctgtaagagagctagtagttacaggatgctatgattccatgatacggatatggaaagttgagatgagagaagattctgccatattggtccgacagtttgatgttcacaaaagttttatcaactcactttgttttgatactgaaggtcatcatatgtattcaggagattgtacaggggtgattgttgtttggaatacctatgtcaagattaatgatttggaacattcagtgcaccactggactataaataaggaaattaaagaaactgagtttaagggaattccaataagttatttggagattcatcccaatggaaaacgtttgttaatccataccaaagacagtactttgagaattatggatctccggatattagtagcaaggaagtttgtaggagcagcaaattatcgggagaagattcatagtactttgactccatgtgggacttttctgtttgctggaagtgaggatggtatagtgtatgtttggaacccagaaacaggagaacaagtagccatgtattctgacttgccattcaagtcacccattcgagacatttcttatcatccatttgaaaatatggttgcattctgtgcatttgggcaaaatgagccaattcttctgtatatttacgatttccatgttgcccagcaggaggctgaaatgttcaaacgctacaatggaacatttccattacctggaatacaccaaagtcaagatgccctatgtacctgtccaaaactaccccatcaaggctcttttcagattgatgaatttgtccacactgaaagttcttcaacgaagatgcagctagtaaaacagaggcttgaaactgtcacagaggtgatacgttcctgtgctgcaaaagtcaacaaaaatctctcatttacttcaccaccagcagtttcctcacaacagtctaagttaaagcagtcaaacatgctgaccgctcaagagattctacatcagtttggtttcactcagaccgggattatcagcatagaaagaaagccttgtaaccatcaggtagatacagcaccaacggtagtggctctttatgactacacagcgaatcgatcagatgaactaaccatccatcgcggagacattatccgagtgtttttcaaagataatgaagactggtggtatggcagcataggaaagggacaggaaggttattttccagctaatcatgtggctagtgaaacactgtatcaagaactgcctcctgagataaaggagcgatcccctcctttaagccctgaggaaaaaactaaaatagaaaaatctccagctcctcaaaaggtaaaataaaacaaaacagctcacagagacacctccttcttccccctgcttctgcctccatgagtaactacctatatgacgtgctgctgctgagaccaaggaatgaatagtgccaaatcttgctgaagaatgatcttgcagaaatctgattgtgaagaaggaaatctaaaaaggccaaacaagcttcagtagagataacaccaggaaagcagttactcaaacaagactgaaagagaagcaatcaatcaataagaacaagtcccaggacttcagactaggctcagaatctatgacacattctgaaatgagaaaagaacagagccatgaggaccaaggacacataatggatacacggatgaggaagaacaagcaagcaggcagaaaagtcactctaatagagtgtgccagctgtcacttttctcaggagtggtcgatggagttgactgctaccttaaccagatttgccatcgttctgaaactgccgtgtgttttctaaggacaaccaggtgttaagcctttctctttagaagaaggacagtaacctttctgttaaagaattgaagaaaagttaagagctgccgaaatgcacagaggtgaaaatgacaaaccaaatggaatttctcttcagagttcagaattttcagatactaaggaggaagaaaggatccactacttcttgttcttatgaatgactctagaaaaatcagaatcaagttgtgggtggaaaaatcaacgtggcctttgagttcagttgttataaaccattgtgactattgttggtcaaagtattggtacttatattgttagtaattgcatcataattacattaccagtgttggaaaactaatgaagaaaacactgtaattgctactcagcaaatgtgaataaaaggtgtttgcgttattaggatgtctgttaagtaatcatttaatattattatattggtaatggttgtatgtgtgatgctatgcccagaatatgaagtatctgtttttgaaattcactttatttaaaagataagcagctgactgggcacggtgcctcatgcctgtaatcctagcaccttgggaggctgaggcaggtggatcacctaaggtcaggagttcaacaacaccagcctgaccaacatggtgaaaccccatctctactaaaaatacaaaaatcagccgggtctcatggcaggcacctgtaatcccatctactgaggcaggagaattgcttgacccaggaggcagaggttgcagtgagccaagatcacgccattgcactccagcctgggggacagagcaagactctatctcc

SEQ ID NO: 471 - DNA, 5549 bp, Homo sapiens
  source 1..5549: mol_type = unassigned DNA
ggcggcgcgctgtccgcactgcggcacagagccgcggcttgctttcaggacacgggtcgctggcgggttaggtggctgcgtggccgcctcacttcgcgcacgcgccgctaggctgggggagttgatttgcactgctccgggtgtcggctccggcgggacgggcggttctgcgtacccctctccagtgtcaacctggggctgaatcttcaacctgtcaaagccttcttaattatgtctgagaaaaggatcctgattgagtcaatgctttgcattctcagtcctctgcataaagctgagagatgcctacagctgagagtgaagcaaaagtaaaaaccaaagttcgctttgaagaattgcttaagacccacagtgatctaatgcgtgaaaagaaaaaactgaagaaaaaacttgtcaggtctgaagaaaacatctcacctgacactattagaagcaatcttcactatatgaaagaaactacaagtgatgatcccgacactattagaagcaatcttccccatattaaagaaactacaagtgatgatgtaagtgctgctaacactaacaacctgaagaagagcacgagagtcactaaaaacaaattgaggaacacacagttagcaactgaaaatcctaatggtgatgctagtgtagaggaagacaaacaaggaaagccaaataaaaaggtgataaagacggtgccccagttgactacacaagacctgaaaccggaaactcctgagaataaggttgattctacacaccagaaaacacatacaaagccacagccaggcgttgatcatcagaaaagtgagaaggcaaatgagggaagagaagagactgatttagaagaggatgaagaattgatgcaagcatatcagtgccatgtaactgaagaaatggcaaaggagattaagaggaaaataagaaagaaactgaaagaacagttgacttactttccctcagatactttattccatgatgacaaactaagcagtgaaaaaaggaaaaagaaaaaggaagttccagtcttctctaaagctgaaacaagtacattgaccatctctggtgacacagttgaaggtgaacaaaagaaagaatcttcagttagatcagtttcttcagattctcatcaagatgatgaaataagctcaatggaacaaagcacagaagacagcatgcaagatgatacaaaacctaaaccaaaaaaaacaaaaaagaagactaaagcagttgcagataataatgaagatgttgatggtgatggtgttcatgaaataacaagccgagatagcccggtttatcccaaatgtttgcttgatgatgaccttgtcttgggagtttacattcaccgaactgatagacttaagtcagattttatgatttctcacccaatggtaaaaattcatgtggttgatgagcatactggtcaatatgtcaagaaagatgatagtggacggcctgtttcatcttactatgaaaaagagaatgtggattatattcttcctattatgacccagccatatgattttaaacagttaaaatcaagacttccagagtgggaagaacaaattgtatttaatgaaaattttccctatttgcttcgaggctctgatgagagtcctaaagtcatcctgttctttgagattcttgatttcttaagcgtggatgaaattaagaataattctgaggttcaaaaccaagaatgtggctttcggaaaattgcctgggcatttcttaagcttctgggagccaatggaaatgcaaacatcaactcaaaacttcgcttgcagctatattacccacctactaagcctcgatccccattaagtgttgttgaggcatttgaatggtggtcaaaatgtccaagaaatcattacccatcaacactgtacgtaactgtaagaggactgaaagttccagactgtataaagccatcttaccgctctatgatggctcttcaggaggaaaaaggtaaaccagtgcattgtgaacgtcaccatgagtcaagctcagtagacacagaacctggattagaagagtcaaaggaagtaataaagtggaaacgactccctgggcaggcttgccgtatcccaaacaaacacctcttctcactaaatgcaggagaacgaggatgtttttgtcttgatttctcccacaatggaagaatattagcagcagcttgtgccagccgggatggatatccaattattttatatgaaattccttctggacgtttcatgagagaattgtgtggccacctcaatatcatttatgatctttcctggtcaaaagatgatcactacatccttacttcatcatctgatggcactgccaggatatggaaaaatgaaataaacaatacaaatactttcagagttttacctcatccttcttttgtttacacggctaaattccatccagctgtaagagagctagtagttacaggatgctatgattccatgatacggatatggaaagttgagatgagagaagattctgccatattggtccgacagtttgatgttcacaaaagttttatcaactcactttgttttgatactgaaggtcatcatatgtattcaggagattgtacaggggtgattgttgtttggaatacctatgtcaagattaatgatttggaacattcagtgcaccactggactataaataaggaaattaaagaaactgagtttaagggaattccaataagttatttggagattcatcccaatggaaaacgtttgttaatccataccaaagacagtactttgagaattatggatctccggatattagtagcaaggaagtttgtaggagcagcaaattatcgggagaagattcatagtactttgactccatgtgggacttttctgtttgctggaagtgaggatggtatagtgtatgtttggaacccagaaacaggagaacaagtagccatgtattctgacttgccattcaagtcacccattcgagacatttcttatcatccatttgaaaatatggttgcattctgtgcatttgggcaaaatgagccaattcttctgtatatttacgatttccatgttgcccagcaggaggctgaaatgttcaaacgctacaatggaacatttccattacctggaatacaccaaagtcaagatgccctatgtacctgtccaaaactaccccatcaaggctcttttcagattgatgaatttgtccacactgaaagttcttcaacgaagatgcagctagtaaaacagaggcttgaaactgtcacagaggtgatacgttcctgtgctgcaaaagtcaacaaaaatctctcatttacttcaccaccagcagtttcctcacaacagtctaagttaaagcagtcaaacatgctgaccgctcaagagattctacatcagtttggtttcactcagaccgggattatcagcatagaaagaaagccttgtaaccatcaggtagatacagcaccaacggtagtggctctttatgactacacagcgaatcgatcagatgaactaaccatccatcgcggagacattatccgagtgtttttcaaagataatgaagactggtggtatggcagcataggaaagggacaggaaggttattttccagctaatcatgtggctagtgaaacactgtatcaagaactgcctcctgagataaaggagcgatcccctcctttaagccctgaggaaaaaactaaaatagaaaaatctccagctcctcaaaagcaatcaatcaataagaacaagtcccaggacttcagactaggctcagaatctatgacacattctgaaatgagaaaagaacagagccatgaggaccaaggacacataatggatacacggatgaggaagaacaagcaagcaggcagaaaagtcactctaatagagtaaagaattgaagaaaagttaagagctgccgaaatgcacagaggtgaaaatgacaaaccaaatggaatttctcttcagagttcagaattttcagatactaaggaggaagaaaggatccactacttcttgttcttatgaatgactctagaaaaatcagaatcaagttgtgggtggaaaaatcaacgtggcctttgagttcagttgttataaaccattgtgactattgttggtcaaagtattggtacttatattgttagtaattgcatcataattacattaccagtgttggaaaactaatgaagaaaacactgtaattgctactcagcaaatgtgaataaaaggtgtttgcgttattaggatgtctgttaagtaatcatttaatattattatattggtaatggttgtatgtgtgatgctatgcccagaatatgaagtatctgtttttgaaattcactttatttaaaagataagcagctgactgggcacggtgcctcatgcctgtaatcctagcaccttgggaggctgaggcaggtggatcacctaaggtcaggagttcaacaacaccagcctgaccaacatggtgaaaccccatctctactaaaaatacaaaaatcagccgggtctcatggcaggcacctgtaatcccatctactgaggcaggagaattgcttgacccaggaggcagaggttgcagtgagccaagatcacgccattgcactccagcctgggggacagagcaagactctatctccaaaaaacaaaaaagataagcagctttagaatatggcgcattcaaaacagtctcagtaacaaagacattaaaagaaaacaatttactttctaattaaaattttgtgtttcttaagatcaaatcatataggtaacttcatagacctaaattaaaagtgatttttggctggactggcaacaatgttcccaatgtctttactttttaaaaaaggcttttcatatttaagcacatacctattttgtagacttacattgtttaatatttattttaatcttaatatttttacattattatattgcattatttattttttctaagttccagaataatagtgtcattattatagactatatgttttgaagtttgatattataatgggatattcattttttgttcttttcttgactcctttctcaagtgtgtgataaggtctgctgataaaatatttaaccccaagaaagtgaaaactaatataaaattagaaagacctatccaaattagacagtcaattccattaaaataagaagtgagaaaaacaatgttgggcattgaggtgtaaattttgcccagatgtatacccagtgtgaaatatcttctaataaaaatatatttggctcttatccctgcacatgtagaggcataaaaattggtaaacatgtcccgctgtgtagaactttaaaaaaaaggcatttttgaaagtgttgagtggcactgataactggtgaagcctacagccatccgcccaaaagtctgttctgatggcactgagttttcattgttctggatgtataagtctgtgtgtcaggtacagctgggcccagccagcttgagtcactcttgtacaagcttgtttttttctgtcttgtgaatgcacttgataatttaaaaataaaaatatctgtttctctgca

SEQ ID NO: 472 - DNA, 1400 bp, Homo sapiens
  source 1..1400: mol_type = unassigned DNA
gcggggaccggacctgcacaggccgcctatggcgggcggcgggtgggaccgcgagttacagccggccaactggggccagccaggagcctgagggtcggaagcccccaacacaagatgctgagctccttcctgagcccccagaatggcacctgggcagacaccttctctctgctcttggctcttgccgttgccctctacttgggctactactgggcatgtgtgcttcagaggcctcggctggtggctgggccgcagtttctggccttcctggagccacactgttccatcaccaccgagactttctacccaacgctgtggtgttttgaggggcgactacaaagcatcttccaagtcctcctgcagtctcagcccctagtcctttatcagagtgacatcctccaaacaccagatggaggccagctcctgctagactgggccaagcagcctgacagcagccaagaccctgatcctactacccagcccattgtgctgctgcttcctggcatcactggcagtagccaggatacatacgtcttgcacctagttaaccaagctctgagggatggctaccaggctgtcgtgtttaacaaccggggctgccgtggggaggaactgcggacccacagggctttttgtgccagcaatactgaagatctagagacagtcgtgaaccacataaagcatcgttatccccaagctccactgctggccgtgggcatctcttttggagggatactggtgctgaatcacctggcacaggccaggcaggctgcagggctggtggcagcactgactctgtctgcatgctgggattcctttgagaccactcgctccctggaaaccccactcaactcactgctcttcaatcagcccctcactgctgggctctgccaacttgtggaacgaaacagaaaggtgattgaaaaggtggtggacatagactttgtactacaggcccgtacaatccgccagtttgatgagcgctacacatctgtggcctttggatatcaagactgtgttacctactacaaagcagcaagccctagaaccaagatagatgccatccggatccctgtgctctatctcagtgcagcagatgaccccttctcccccgtctgtgcccttcccatacaggccgcccaacactccccctacgttgcgctgctcatcacagcccggggtggccacatcggcttcctggaagggctgctcccgtggcagcactggtacatgagccgcctcttgcatcagtacgccaaagccatcttccaggacccagaggggctgcctgacctcagggctctcttaccttctgaggacagaaacagctgacaagagtaccatttggggtctcagttcactctttccttgtttattaaatatcaacttttcctgcctaa

SEQ ID NO: 473 - DNA, 2117 bp, Homo sapiens
  source 1..2117: mol_type = unassigned DNA
atgctgggcgcgcgctccttggaactagagaggaggtggccggggcggggccgggggaggggggtagggcagagccggcgggagcccggcgctgattggccggcctggctggcgggcccccgccgctggttcgtagccggcgcagcggcctgggctgggatgtgaggagcggcgggttccgggctccgggctctgggtggcggcggctgtgagcggcggcactgcggcgcaggccagcgggcgccgtcggcggctggccctgtcggccgcgggatgaggaagcggaccgagcccgtcgccttggagcatgagcgctgcgccgccgcgggctcgtcctcctccggctcggccgccgcggcgctggacgccgactgccgcctgaagcagaacctacgcctgacgggcccggcggcggctgagccgcgctgcgcagccgacgcgggaatgaagcgggcgctgggcaggcgaaagggcgtgtggttgcgcctgaggaagatacttttctgtgttttggggttgtacattgccattccatttctcatcaaactatgtcctggaatacaggccaaactgattttcttgaatttcgtaagagttccctatttcattgatttgaaaaaaccacaggatcaaggtttgaatcacacgtgtaactactacctgcagccagaggaagacgtgaccattggagtctggcacaccgtccctgcagtctggtggaagaacgcccaaggcaaagaccagatgtggtatgaggatgccttggcttccagccaccctatcattctgtacctgcatgggaacgcaggtaccagaggaggcgaccaccgcgtggagctttacaaggtgctgagttcccttggttaccatgtggtcacctttgactacagaggttggggtgactcagtgggaacgccatctgagcggggcatgacctatgacgcactccacgtttttgactggatcaaagcaagaagtggtgacaaccccgtgtacatctggggccactctctgggcactggcgtggcgacaaatctggtgcggcgcctctgtgagcgagagacgcctccagatgcccttatattggaatctccattcactaatatccgcgaagaagctaagagccatccattttcagtgatatatcgatacttccctgggtttgactggttcttccttgatcctattacaagtagtggaattaaatttgcaaatgatgaaaacgtgaagcacatctcctgtcccctgctcatcctgcacgctgaggacgacccggtggtgcccttccagcttggcagaaagctctatagcatcgccgcaccagctcgaagcttccgagatttcaaagttcagtttgtgccctttcattcagaccttggctacaggcacaaatacatttacaagagccctgagctgccacggatactgagggaattcctggggaagtcggagcctgagcaccagcactgagcctggccgtgggaaggaagcatgaagacctctgccctcctcccgttttcctccagtcagcagcccggtatcctgaagccccggggggccggcacctgcaatgctcaggagcccagctcgcacctggagagcacctcagatcccaggcggggaggcccctgcaggcctgcagtgcccggaggcctgagcatggctgtgtggaaagcgtgggtggcaggcatgtggctctccttgccgcccctcaacctgagatcttgttgggagacttaatggcagcaggcagccatcactgcctgcttgatgctgcactgagctggacagggggagtccgggcaggggactcttggggctcgggaccatgctgagctttttggcaccacccacagagaacgtggggtccaggttctttctgcaccttcccagcacatgcagaatgactccagtggttccatcgtcccctcctgccctgtgtacctgcttgcctttctcagctgccccacctcccctgggctggcccactcacccacagtggaagtgcccgggatctgcacttcctcccctttcacctacctgtacacctaacctggccttagactgagctttatttaagaataaaatcgtggtggtggtccttttgtctctctgca

SEQ ID NO: 474 - DNA, 1725 bp, Homo sapiens
  source 1..1725: mol_type = unassigned DNA
gccagggatgctgggcgcgcgctccttggaactagagaggaggtggccggggcggggccgggggaggggggtagggcagagccggcgggagcccggcgctgattggccggcctggctggcgggcccccgccgctggttcgtagccggcgcagcggcctgggctgggatgtgaggagcggcgggttccgggctccgggctctgggtggcggcggctgtgagcggcggcactgcggcgcaggccagcgggcgccgtcggcggctggccctgtcggccgcgggatgaggaagcggaccgagcccgtcgccttggagcatgagcgctgcgccgccgcgggctcgtcctcctccggctcggccgccgcggcgctggacgccgactgccgcctgaagcagaacctacgcctgacgggcccggcggcggctgagccgcgctgcgcagccgacgcgggaatgaagcgggcgctgggcaggcgaaagggcgtgtggttgcgcctgaggaagatacttttctgtgttttggggttgtacattgccattccatttctcatcaaactatgtcctggaatacaggccaaactgattttcttgaatttcgtaagagttccctatttcattgatttgaaaaaaccacaggatcaaggtttgaatcacacgtgtaactactacctgcagccagaggaagacgtgaccattggagtctggcacaccgtccctgcagtctggtggaagaacgcccaaggcaaagaccagatgtggtatgaggatgccttggcttccagccaccctatcattctgtacctgcatgggaacgcaggtaccagaggaggcgaccaccgcgtggagctttacaaggtgctgagttcccttggttaccatgtggtcacctttgactacagaggttggggtgactcagtgggaacgccatctgagcggggcatgacctatgacgcactccacgtttttgactggatcaaagcaagaagtggtgacaaccccgtgtacatctggggccactctctgggcactggcgtggcgacaaatctggtgcggcgcctctgtgagcgagagacgcctccagatgcccttatattggaatctccattcactaatatccgcgaagaagctaagagccatccattttcagtgatatatcgatacttccctgggtttgactggttcttccttgatcctattacaagtagtggaattaaatttgcaaatgatgaaaacgtgaagcacatctcctgtcccctgctcatcctgcacgctgaggacgacccggtggtgcccttccagcttggcagaaagctctatagcatcgccgcaccagctcgaagcttccgagatttcaaagttcagtttgtgccctttcattcagaccttggctacaggcacaaatacatttacaagagccctgagctgccacggatactgagacctcagcagggcccaggttccagcccagatcccagcatgtggtcagagctggtgtgactgaagccaacaggtgacacggtcatcgaagagcagcagacaaaactaaaactaacccaaaggcagctgaaagtggagggcaggtgaattcccagccctcgccggattcaacttttgccaacggtgaagaactgccctgagctgcaaaccttacaaagtctgtaactctagataaaccataccatgtgctaactgcactgaaataaaacactaactacattataatgtca

SEQ ID NO: 475 - DNA, 615 bp, Homo sapiens
  source 1..615: mol_type = unassigned DNA
cgggaggcctgaggaggccgctctttcctgatacgaggttacagctggggtctgatgtcaggtggggggcatggtggggtctgctttctctgctgtattcttctgcaagggcgaaagggcgtgtggttgcgcctgaggaagatacttttctgtgttttggggttgtacattgccattccatttctcatcaaactatgtcctggaatacaggccaaactgattttcttgaatttcgtaagagttccctatttcattgatttgaaaaaaccacaggatcaaggtttgaatcacacgtgtaactactacctgcagccagaggaagacgtgaccattggagtctggcacaccgtccctgcagtctggtggaagaacgcccaaggcaaagaccagatgtggtatgaggatgccttggcttccagccaccctatcattctgtacctgcatgggaacgcaggtaccagaggaggcgaccaccgcgtggagctttacaaggtgctgagttcccttggttaccatgtggtcacctttgactacagaggttggggtgactcagtgggaacgccatctgagcggggcatgacctatgacgcactccacgtttttgactggatcaaa

SEQ ID NO: 476 - DNA, 1714 bp, Homo sapiens
  source 1..1714: mol_type = unassigned DNA
atgaggaagcggaccgagcccgtcgccttggagccgcgctgcgcagccgacgcgggaatgaagcgggcgctgggcaggcgaaagggcgtgtggttgcgcctgaggaagatacttttctgtgttttggggttgtacattgccattccatttctcatcaaactatgtcctggaatacaggccaaactgattttcttgaatttcgtaagagttccctatttcattgatttgaaaaaaccacaggatcaaggtttgaatcacacgtgtaactactacctgcagccagaggaagacgtgaccattggagtctggcacaccgtccctgcagtctggtggaagaacgcccaaggcaaagaccagatgtggtatgaggatgccttggcttccagccaccctatcattctgtacctgcatgggaacgcaggtaccagaggaggcgaccaccgcgtggagctttacaaggtgctgagttcccttggttaccatgtggtcacctttgactacagaggttggggtgactcagtgggaacgccatctgagcggggcatgacctatgacgcactccacgtttttgactggatcaaagcaagaagtggtgacaaccccgtgtacatctggggccactctctgggcactggcgtggcgacaaatctggtgcggcgcctctgtgagcgagagacgcctccagatgcccttatattggaatctccattcactaatatccgcgaagaagctaagagccatccattttcagtgatatatcgatacttccctgggtttgactggttcttccttgatcctattacaagtagtggaattaaatttgcaaatgatgaaaacgtgaagcacatctcctgtcccctgctcatcctgcacgctgaggacgacccggtggtgcccttccagcttggcagaaagctctatagcatcgccgcaccagctcgaagcttccgagatttcaaagttcagtttgtgccctttcattcagaccttggctacaggcacaaatacatttacaagagccctgagctgccacggatactgagggaattcctggggaagtcggagcctgagcaccagcactgagcctggccgtgggaaggaagcatgaagacctctgccctcctcccgttttcctccagtcagcagcccggtatcctgaagccccggggggccggcacctgcaatgctcaggagcccagctcgcacctggagagcacctcagatcccaggcggggaggcccctgcaggcctgcagtgcccggaggcctgagcatggctgtgtggaaagcgtgggtggcaggcatgtggctctccttgccgcccctcaacctgagatcttgttgggagacttaatggcagcaggcagccatcactgcctgcttgatgctgcactgagctggacagggggagtccgggcaggggactcttggggctcgggaccatgctgagctttttggcaccacccacagagaacgtggggtccaggttctttctgcaccttcccagcacatgcagaatgactccagtggttccatcgtcccctcctgccctgtgtacctgcttgcctttctcagctgccccacctcccctgggctggcccactcacccacagtggaagtgcccgggatctgcacttcctcccctttcacctacctgtacacctaacctggccttagactgagctttatttaagaataaaatcgtggtggtggtc

SEQ ID NO: 477 - DNA, 2260 bp, Homo sapiens
  source 1..2260: mol_type = unassigned DNA
cataatgggaaataaggggagcctgcttgtcaagccagttatccgcaaaatctgcgctctgtgtgcttcctgagttaaagtcacgcctacggactggccgcctcctttctttttcgctctttaccgctttctcattccgactgccactctttgttctttcctctccgcgtccccccgaccctgtgtgtcgtggttcgtgccggtcccagttgagtcttgagtcccgggaagagaccctgcgcggactggggagccgttgaattttgctgtcagactcccagtttcctcttcttcagtgcctcttcatgcctcccccggctctgtttttatcttccctttaccctcgccttgaatttcagaatgacttttacagatcctgtatccgtcggtcctcccctcaacccccgcccaacctagcctggagacccgagtcattgtattctggagagctggcgggtggtggatacgtactatcagccccgtgccctggagaaacatgctgacagcatcctggcactggcttcagtattctggtccatctcttattactcctctcccttcgccttcttctacttgtacaggaaaggttacttgagtttgtccaaagtggtgccgttttctcactatgctgggacattgctgctacttctggcaggtgtggcctgcctccgaggcattggccgctggaccaacccccagtaccggcagttcatcaccatcttggaagcaacacatcggaaccagtcttcagaaaacaagaggcagcttgccaactacaactttgacttccggagctggccagtcgacttccactgggaagaacccagcagccggaaggagtctcgagggggcccttcccgccggggtgtggccctgcttcgcccagagcccctgcaccgggggacagcagacaccctcctcaaccgggttaagaagctgccttgtcagatcaccagctacctggtggcgcacaccctagggcgccggatgctgtatccaggctctgtgtacctgctgcagaaggccctcatgcctgtgctgctgcagggccaggcccgactggtggaagagtgtaatgggcgccgggcaaagctgctggcctgtgatggcaatgagattgacaccatgtttgtggaccggcgggggacagctgagccccagggacagaagctggtgatctgctgtgaggggaatgctgggttttatgaggtgggctgcgtctccacgcccctggaagctggatattcagtcctgggctggaatcatccaggctttgctggaagcacgggggtgccattcccgcagaatgaggctaatgccatggatgtggtggtccagtttgccatccaccgcctaggcttccagccccaggacatcatcatctacgcctggtccatcggcggcttcactgccacgtgggcagccatgtcctacccagatgttagtgccatgatcctggatgcctcctttgatgacctggtgcccttggccttgaaggtcatgccagacagctggaggggcctggtgaccaggaccgtgaggcagcatctcaatctaaacaacgcggagcagctgtgcagataccagggtcctgtactgctgatccggagaaccaaggatgagatcatcaccaccacggttcctgaggacatcatgtccaaccgaggcaatgacctcctgctgaagctcctgcagcatcggtatccccgggtgatggcagaggagggtcttcgagtggtgaggcagtggttggaggcctcctcacagctggaggaagcctcaatttatagccgatgggaggtggaagaggactggtgtctgtctgtcctccgctcctaccaggcagaacacgggcccgacttcccctggagcgtgggggaggacatgagtgcagatggacggcggcagctggctttgtttctggctcggaagcatctgcacaactttgaggccactcactgcaccccactcccagcccagaacttccagatgccctggcacctctagggaccaactgggactcattatggaagaatggggtgagaggagacatgaggaaagaccctcttatttgtgattctctgtgttcatgttgctgtttatagtttgtggaaagtgggggaccatcccccttctcaccactgttcctcttgcacgtttcccctcattcatgtggctgtacttaaccttctccaacatacatcctgcattacatgaatggattattcctaataattaataaaaaggtattttttctact

SEQ ID NO: 478 - DNA, 2103 bp, Homo sapiens
  source 1..2103: mol_type = unassigned DNA
aactgcgcgaaactcttctcaggaagcactgaaaatgtcgcaactcgcccggaggcggagccggtacgggctgacgtcaagggcacacaacacctcagaggcagggagggcggggccggcagggggacctgctgctggaagagcagcggcccgagccggggccatggcgaagctgctgagctgcgtcctaggcccccggctctacaaaatctaccgggagagggactctgaaagggccccggccagcgtccctgagacgccaacggcagtcactgccccccattccagctcctgggatacgtactatcagccccgtgccctggagaaacatgctgacagcatcctggcactggcttcagtattctggtccatctcttattactcctctcccttcgccttcttctacttgtacaggaaaggttacttgagtttgtccaaagtggtgccgttttctcactatgctgggacattgctgctacttctggcaggtgtggcctgcctccgaggcattggccgctggaccaacccccagtaccggcagttcatcaccatcttggaagcaacacatcggaaccagtcttcagaaaacaagaggcagcttgccaactacaactttgacttccggagctggccagtcgacttccactgggaagaacccagcagccggaaggagtctcgagggggcccttcccgccggggtgtggccctgcttcgcccagagcccctgcaccgggggacagcagacaccctcctcaaccgggttaagaagctgccttgtcagatcaccagctacctggtggcgcacaccctagggcgccggatgctgtatccaggctctgtgtacctgctgcagaaggccctcatgcctgtgctgctgcagggccaggcccgactggtggaagagtgtaatgggcgccgggcaaagctgctggcctgtgatggcaatgagattgacaccatgtttgtggaccggcgggggacagctgagccccagggacagaagctggtgatctgctgtgaggggaatgctgggttttatgaggtgggctgcgtctccacgcccctggaagctggatattcagtcctgggctggaatcatccaggctttgctggaagcacgggggtgccattcccgcagaatgaggctaatgccatggatgtggtggtccagtttgccatccaccgcctaggcttccagccccaggacatcatcatctacgcctggtccatcggcggcttcactgccacgtgggcagccatgtcctacccagatgttagtgccatgatcctggatgcctcctttgatgacctggtgcccttggccttgaaggtcatgccagacagctggaggggcctggtgaccaggaccgtgaggcagcatctcaatctaaacaacgcggagcagctgtgcagataccagggtcctgtactgctgatccggagaaccaaggatgagatcatcaccaccacggttcctgaggacatcatgtccaaccgaggcaatgacctcctgctgaagctcctgcagcatcggtatccccgggtgatggcagaggagggtcttcgagtggtgaggcagtggttggaggcctcctcacagctggaggaagcctcaatttatagccgatgggaggtggaagaggactggtgtctgtctgtcctccgctcctaccaggcagaacacgggcccgacttcccctggagcgtgggggaggacatgagtgcagatggacggcggcagctggctttgtttctggctcggaagcatctgcacaactttgaggccactcactgcaccccactcccagcccagaacttccagatgccctggcacctctagggaccaactgggactcattatggaagaatggggtgagaggagacatgaggaaagaccctcttatttgtgattctctgtgttcatgttgctgtttatagtttgtggaaagtgggggaccatcccccttctcaccactgttcctcttgcacgtttcccctcattcatgtggctgtacttaaccttctccaacatacatcctgcattacatgaatggattattcctaataattaataaaaaggtattttttctactatcaggctaa

SEQ ID NO: 479 - DNA, 2069 bp, Homo sapiens
  source 1..2069: mol_type = unassigned DNA
ctgaaaatgtcgcaactcgcccggaggcggagccggtacgggctgacgtcaagggcacacaacacctcagaggcagggagggcggggccggcagggggacctgctgctggaagagcagcggcccgagccggggccatggcgaagctgctgagctgcgtcctaggcccccggctctacaaaatctaccgggagagggactctgaaagggccccggccagcgtccctgagacgccaacggcagtcactgccccccattccagctcctgggatacgtactatcagccccgtgccctggagaaacatgctgacagcatcctggcactggcttcagtattctggtccatctcttattactcctctcccttcgccttcttctacttgtacaggaaaggttacttgagtttgtccaaagtggtgccgttttctcactatgctgggacattgctgctacttctggcaggtgtggcctgcctccgaggcattggccgctggaccaacccccagtaccggcagttcatcaccatcttggaagcaacacatcggaaccagtcttcagaaaacaagaggcagcttgccaactacaactttgacttccggagctggccagtcgacttccactgggaagaacccagcagccggaaggagtctcgagggggcccttcccgccggggtgtggccctgcttcgcccagagcccctgcaccgggggacagcagacaccctcctcaaccgggttaagaagctgccttgtcagatcaccagctacctggtggcgcacaccctagggcgccggatgctgtatccaggctctgtgtacctgctgcagaaggccctcatgcctgtgctgctgcagggccaggcccgactggtggaagagtgtaatgggcgccgggcaaagctgctggcctgtgatggcaatgagattgacaccatgtttgtggaccggcgggggacagctgagccccagggacagaagctggtgatctgctgtgaggggaatgctgggttttatgaggtgggctgcgtctccacgcccctggaagctggatattcagtcctgggctggaatcatccaggctttgctggaagcacgggggtgccattcccgcagaatgaggctaatgccatggatgtggtggtccagtttgccatccaccgcctgggcttccagccccaggacatcatcatctacgcctggtccatcggcggcttcactgccacgtgggcagccatgtcctacccagatgttagtgccatgatcctggatgcctcctttgatgacctggtgcccttggccttgaaggtcatgccagacagctggaggggcctggtgaccaggaccgtgaggcagcatctcaatctaaacaacgcggagcagctgtgcagataccagggtcctgtactgctgatccggagaaccaaggatgagatcatcaccaccacggttcctgaggacatcatgtccaaccgaggcaatgacctcctgctgaagctcctgcagcatcggtatccccgggtgatggcagaggagggtcttcgagtggtgaggcagtggttggaggcctcctcacagctggaggaagcctcaatttatagccgatgggaggtggaagaggactggtgtctgtctgtcctccgctcctaccaggcagaacacgggcccgacttcccctggagcgtgggggaggacatgagtgcagatggacggcggcagctggctttgtttctggctcggaagcatctgcacaactttgaggccactcactgcaccccactcccagcccagaacttccagatgccctggcacctctagggaccaactgggactcattatggaagaatggggtgagaggagacatgaggaaagaccctcttatttgtgattctctgtgttcatgttgctgtttatagtttgtggaaagtgggggaccatcccccttctcaccactgttcctcttgcacgtttcccctcattcatgtggctgtacttaaccttctccaacatacatcctgcattacatgaatggattattcctaataattaataaaaaggtattttttctactatca

SEQ ID NO: 480 - DNA, 889 bp, Homo sapiens
  source 1..889: mol_type = unassigned DNA
agttgagtcttgagtcccgggaagagaccctgcgcggactggggagccgttgaattttgctgtcagactcccagtttcctcttcttcagtgcctcttcatgcctcccccggctctgtttttatcttccctttaccctcgccttgaatttcagaatgacttttacagatcctgtatccgtcggtcctcccctcaacccccgcccaacctagcctggagacccgagtcattgtattctggagagctggcgggtggtggttacttgagtttgtccaaagtggtgccgttttctcactatgctgggacattgctgctacttctggcaggtgtggcctgcctccgaggcattggccgctggaccaacccccagtaccggcagttcatcaccatcttggaagcaacacatcggaaccagtcttcagaaaacaagaggcagcttgccaactacaactttgacttccggagctggccagtcgacttccactgggaagaacccagcagccggaaggagtctcgagggggcccttcccgccggggtgtggccctgcttcgcccagagcccctgcaccgggggacagcagacaccctcctcaaccgggttaagaagctgccttgtcagatcaccagctacctggtggcgcacaccctagggcgccggatgctgtatccaggctctgtgtacctgctgcagaaggccctcatgcctgtgctgctgcagggccaggcccgactggtggaagagtgtaatgggcgccgggcaaagctgctggcctgtgatggcaatgagattgacaccatgtttgtggaccggcgggggacagctgagccccagggacagaagctggtgatctgctgtgaggggaatgctgggttttatgaggtgggctgcgt

SEQ ID NO: 481 - DNA, 889 bp, Homo sapiens; identical to SEQ ID NO: 480
  source 1..889: mol_type = unassigned DNA

SEQ ID NO: 482 - DNA, 889 bp, Homo sapiens; identical to SEQ ID NO: 480
  source 1..889: mol_type = unassigned DNA

SEQ ID NO: 483 - DNA, 2069 bp, Homo sapiens
  source 1..2069: mol_type = unassigned DNA
ctgaaaatgtcgcaactcgcccggaggcggagccggtacgggctgacgtcaagggcacacaacacctcagaggcagggagggcggggccggcagggggacctgctgctggaagagcagcggcccgagccggggccatggcgaagctgctgagctgcgtcctaggcccccggctctacaaaatctaccgggagagggactctgaaagggccccggccagcgtccctgagacgccaacggcagtcactgccccccattccagctcctgggatacgtactatcagccccgtgccctggagaaacatgctgacagcatcctggcactggcttcagtattctggtccatctcttattactcctctcccttcgccttcttctacttgtacaggaaaggttacttgagtttgtccaaagtggtgccgttttctcactatgctgggacattgctgctacttctggcaggtgtggcctgcctccgaggcattggccgctggaccaacccccagtaccggcagttcatcaccatcttggaagcaacacatcggaaccagtcttcagaaaacaagaggcagcttgccaactacaactttgacttccggagctggccagtcgacttccactgggaagaacccagcagccggaaggagtctcgagggggcccttcccgccggggtgtggccctgcttcgcccagagcccctgcaccgggggacagcagacaccctcctcaaccgggttaagaagctgccttgtcagatcaccagctacctggtggcgcacaccctagggcgccggatgctgtatccaggctctgtgtacctgctgcagaaggccctcatgcctgtgctgctgcagggccaggcccgactggtggaagagtgtaatgggcgccgggcaaagctgctggcctgtgatggcaatgagattgacaccatgtttgtggaccggcgggggacagctgagccccagggacagaagctggtgatctgctgtgaggggaatgctgggttttatgaggtgggctgcgtctccacgcccctggaagctggatattcagtcctgggctggaatcatccaggctttgctggaagcacgggggtgccattcccgcagaatgaggctaatgccatggatgtggtggtccagtttgccatccaccgcctaggcttccagccccaggacatcatcatctacgcctggtccatcggcggcttcactgccacgtgggcagccatgtcctacccagatgttagtgccatgatcctggatgcctcctttgatgacctggtgcccttggccttgaaggtcatgccagacagctggaggggcctggtgaccaggaccgtgaggcagcatctcaatctaaacaacgcggagcagctgtgcagataccagggtcctgtactgctgatccggagaaccaaggatgagatcatcaccaccacggttcctgaggacatcatgtccaaccgaggcaatgacctcctgctgaagctcctgcagcatcggtatccccgggtgatggcagaggagggtcttcgagtggtgaggcagtggttggaggcctcctcacagctggaggaagcctcaatttatagccgatgggaggtggaagaggactggtgtctgtctgtcctccgctcctaccaggcagaacacgggcccgacttcccctggagcgtgggggaggacatgagtgcagatggacggcggcagctggctttgtttctggctcggaagcatctgcacaactttgaggccactcactgcaccccactcccagcccagaacttccagatgccctggcacctctagggaccaactgggactcattatggaagaatggggtgagaggagacatgaggaaagaccctcttatttgtgattctctgtgttcatgttgctgtttatagtttgtggaaagtgggggaccatcccccttctcaccactgttcctcttgcacgtttcccctcattcatgtggctgtacttaaccttctccaacatacatcctgcattacatgaatggattattcctaataattaataaaaaggtattttttctactatca

SEQ ID NO: 484 - DNA, 889 bp, Homo sapiens; identical to SEQ ID NO: 480
  source 1..889: mol_type = unassigned DNA

SEQ ID NO: 485 - DNA, 2068 bp, Homo sapiens
  source 1..2068: mol_type = unassigned DNA
ctgaaaatgtcgcaactcgcccggaggcggagccggtacgggctgacgtcaagggcacacaacacctcagaggcagggagggcggggccggcagggggacctgctgctggaagagcagcggcccgagccggggccatggcgaagctgctgagctgcgtcctaggcccccggctctacaaaatctaccgggagagggactctgaaagggccccggccagcgtccctgagacgccaacggcagtcactgccccccattccagctcctgggatacgtactatcagccccgtgccctggagaaacatgctgacagcatcctggcactggcttcagtattctggtccatctcttattactcctctcccttcgccttcttctacttgtacaggaaaggttacttgagtttgtccaaagtggtgccgttttctcactatgctgggacattgctgctacttctggcaggtgtggcctgcctccgaggcattggccgctggaccaacccccagtaccggcagttcatcaccatcttggaagcaacacatcggaaccagtcttcagaaaacaagaggcagcttgccaactacaactttgacttccggagctggccagtcgacttccactgggaagaacccagcagccggaaggagtctcgagggggcccttcccgccggggtgtggccctgcttcgcccagagcccctgcaccgggggacagcagacaccctcctcaaccgggttaagaagctgccttgtcagatcaccagctacctggtggcgcacaccctagggcgccggatgctgtatccaggctctgtgtacctgctgcagaaggccctcatgcctgtgctgctgcagggccaggcccgactggtggaagagtgtaatgggcgccgggcaaagctgctggcctgtgatggcaatgagattgacaccatgtttgtggaccggcgggggacagctgagccccagggacagaagctggtgatctgctgtgaggggaatgctgggttttatgaggtgggctgcgtctccacgcccctggaagctggatattcagtcctgggctggaatcatccaggctttgctggaagcacgggggtgccattcccgcagaatgaggctaatgccatggatgtggtggtccagtttgccatccaccgcctgggcttccagccccaggacatcatcatctacgcctggtccatcggcggcttcactgccacgtgggcagccatgtcctacccagatgttagtgccatgatcctggatgcctcctttgatgacctggtgcccttggccttgaaggtcatgccagacagctggaggggcctggtgaccaggaccgtgaggcagcatctcaatctaaacaacgcggagcagctgtgcagataccagggtcctgtactgctgatccggagaaccaaggatgagatcatcaccaccacggttcctgaggacatcatgtccaaccgaggcaatgacctcctgctgaagctcctgcagcatcggtatccccgggtgatggcagaggagggtcttcgagtggtgaggcagtggttggaggcctcctcacagctggaggaagcctcaatttatagccgatgggaggtggaagaggactggtgtctgtctgtcctccgctcctaccaggcagaacacgggcctgacttcccctggagcgtgggggaggacatgagtgcagatggacggcggcagctggctttgtttctggctcggaagcatctgcacaactttgaggccactcactgcaccccactcccagcccagaacttccagatgccctggcacctctagggaccaactgggactcattatggaagaatggggtgagaggagacatgaggaaagaccctcttatttgtgattctctgtgttcatgttgctgtttatagtttgtggaaagtgggggaccatcccccttctcaccactgttcctcttgcacgtttcccctcattcatgtggctgtacttaaccttctccaacatacatcctgcattacatgaatggattattcctaataattaataaaaaggtattttttctactatc

SEQ ID NO: 486 - DNA, 889 bp, Homo sapiens; identical to SEQ ID NO: 480
  source 1..889: mol_type = unassigned DNA

SEQ ID NO: 487 - DNA, 2069 bp, Homo sapiens; identical to SEQ ID NO: 479
  source 1..2069: mol_type = unassigned DNA

SEQ ID NO: 488 - DNA, 889 bp, Homo sapiens; identical to SEQ ID NO: 480
  source 1..889: mol_type = unassigned DNA

SEQ ID NO: 489 - DNA, 2068 bp, Homo sapiens; identical to SEQ ID NO: 485
  source 1..2068: mol_type = unassigned DNA

SEQ ID NO: 490 - DNA, 2069 bp, Homo sapiens; identical to SEQ ID NO: 479
  source 1..2069: mol_type = unassigned DNA

SEQ ID NO: 491 - DNA, 864 bp, Homo sapiens
  source 1..864: mol_type = unassigned DNA
gctggaagagcagcggcccgagccggggccatggcgaagctgctgagctgcgtcctaggcccccggctctacaaaatctaccgggagagggactctgaaagggccccggccagcgtccctgagacgccaacggcagtcactgccccccattccagctcctgggatacgtactatcagccccgtgccctggagaaacatgctgacagcatcctggcactggttacttgagtttgtccaaagtggtgccgttttctcactatgctgggacattgctgctacttctggcaggtgtggcctgcctccgaggcattggccgctggaccaacccccagtaccggcagttcatcaccatcttggaagcaacacatcggaaccagtcttcagaaaacaagaggcagcttgccaactacaactttgacttccggagctggccagtcgacttccactgggaagaacccagcagccggaaggagtctcgagggggcccttcccgccggggtgtggccctgcttcgcccagagcccctgcaccgggggacagcagacaccctcctcaaccgggttaagaagctgccttgtcagatcaccaggtgggaaacagcagcgaggagaggcccactggggtggaggggccatttcaggagtgctctgggagtgggcgctccattgtaaaatagctgtcactcattgggcctagtgctgtatggtttgtgtagatcatttatggcaaagtcatttttatccatatttatgtttgaagaaaagaggctcagagaggtctggagtctcaaatgtagtaagtaaagaactgggatatgaacaaaagctccttcagtgaggctgaaaaggagcagtgggggtgggg

SEQ ID NO: 492 - DNA, 2019 bp, Homo sapiens
  source 1..2019: mol_type = unassigned DNA
acacaacacctcagaggcagggagggcggggccggcagggggacctgctgctggaagagcagcggcccgagccggggccatggcgaagctgctgagctgcgtcctaggcccccggctctacaaaatctaccgggagagggactctgaaagggccccggccagcgtccctgagacgccaacggcagtcactgccccccattccagctcctgggatacgtactatcagccccgtgccctggagaaacatgctgacagcatcctggcactggcttcagtattctggtccatctcttattactcctctcccttcgccttcttctacttgtacaggaaaggttacttgagtttgtccaaagtggtgccgttttctcactatgctgggacattgctgctacttctggcaggtgtggcctgcctccgaggcattggccgctggaccaacccccagtaccggcagttcatcaccatcttggaagcaacacatcggaaccagtcttcagaaaacaagaggcagcttgccaactacaactttgacttccggagctggccagtcgacttccactgggaagaacccagcagccggaaggagtctcgagggggcccttcccgccggggtgtggccctgcttcgcccagagcccctgcaccgggggacagcagacaccctcctcaaccgggttaagaagctgccttgtcagatcaccagctacctggtggcgcacaccctagggcgccggatgctgtatccaggctctgtgtacctgctgcagaaggccctcatgcctgtgctgctgcagggccaggcccgactggtggaagagtgtaatgggcgccgggcaaagctgctggcctgtgatggcaatgagattgacaccatgtttgtggaccggcgggggacagctgagccccagggacagaagctggtgatctgctgtgaggggaatgctgggttttatgaggtgggctgcgtctccacgcccctggaagctggatattcagtcctgggctggaatcatccaggctttgctggaagcacgggggtgccattcccgcagaatgaggctaatgccatggatgtggtggtccagtttgccatccaccgcctaggcttccagccccaggacatcatcatctacgcctggtccatcggcggcttcactgccacgtgggcagccatgtcctacccagatgttagtgccatgatcctggatgcctcctttgatgacctggtgcccttggccttgaaggtcatgccagacagctggaggggcctggtgaccaggaccgtgaggcagcatctcaatctaaacaacgcggagcagctgtgcagataccagggtcctgtactgctgatccggagaaccaaggatgagatcatcaccaccacggttcctgaggacatcatgtccaaccgaggcaatgacctcctgctgaagctcctgcagcatcggtatccccgggtgatggcagaggagggtcttcgagtggtgaggcagtggttggaggcctcctcacagctggaggaagcctcaatttatagccgatgggaggtggaagaggactggtgtctgtctgtcctccgctcctaccaggcagaacacgggcccgacttcccctggagcgtgggggaggacatgagtgcagatggacggcggcagctggctttgtttctggctcggaagcatctgcacaactttgaggccactcactgcaccccactcccagcccagaacttccagatgccctggcacctctagggaccaactgggactcattatggaagaatggggtgagaggagacatgaggaaagaccctcttatttgtgattctctgtgttcatgttgctgtttatagtttgtggaaagtgggggaccatcccccttctcaccactgttcctcttgcacgtttcccctcattcatgtggctgtacttaaccttctccaacatacatcctgcattacatgaatggattattcctaataattaataaaaaggtattttttctactatcaggctaa

SEQ ID NO: 493 - DNA, 2019 bp, Homo sapiens
  source 1..2019: mol_type = unassigned DNA
acacaacacctcagaggcagggagggcggggccggcagggggacctgctgctggaagagcagcggcccgagccggggccatggcgaagctgctgagctgcgtcctaggcccccggctctacaaaatctaccgggagagggactctgaaagggccccggccagcgtccctgagacgccaacggcagtcactgccccccattccagctcctgggatacgtactatcagccccgtgccctggagaaacatgctgacagcatcctggcactggcttcagtattctggtccatctcttattactcctctcccttcgccttcttctacttgtacaggaaaggttacttgagtttgtccaaagtggtgccgttttctcactatgctgggacattgctgctacttctggcaggtgtggcctgcctccgaggcattggccgctggaccaacccccagtaccggcagttcatcaccatcttggaagcaacacatcggaaccagtcttcagaaaacaagaggcagcttgccaactacaactttgacttccggagctggccagtcgacttccactgggaagaacccagcagccggaaggagtctcgagggggcccttcccgccggggtgtggccctgcttcgcccagagcccctgcaccgggggacagcagacaccctcctcaaccgggttaagaagctgccttgtcagatcaccagctacctggtggcgcacaccctagggcgccggatgctgtatccaggctctgtgtacctgctgcagaaggccctcatgcctgtgctgctgcagggccaggcccgactggtggaagagtgtaatgggcgccgggcaaagctgctggcctgtgatggcaatgagattgacaccatgtttgtggaccggcgggggacagctgagccccagggacagaagctggtgatctgctgtgaggggaatgctgggttttatgaggtgggctgcgtctccacgcccctggaagctggatattcagtcctgggctggaatcatccaggctttgctggaagcacgggggtgccattcccgcagaatgaggctaatgccatggatgtggtggtccagtttgccatccaccgcctgggcttccagccccaggacatcatcatctacgcctggtccatcggcggcttcactgccacgtgggcagccatgtcctacccagatgttagtgccatgatcctggatgcctcctttgatgacctggtgcccttggccttgaaggtcatgccagacagctggaggggcctggtgaccaggaccgtgaggcagcatctcaatctaaacaacgcggagcagctgtgcagataccagggtcctgtactgctgatccggagaaccaaggatgagatcatcaccaccacggttcctgaggacatcatgtccaaccgaggcaatgacctcctgctgaagctcctgcagcatcggtatccccgggtgatggcagaggagggtcttcgagtggtgaggcagtggttggaggcctcctcacagctggaggaagcctcaatttatagccgatgggaggtggaagaggactggtgtctgtctgtcctccgctcctaccaggcagaacacgggcccgacttcccctggagcgtgggggaggacatgagtgcagatggacggcggcagctggctttgtttctggctcggaagcatctgcacaactttgaggccactcactgcaccccactcccagcccagaacttccagatgccctggcacctctagggaccaactgggactcattatggaagaatggggtgagaggagacatgaggaaagaccctcttatttgtgattctctgtgttcatgttgctgtttatagtttgtggaaagtgggggaccatcccccttctcaccactgttcctcttgcacgtttcccctcattcatgtggctgtacttaaccttctccaacatacatcctgcattacatgaatggattattcctaataattaataaaaaggtattttttctactatcaggctaa

SEQ ID NO: 494 - DNA, 2019 bp, Homo sapiens; identical to SEQ ID NO: 493
  source 1..2019: mol_type = unassigned DNA

SEQ ID NO: 495 - DNA, 864 bp, Homo sapiens; identical to SEQ ID NO: 491
  source 1..864: mol_type = unassigned DNA

SEQ ID NO: 496 - DNA, 864 bp, Homo sapiens; identical to SEQ ID NO: 491
  source 1..864: mol_type = unassigned DNA

SEQ ID NO: 497 - DNA, 864 bp, Homo sapiens; identical to SEQ ID NO: 491
  source 1..864: mol_type = unassigned DNA

SEQ ID NO: 498 - DNA, 2146 bp, Homo sapiens
  source 1..2146: mol_type = unassigned DNA
cataatgggaaataaggggagcctgcttgtcaagccagttatccgcaaaatctgcgctctgtgtgcttcctgagttaaagtcacgcctacggactggccgcctcctttctttttcgctctttaccgctttctcattccgactgccactctttgttctttcctctccgcgtccccccgaccctgtgtgtcgtggttcgtgccggtcccagttgagtcttgagtcccgggaagagaccctgcgcggactggggagccgttgaattttgctgtcagactcccagtttcctcttcttcagtgcctcttcatgcctcccccggctctgtttttatcttccctttaccctcgccttgaatttcagaatgacttttacagatcctgtatccgtcggtcctcccctcaacccccgcccaacctagcctggagacccgagtcattgtattctggagagctggcgggtggtggttacttgagtttgtccaaagtggtgccgttttctcactatgctgggacattgctgctacttctggcaggtgtggcctgcctccgaggcattggccgctggaccaacccccagtaccggcagttcatcaccatcttggaagcaacacatcggaaccagtcttcagaaaacaagaggcagcttgccaactacaactttgacttccggagctggccagtcgacttccactgggaagaacccagcagccggaaggagtctcgagggggcccttcccgccggggtgtggccctgcttcgcccagagcccctgcaccgggggacagcagacaccctcctcaaccgggttaagaagctgccttgtcagatcaccagctacctggtggcgcacaccctagggcgccggatgctgtatccaggctctgtgtacctgctgcagaaggccctcatgcctgtgctgctgcagggccaggcccgactggtggaagagtgtaatgggcgccgggcaaagctgctggcctgtgatggcaatgagattgacaccatgtttgtggaccggcgggggacagctgagccccagggacagaagctggtgatctgctgtgaggggaatgctgggttttatgaggtgggctgcgtctccacgcccctggaagctggatattcagtcctgggctggaatcatccaggctttgctggaagcacgggggtgccattcccgcagaatgaggctaatgccatggatgtggtggtccagtttgccatccaccgcctgggcttccagccccaggacatcatcatctacgcctggtccatcggcggcttcactgccacgtgggcagccatgtcctacccagatgttagtgccatgatcctggatgcctcctttgatgacctggtgcccttggccttgaaggtcatgccagacagctggaggggcctggtgaccaggaccgtgaggcagcatctcaatctaaacaacgcggagcagctgtgcagataccagggtcctgtactgctgatccggagaaccaaggatgagatcatcaccaccacggttcctgaggacatcatgtccaaccgaggcaatgacctcctgctgaagctcctgcagcatcggtatccccgggtgatggcagaggagggtcttcgagtggtgaggcagtggttggaggcctcctcacagctggaggaagcctcaatttatagccgatgggaggtggaagaggactggtgtctgtctgtcctccgctcctaccaggcagaacacgggcctgacttcccctggagcgtgggggaggacatgagtgcagatggacggcggcagctggctttgtttctggctcggaagcatctgcacaactttgaggccactcactgcaccccactcccagcccagaacttccagatgccctggcacctctagggaccaactgggactcattatggaagaatggggtgagaggagacatgaggaaagaccctcttatttgtgattctctgtgttcatgttgctgtttatagtttgtggaaagtgggggaccatcccccttctcaccactgttcctcttgcacgtttcccctcattcatgtggctgtacttaaccttctccaacatacatcctgcattacatgaatggattattcctaataattaataaaaaggtattttttctactatctggctaa

SEQ ID NO: 499 - DNA, 2019 bp, Homo sapiens; identical to SEQ ID NO: 493
  source 1..2019: mol_type = unassigned DNA

SEQ ID NO: 500 - DNA, 2146 bp, Homo sapiens; identical to SEQ ID NO: 498
  source 1..2146: mol_type = unassigned DNA

SEQ ID NO: 501 - DNA, 2146 bp, Homo sapiens
  source 1..2146: mol_type = unassigned DNA
cataatgggaaataaggggagcctgcttgtcaagccagttatccgcaaaatctgcgctctgtgtgcttcctgagttaaagtcacgcctacggactggccgcctcctttctttttcgctctttaccgctttctcattccgactgccactctttgttctttcctctccgcgtccccccgaccctgtgtgtcgtggttcgtgccggtcccagttgagtcttgagtcccgggaagagaccctgcgcggactggggagccgttgaattttgctgtcagactcccagtttcctcttcttcagtgcctcttcatgcctcccccggctctgtttttatcttccctttaccctcgccttgaatttcagaatgacttttacagatcctgtatccgtcggtcctcccctcaacccccgcccaacctagcctggagacccgagtcattgtattctggagagctggcgggtggtggttacttgagtttgtccaaagtggtgccgttttctcactatgctgggacattgctgctacttctggcaggtgtggcctgcctccgaggcattggccgctggaccaacccccagtaccggcagttcatcaccatcttggaagcaacacatcggaaccagtcttcagaaaacaagaggcagcttgccaactacaactttgacttccggagctggccagtcgacttccactgggaagaacccagcagccggaaggagtctcgagggggcccttcccgccggggtgtggccctgcttcgcccagagcccctgcaccgggggacagcagacaccctcctcaaccgggttaagaagctgccttgtcagatcaccagctacctggtggcgcacaccctagggcgccggatgctgtatccaggctctgtgtacctgctgcagaaggccctcatgcctgtgctgctgcagggccaggcccgactggtggaagagtgtaatgggcgccgggcaaagctgctggcctgtgatggcaatgagattgacaccatgtttgtggaccggcgggggacagctgagccccagggacagaagctggtgatctgctgtgaggggaatgctgggttttatgaggtgggctgcgtctccacgcccctggaagctggatattcagtcctgggctggaatcatccaggctttgctggaagcacgggggtgccattcccgcagaatgaggctaatgccatggatgtggtggtccagtttgccatccaccgcctgggcttccagccccaggacatcatcatctacgcctggtccatcggcggcttcactgccacgtgggcagccatgtcctacccagatgttagtgccatgatcctggatgcctcctttgatgacctggtgcccttggccttgaaggtcatgccagacagctggaggggcctggtgaccaggaccgtgaggcagcatctcaatctaaacaacgcggagcagctgtgcagataccagggtcctgtactgctgatccggagaaccaaggatgagatcatcaccaccacggttcctgaggacatcatgtccaaccgaggcaatgacctcctgctgaagctcctgcagcatcggtatccccgggtgatggcagaggagggtcttcgagtggtgaggcagtggttggaggcctcctcacagctggaggaagcctcaatttatagccgatgggaggtggaagaggactggtgtctgtctgtcctccgctcctaccaggcagaacacgggcccgacttcccctggagcgtgggggaggacatgagtgcagatggacggcggcagctggctttgtttctggctcggaagcatctgcacaactttgaggccactcactgcaccccactcccagcccagaacttccagatgccctggcacctctagggaccaactgggactcattatggaagaatggggtgagaggagacatgaggaaagaccctcttatttgtgattctctgtgttcatgttgctgtttatagtttgtggaaagtgggggaccatcccccttctcaccactgttcctcttgcacgtttcccctcattcatgtggctgtacttaaccttctccaacatacatcctgcattacatgaatggattattcctaataattaataaaaaggtattttttctactatcaggctaa

SEQ ID NO: 502 - DNA, 864 bp, Homo sapiens; identical to SEQ ID NO: 491
  source 1..864: mol_type = unassigned DNA

SEQ ID NO: 503 - DNA, 2146 bp, Homo sapiens; identical to SEQ ID NO: 501
  source 1..2146: mol_type = unassigned DNA

SEQ ID NO: 504 - DNA, 2019 bp, Homo sapiens
  source 1..2019: mol_type = unassigned DNA
acacaacacctcagaggcagggagggcggggccggcagggggacctgctgctggaagagcagcggcccgagccggggccatggcgaagctgctgagctgcgtcctaggcccccggctctacaaaatctaccgggagagggactctgaaagggccccggccagcgtccctgagacgccaacggcagtcactgccccccattccagctcctgggatacgtactatcagccccgtgccctggagaaacatgctgacagcatcctggcactggcttcagtattctggtccatctcttattactcctctcccttcgccttcttctacttgtacaggaaaggttacttgagtttgtccaaagtggtgccgttttctcactatgctgggacattgctgctacttctggcaggtgtggcctgcctccgaggcattggccgctggaccaacccccagtaccggcagttcatcaccatcttggaagcaacacatcggaaccagtcttcagaaaacaagaggcagcttgccaactacaactttgacttccggagctggccagtcgacttccactgggaagaacccagcagccggaaggagtctcgagggggcccttcccgccggggtgtggccctgcttcgcccagagcccctgcaccgggggacagcagacaccctcctcaaccgggttaagaagctgccttgtcagatcaccagctacctggtggcgcacaccctagggcgccggatgctgtatccaggctctgtgtacctgctgcagaaggccctcatgcctgtgctgctgcagggccaggcccgactggtggaagagtgtaatgggcgccgggcaaagctgctggcctgtgatggcaatgagattgacaccatgtttgtggaccggcgggggacagctgagccccagggacagaagctggtgatctgctgtgaggggaatgctgggttttatgaggtgggctgcgtctccacgcccctggaagctggatattcagtcctgggctggaatcatccaggctttgctggaagcacgggggtgccattcccgcagaatgaggctaatgccatggatgtggtggtccagtttgccatccaccgcctgggcttccagccccaggacatcatcatctacgcctggtccatcggcggcttcactgccacgtgggcagccatgtcctacccagatgttagtgccatgatcctggatgcctcctttgatgacctggtgcccttggccttgaaggtcatgccagacagctggaggggcctggtgaccaggaccgtgaggcagcatctcaatctaaacaacgcggagcagctgtgcagataccagggtcctgtactgctgatccggagaaccaaggatgagatcatcaccaccacggttcctgaggacatcatgtccaaccgaggcaatgacctcctgctgaagctcctgcagcatcggtatccccgggtgatggcagaggagggtcttcgagtggtgaggcagtggttggaggcctcctcacagctggaggaagcctcaatttatagccgatgggaggtggaagaggactggtgtctgtctgtcctccgctcctaccaggcagaacacgggcctgacttcccctggagcgtgggggaggacatgagtgcagatggacggcggcagctggctttgtttctggctcggaagcatctgcacaactttgaggccactcactgcaccccactcccagcccagaacttccagatgccctggcacctctagggaccaactgggactcattatggaagaatggggtgagaggagacatgaggaaagaccctcttatttgtgattctctgtgttcatgttgctgtttatagtttgtggaaagtgggggaccatcccccttctcaccactgttcctcttgcacgtttcccctcattcatgtggctgtacttaaccttctccaacatacatcctgcattacatgaatggattattcctaataattaataaaaaggtattttttctactatctggctaa

SEQ ID NO: 505 - DNA, 2146 bp, Homo sapiens; identical to SEQ ID NO: 501
  source 1..2146: mol_type = unassigned DNA

SEQ ID NO: 506 - DNA, 864 bp, Homo sapiens; identical to SEQ ID NO: 491
  source 1..864: mol_type = unassigned DNA

SEQ ID NO: 507 - DNA, 2146 bp, Homo sapiens
  source 1..2146: mol_type = unassigned DNA
cataatgggaaataaggggagcctgcttgtcaagccagttatccgcaaaatctgcgctctgtgtgcttcctgagttaaagtcacgcctacggactggccgcctcctttctttttcgctctttaccgctttctcattccgactgccactctttgttctttcctctccgcgtccccccgaccctgtgtgtcgtggttcgtgccggtcccagttgagtcttgagtcccgggaagagaccctgcgcggactggggagccgttgaattttgctgtcagactcccagtttcctcttcttcagtgcctcttcatgcctcccccggctctgtttttatcttccctttaccctcgccttgaatttcagaatgacttttacagatcctgtatccgtcggtcctcccctcaacccccgcccaacctagcctggagacccgagtcattgtattctggagagctggcgggtggtggttacttgagtttgtccaaagtggtgccgttttctcactatgctgggacattgctgctacttctggcaggtgtggcctgcctccgaggcattggccgctggaccaacccccagtaccggcagttcatcaccatcttggaagcaacacatcggaaccagtcttcagaaaacaagaggcagcttgccaactacaactttgacttccggagctggccagtcgacttccactgggaagaacccagcagccggaaggagtctcgagggggcccttcccgccggggtgtggccctgcttcgcccagagcccctgcaccgggggacagcagacaccctcctcaaccgggttaagaagctgccttgtcagatcaccagctacctggtggcgcacaccctagggcgccggatgctgtatccaggctctgtgtacctgctgcagaaggccctcatgcctgtgctgctgcagggccaggcccgactggtggaagagtgtaatgggcgccgggcaaagctgctggcctgtgatggcaatgagattgacaccatgtttgtggaccggcgggggacagctgagccccagggacagaagctggtgatctgctgtgaggggaatgctgggttttatgaggtgggctgcgtctccacgcccctggaagctggatattcagtcctgggctggaatcatccaggctttgctggaagcacgggggtgccattcccgcagaatgaggctaatgccatggatgtggtggtccagtttgccatccaccgcctaggcttccagccccaggacatcatcatctacgcctggtccatcggcggcttcactgccacgtgggcagccatgtcctacccagatgttagtgccatgatcctggatgcctcctttgatgacctggtgcccttggccttgaaggtcatgccagacagctggaggggcctggtgaccaggaccgtgaggcagcatctcaatctaaacaacgcggagcagctgtgcagataccagggtcctgtactgctgatccggagaaccaaggatgagatcatcaccaccacggttcctgaggacatcatgtccaaccgaggcaatgacctcctgctgaagctcctgcagcatcggtatccccgggtgatggcagaggagggtcttcgagtggtgaggcagtggttggaggcctcctcacagctggaggaagcctcaatttatagccgatgggaggtggaagaggactggtgtctgtctgtcctccgctcctaccaggcagaacacgggcccgacttcccctggagcgtgggggaggacatgagtgcagatggacggcggcagctggctttgtttctggctcggaagcatctgcacaactttgaggccactcactgcaccccactcccagcccagaacttccagatgccctggcacctctagggaccaactgggactcattatggaagaatggggtgagaggagacatgaggaaagaccctcttatttgtgattctctgtgttcatgttgctgtttatagtttgtggaaagtgggggaccatcccccttctcaccactgttcctcttgcacgtttcccctcattcatgtggctgtacttaaccttctccaacatacatcctgcattacatgaatggattattcctaataattaataaaaaggtattttttctactatcaggctaa

SEQ ID NO: 508 - DNA, 864 bp, Homo sapiens; identical to SEQ ID NO: 491
  source 1..864: mol_type = unassigned DNA

SEQ ID NO: 509 - DNA, 1906 bp, Homo sapiens
  source 1..1906: mol_type = unassigned DNA
aatgggaaataaggggagcctgcttgtcaagccagttatccgcaaaatctgcgctctgtgtgcttcctgagttaaagtcacgcctacggactggccgcctcctttctttttcgctctttaccgctttctcattccgactgccactctttgttctttcctctccgcgtccccccgaccctgtgtgtcgtggttcgtgccggtcccagttgagtcttgagtcccgggaagagaccctgcgcggactggggagccgttgaattttgctgtcagactcccagtttcctcttcttcagtgcctcttcatgcctcccccggctctgtttttatcttccctttaccctcgccttgaatttcagaatgacttttacagatcctgtatccgtcggtcctcccctcaacccccgcccaacctagcctggagacccgagtcattgtattctggagagctggcgggtggtggttacttgagtttgtccaaagtggtgccgttttctcactatgctgggacattgctgctacttctggcaggtgtggcctgcctccgaggcattggccgctggaccaacccccagtaccggcagttcatcaccatcttggaagcaacacatcggaaccagtcttcagaaaacaagaggcagcttgccaactacaactttgacttccggagctggccagtcgacttccactgggaagaacccagcagccggaaggagtctcgagggggcccttcccgccggggtgtggccctgcttcgcccagagcccctgcaccgggggacagcagacaccctcctcaaccgggttaagaagctgccttgtcagatcaccagctacctggtggcgcacaccctagggcgccggatgctgtatccaggctctgtgtacctgctgcagaaggccctcatgcctgtgctgctgcagggccaggcccgactggtggaagagtgtaatgggcgccgggcaaagctgctggcctgtgatggcaatgagattgacaccatgtttgtggaccggcgggggacagctgagccccagggacagaagctggtgatctgctgtgaggggaatgctgggttttatgaggtgggctgcgtctccacgcccctggaagctggatattcagtcctgggctggaatcatccaggctttgctggaagcacgggggtgccattcccgcagaatgaggctaatgccatggatgtggtggtccagtttgccatccaccgcctaggcttccagccccaggacatcatcatctacgcctggtccatcggcggcttcactgccacgtgggcagccatgtcctacccagatgttagtgccatgatcctggatgcctcctttgatgacctggtgcccttggccttgaaggtcatgccagacagctggaggggcctggtgaccaggaccgtgaggcagcatctcaatctaaacaacgcggagcagctgtgcagataccagggtcctgtactgctgatccggagaaccaaggatgagatcatcaccaccacggttcctgaggacatcatgtccaaccgaggcaatgacctcctgctgaagctcctgcagcatcggtatccccgggtgatggcagaggagggtcttcgagtggtgaggcagtggttggaggcctcctcacagctggaggaagcctcaatttatagccgatgggaggtggaagaggactggtgtctgtctgtcctccgctcctaccaggcagaacacgggcccgacttcccctggagcgtgggggaggacatgagtgcagatggacggcggcagctggctttgtttctggctcggaagcatctgcacaactttgaggccactcactgcaccccactcccagcccagaacttccagatgccctggcacctctagggaccaactgggactcattatggaag

SEQ ID NO: 510 - DNA, 8711 bp, Homo sapiens
  source 1..8711: mol_type = unassigned DNA
actccgggctggccttatccagtagcgtctgggtccctggactaaagccgtcaaatgtaaccaattgctgaggagctctcccctaagaatcccgcctccactctgaggaacagcttcgctgatcaatggatcccctcctagacgcaatgagcgcgcggggcaagtggagaagcggctgaactgcccaatgaacaagcggtttccgtggttaggggcgtggcagaagcggtcgtcaggggcgtggcggcagttacttgggcggggccggtagcggcgggagctgcactggccaggggttccggctgtatatccatgagcgccgctggcagccggggagctgcaggaaccagactgggggcgagctgagcacctgtagtcaatcacacgcagcttttaggtttgtttgaataagagatctgacctgaccggcccaactgtacaactcttcaaggaaaattcgtatttgcagtgggaagaataagtaacattgatcaagatgaatgccatgctggagactcccgaactcccagccgtgtttgatggagtgaagctggctgcagtggctgctgtgctgtacgtgatcgtccggtgtttgaacctgaagagccccacagccccacctgacctctacttccaggactcggggctctcacgctttctgctcaagtcctgtcctcttctgaccaaagaatacattccaccgttgatctgggggaaaagtggacacatccagacagccttgtatgggaagatgggaagggtgaggtcgccacatccttatgggcaccggaagttcatcactatgtctgatggagccacttctacattcgacctcttcgagcccttggctgagcactgtgttggagatgatatcaccatggtcatctgccctggaattgccaatcacagcgagaagcaatacatccgcactttcgttgactacgcccagaaaaatggctatcggtgcgccgtgctgaaccacctgggtgccctgcccaacattgaattgacctcgccacgcatgttcacctatggctgcacgtgggaatttggagccatggtgaactacatcaagaagacatatcccctgacccagctggtcgtcgtgggcttcagcctgggtggtaacattgtgtgcaaatacttgggggagactcaggcaaaccaagagaaggtcctgtgctgcgtcagcgtgtgccaggggtacagtgcactgagggcccaggaaaccttcatgcaatgggatcagtgccggcggttctacaacttcctcatggctgacaacatgaagaagatcatcctctcgcacaggcaagctctttttggagaccatgttaagaaaccccagagcctggaagacacggacttgagccggctctacacagcaacatccctgatgcagattgatgacaatgtgatgaggaagtttcacggctataactccctgaaggaatactatgaggaagaaagttgcatgcggtacctgcacaggatttatgttcctctcatgctggttaatgcagctgacgatccgttggtgcatgaaagtcttctaaccattccaaaatctctttcagagaaacgagagaacgtcatgtttgtgctgcctctgcatgggggccacttgggcttctttgagggctctgtgctgttccccgagcccctgacatggatggataagctggtggtggagtacgccaacgccatttgccaatgggagcgtaacaagttgcagtgctctgacacggagcaggtggaggccgacctggagtgaggcctccggactctggcacgctccagcagccctcctctggaagctgcgtcccctcaccccctgtttcaggtctcccatctccctcagtgacctggatctgacctcacaccatcagcagggggcacccaccatgcacacctgtctcggagtaggcagctcttcctgggagctccaggctatttttgtgcttagttactggttttctccattgcattgttaggcatggtgacaagtgacagagttcttgccctctgtccagtttcagcatctggttgcttttaagccaagtacatctagtttccctattaaaaatgtgtctgaatagcgattttgctttgccaccaaaaggcttttccctgagaacagtgaaggatgtatgtcattttgtggtggttgtatgtgtccttacatagaccttaaaaagagctcacccttccaggccaatgctgaagacacagctccgcttgggagcctgagaacccaggcttcccaggccagagtgtggcttcttaaacggcaaaggaaattcctttgagtcacaagccaagttttcgccctgtctcctgagaccatttccctacgctttgctgctgctgagagttacgtgaggcacttgttaaaaattcagcctcccaggtccctcccctcggagaggctgattcactgggtctgggaaggagcctggggattttaatttttcacaagtgccccagatgattctcatcaccaagcaaattttggaaatgctgttcaacagcgcccttaaattggaaacatctttgcagctcgttttattgaaattcataatcaggggtgtcctctagctcccacggtctccagagcagcaaggccggctatggagctgccgtcgtgtgaccacagtgtgatgtctcagaagggctctgggtgggctgagcatctgggctgtgccctggctctgcttttcaccctggacaaagtcgctgtggacttcaatttcttcacctctaaaatgggggacttggaccaggtagattgctgagctcactaccaggttcaaagttcaatgacaaactcagtttactgaggtttgagagaacatccctccaggggagcctgggagctgctctcccagtctaagcatgtagatatcatcgtttgccttttgtgtgtgtgtgtcccttatttgataaaaagatgttttgagttgttttttttttaagcactcacttgtaattttagtttttaaacccaagtccctctaactttgcctttgataccaaacaattcaaaagttggatctgagtttggagaaagatatttccaacctaagtgggtattattttgaaaccagatttttaatttaatagcctatatttgtagtctgttggataggtgtttccaaagtgtgtcttctcaagtgaaaacgcaactctaggtttcaagtactccttttctccgatcctgtggtacttgaatatccaaaaaccctgcactttgaacaatcagctgttgctatctggaactaaacagaactatgagtaaaattgcctggatactttaaaaagatatttttcctccttcatctcctttgactccaggacagactggaatataagtagtgggtctgcatggatgtttcagggatcaaaggagccacctgggcgcctgagtgccaaccctcagggccacaggtgggtgtggtttgggcacgggtccaagtgactgtgacgggacccgtgggcatgggtccaggtctgtaacctgaagaagttgttttctgacaatcaccaaatcatccgaatgacatcaaaagcagcccttatctcagagactgagatttctgtggtctcaacttcgctttggtataatttctggcactcaccagcctctatcattatgactttccccccagtgtattatttctctaataggtttccttttcacgttcttttagcacagactggcactttaccctctcagtttggaagttagcccctctcctctgttacttttcccttcacccaactacagctgtgatctagaacattcatagtcatatttctgctactactaccttcatttatcaagactttttatgagaataggtaaaccaagcaataacttcctaggactgaatcaccaccccagaagagcgagaggctcctttcatatgcctgaggccacaccccttaacctgttctgacaaaatagtggctggcccatgtaccagctccattcagaaattcaggaagagaaaagacagccctgttgtcacacaaaccggtgtgggggagggtggagcctggtctgcacggcagtcctggtggcccctgtggaggacaggcagggctggcagcatagcctttgttgccacacaaccggaatttgctcccccaggactgtgggagccagtgtcccagctgaaatctttttagtgtgtggctctgaatggcactcacattccattttggctcacatgaaactaactgaagccctttgttcaagcttcaggctcttaggcatggaaatgagaatgtgactgtggctgtcttacaggaaaattcttgtttgtccctgaatgagagcacagaggcattgaattcacagagctgcaaacttgcctgataaatgagggagtggcagtttatagataggtcatcttttttccttcctccaggtgtccttgcctttcttcccaaagtcattcatttctgatgagtatatgaatccccctcttgctagtaaggttctatttgggctaaaacaaggctgaatttttaaagagtatttgaatatattttagaatcaaattgaggctataaattgcatcaatctggacaattccattgcaggaataatatgttaaaaaccaatggggagaagcacccacatctctcctgtagcactccgtgtctcataagcaatttgaagacacttacaagtaactgattccagtcaaattaggattaactgactcaaaaaatggtgtcaagtttctttaatgtttttatgttagaagtgagtttaacagacttgaagaaaactgttatcttttcctgctgtgagtttacacaaatgattccagagcagaatgaaagcagaaagctgttggttacaatattcttttaacctctctgcagcattttacacttactgggaaccttatgattcaccgtaagagtggaaatatacctgagttcgtgtcctaatggtctctaattcacattggatcgtgggcaaatcacctcacctctctgagcctgttccctcctcttagaccatctctaagaccacttcatctatttacacatcatttgcttgaacattgctgaacatctgcgtgaacttggcctctccagcccttgcaggtggaaacagctgtgtcaaggctcaaggctcacgctgaggggacttggagggagggggcttctgcattaagctttcctggtgaagacccttgatcttgtccaaagccctgtgtctttgactggcttctcttcagagtccccgttgtcatcgtaagacccttgctgtttggagggtggtcttgtgactgtggcagctgctggccgctggaatgaggagcctatctccatcctccagtgtgactcaggcagagcattgagaattcccagggcagaaatccttcctgctcaggctttcattctaaaactacagtcttcattaaagctgaactttctgggtagctgagcttatatgcccggcatctgaatgagagctctctttgtaactgtgtgacttgagatctagtttgccagctcctgggaaacaatacatgtgttcttgtttgtgtttgctcagcaagcagatgtctgagatgtaagaagcttttcttttcctgtggcattgattctgacttagagctgaagtaaaagatcactgaaacatcacgtcaagttgaagtcactcataggtctttgtcctttaggcaggacaggagagtcattaagaagcatttcactgtagcattctatcacaatatcatctggaattgttttctttgcccagaaagccttaacttgcctctagagaatccctggtattacaacgatattgcggcattagaattccaactcttctgctgtggaagtttgaagcgaagctgcagcaaaaccagagaatttcctcaagtggcctgtaggctccttgttatcttatgcccccacccctccctcaacaatatgagtgatccagaactggcccaaacacctcagctctggtccctttttgcccttcttggccttactctgttgttcaaagccactttggattgcttggatgcttcgaacagccatgaaaagtagcctgcctgtggcatttagaggccaagcaattgacagaaagggtttcttctacctctgttatctaagcagagggaagtaaacctctcaccgccccccacccctcactgcccccgattaccctagaattgctttcgccaaattgtagttgaagctaaggaaggggaatctggcccctgctgggagagggaactggaatgccacacaaggcaaggcctgcttccttccttcccctctgctgctgctgcctcggaacgctgcagcccaggcttcctcccacagtggcccttggaagcaggccgcagagtagacagctgctccttttggaagagtcagtcccctgtgttttctgaactgtttttcctagcatgtatgtgggtagagctttcatgcatctctagtaataataagctgaaattagttttttttttaattctccaatttaaaacttttaattaaaaagtaaattttaatgtcgaaaatgcaaacttggggagggcagaaagatcacacacaaggctgtcacttcatacttgcaggattgcacagcagccgggcagaggcgctcctcacttcccagatggggcggcgggcagcagagacgcacctcacttcctagacagtgcggcagccaggcacaggcacacctcacttcccagacagttgggcggccaggcaagcgctcctcacttcccagatggggcggctcccgggaagcggggctcctcacttcccagacagggtggccaggcagaggtgctcctcacttcccagaacaattctttatgaatttgataaaggactgaagtgcaactgaaagctgctagtgatgatctggtaatatacaatttgtccagtagccagtttgtttttattgtgttttctaaccataagagatcattaaaggcaaagcctgtatgacgctgtacacacacaaaaaaatggtcaccgcaggccatactaccaatgaaatggtaggtaaacaaatcttctggtcaagagaaaaaaaaaagaaatagcactctgcatgctttgctctacaagacgaatttccctagaaagaatccaatgaaggccgggcatagtggctcactcctgtaatcccagcactttggaggccgaggcgggtagatcacctgaggttaggagttcaagaccagcctggccaacatggtgaaaccccttctctactaaaaatgcaaaaattagctgggtgtggtggcgggcgcctgtaatcccagctactcgggaggctgaggtgggagaattgcttgaacccaggagacggaggttgcagtgagccgagatcacgcctctgcactccagcctgggcaacaagagtgagactccgtctccaaaaaaagaaaaggaatccagtgaaaatggctgcaattacaacaagaagtgaaggaagaagactggtgacatctctgaaggatgcagttgaggttgatccaggtttatccgaatatgctacctttctgagccttaaaccttcatctctcaggtgttgatttgcttctgatagcttcatcatttctccctgaagtcttttacactcttctgttagtttccttgtttcagtatcatgaagtgaagcactgtgtggttgtggcgtgggcccgtcttgcttagatgcattcagtgggacagctttgctgggttccatgtcattcaatttatcattttcattggggatctccatttggaatccattaattcatgaggttttgcctcattccacacagcttccatatctgaagtgtttagtggagcaaaaattgtaccataaacttgtgtttactcttttcattcggatcatagtcaaagggctgtagcattactgaaacagtcacagttgaccctgggtcaataattccactgttgggcctcacacagtaccggtgaggcacggtagtcttcactttgaaacacacttttctatccgatggatttcgcaatttaagatttgtagtgactacatctgtgaaggggcctttgaatttgaggtctatgggcgggtcgaggaccaggatctgctcgtgcttcgccgtggccccggaggcagacgccattggagagacagcgcagagcagggggcggcttgctcgctgggggcgggggacgatggcgagaggggagggggagcgagttcgcatctctccttttcctggttagactctgttcaaccacattcttatgttggcagatctgcttccagattgatttttagagcaccatcactttcacattcctgattctgattttgttttgttttgtttgggttttctgaaacttaaaatgctgccccgaaaatactatatttttgagtttgtgttctgaaagcctccgtgctgctggatctttggggggaaatacaggatccttcagcactgaggtgtttaagatttgcaactagcaatgcaattttttctaaatatggggatatttacctttattaagaaattatactaaacattgatgtccttgatcattttatgttctcatattacttttgattctactatgattgtgtggtggtgaacaaagatcattacaaacaaaaactgtaattttgttatatttgattcaatggaatttacctaaaaaataaagactaaaaatgtggtgtg

SEQ ID NO: 511 - DNA, 8688 bp, Homo sapiens
  source 1..8688: mol_type = unassigned DNA
tgtcaggagggcgtagtttgcaaaacatccctcccagtggtactgatgccttttcgcaggttctgtcctcttcatttgcaagccactgctttatccacgagggtgctccctacttatgccagtgaattaatttttggcacagatgaatccttcatatttatctggatttagctggtagcatttgtctcctaagacttggtcacagaggaatccatgtgaccttcaggccttctgctctaaactggcaggagatcctgtttctactcacagcgtccgagggtctggtggccgagccctgaggggcgctgttgctcccaggtggcagaattcagcatcagagagccacacagctgaaagagatggatggcttttaggtttgtttgaataagagatctgacctgaccggcccaactgtacaactcttcaaggaaaattcgtatttgcagtgggaagaataagtaacattgatcaagatgaatgccatgctggagactcccgaactcccagccgtgtttgatggagtgaagctggctgcagtggctgctgtgctgtacgtgatcgtccggtgtttgaacctgaagagccccacagccccacctgacctctacttccaggactcggggctctcacgctttctgctcaagtcctgtcctcttctgaccaaagaatacattccaccgttgatctgggggaaaagtggacacatccagacagccttgtatgggaagatgggaagggtgaggtcgccacatccttatgggcaccggaagttcatcactatgtctgatggagccacttctacattcgacctcttcgagcccttggctgagcactgtgttggagatgatatcaccatggtcatctgccctggaattgccaatcacagcgagaagcaatacatccgcactttcgttgactacgcccagaaaaatggctatcggtgcgccgtgctgaaccacctgggtgccctgcccaacattgaattgacctcgccacgcatgttcacctatggctgcacgtgggaatttggagccatggtgaactacatcaagaagacatatcccctgacccagctggtcgtcgtgggcttcagcctgggtggtaacattgtgtgcaaatacttgggggagactcaggcaaaccaagagaaggtcctgtgctgcgtcagcgtgtgccaggggtacagtgcactgagggcccaggaaaccttcatgcaatgggatcagtgccggcggttctacaacttcctcatggctgacaacatgaagaagatcatcctctcgcacaggcaagctctttttggagaccatgttaagaaaccccagagcctggaagacacggacttgagccggctctacacagcaacatccctgatgcagattgatgacaatgtgatgaggaagtttcacggctataactccctgaaggaatactatgaggaagaaagttgcatgcggtacctgcacaggatttatgttcctctcatgctggttaatgcagctgacgatccgttggtgcatgaaagtcttctaaccattccaaaatctctttcagagaaacgagagaacgtcatgtttgtgctgcctctgcatgggggccacttgggcttctttgagggctctgtgctgttccccgagcccctgacatggatggataagctggtggtggagtacgccaacgccatttgccaatgggagcgtaacaagttgcagtgctctgacacggagcaggtggaggccgacctggagtgaggcctccggactctggcacgctccagcagccctcctctggaagctgcgtcccctcaccccctgtttcaggtctcccatctccctcagtgacctggatctgacctcacaccatcagcagggggcacccaccatgcacacctgtctcggagtaggcagctcttcctgggagctccaggctatttttgtgcttagttactggttttctccattgcattgttaggcatggtgacaagtgacagagttcttgccctctgtccagtttcagcatctggttgcttttaagccaagtacatctagtttccctattaaaaatgtgtctgaatagcgattttgctttgccaccaaaaggcttttccctgagaacagtgaaggatgtatgtcattttgtggtggttgtatgtgtccttacatagaccttaaaaagagctcacccttccaggccaatgctgaagacacagctccgcttgggagcctgagaacccaggcttcccaggccagagtgtggcttcttaaacggcaaaggaaattcctttgagtcacaagccaagttttcgccctgtctcctgagaccatttccctacgctttgctgctgctgagagttacgtgaggcacttgttaaaaattcagcctcccaggtccctcccctcggagaggctgattcactgggtctgggaaggagcctggggattttaatttttcacaagtgccccagatgattctcatcaccaagcaaattttggaaatgctgttcaacagcgcccttaaattggaaacatctttgcagctcgttttattgaaattcataatcaggggtgtcctctagctcccacggtctccagagcagcaaggccggctatggagctgccgtcgtgtgaccacagtgtgatgtctcagaagggctctgggtgggctgagcatctgggctgtgccctggctctgcttttcaccctggacaaagtcgctgtggacttcaatttcttcacctctaaaatgggggacttggaccaggtagattgctgagctcactaccaggttcaaagttcaatgacaaactcagtttactgaggtttgagagaacatccctccaggggagcctgggagctgctctcccagtctaagcatgtagatatcatcgtttgccttttgtgtgtgtgtgtcccttatttgataaaaagatgttttgagttgttttttttttaagcactcacttgtaattttagtttttaaacccaagtccctctaactttgcctttgataccaaacaattcaaaagttggatctgagtttggagaaagatatttccaacctaagtgggtattattttgaaaccagatttttaatttaatagcctatatttgtagtctgttggataggtgtttccaaagtgtgtcttctcaagtgaaaacgcaactctaggtttcaagtactccttttctccgatcctgtggtacttgaatatccaaaaaccctgcactttgaacaatcagctgttgctatctggaactaaacagaactatgagtaaaattgcctggatactttaaaaagatatttttcctccttcatctcctttgactccaggacagactggaatataagtagtgggtctgcatggatgtttcagggatcaaaggagccacctgggcgcctgagtgccaaccctcagggccacaggtgggtgtggtttgggcacgggtccaagtgactgtgacgggacccgtgggcatgggtccaggtctgtaacctgaagaagttgttttctgacaatcaccaaatcatccgaatgacatcaaaagcagcccttatctcagagactgagatttctgtggtctcaacttcgctttggtataatttctggcactcaccagcctctatcattatgactttccccccagtgtattatttctctaataggtttccttttcacgttcttttagcacagactggcactttaccctctcagtttggaagttagcccctctcctctgttacttttcccttcacccaactacagctgtgatctagaacattcatagtcatatttctgctactactaccttcatttatcaagactttttatgagaataggtaaaccaagcaataacttcctaggactgaatcaccaccccagaagagcgagaggctcctttcatatgcctgaggccacaccccttaacctgttctgacaaaatagtggctggcccatgtaccagctccattcagaaattcaggaagagaaaagacagccctgttgtcacacaaaccggtgtgggggagggtggagcctggtctgcacggcagtcctggtggcccctgtggaggacaggcagggctggcagcatagcctttgttgccacacaaccggaatttgctcccccaggactgtgggagccagtgtcccagctgaaatctttttagtgtgtggctctgaatggcactcacattccattttggctcacatgaaactaactgaagccctttgttcaagcttcaggctcttaggcatggaaatgagaatgtgactgtggctgtcttacaggaaaattcttgtttgtccctgaatgagagcacagaggcattgaattcacagagctgcaaacttgcctgataaatgagggagtggcagtttatagataggtcatcttttttccttcctccaggtgtccttgcctttcttcccaaagtcattcatttctgatgagtatatgaatccccctcttgctagtaaggttctatttgggctaaaacaaggctgaatttttaaagagtatttgaatatattttagaatcaaattgaggctataaattgcatcaatctggacaattccattgcaggaataatatgttaaaaaccaatggggagaagcacccacatctctcctgtagcactccgtgtctcataagcaatttgaagacacttacaagtaactgattccagtcaaattaggattaactgactcaaaaaatggtgtcaagtttctttaatgtttttatgttagaagtgagtttaacagacttgaagaaaactgttatcttttcctgctgtgagtttacacaaatgattccagagcagaatgaaagcagaaagctgttggttacaatattcttttaacctctctgcagcattttacacttactgggaaccttatgattcaccgtaagagtggaaatatacctgagttcgtgtcctaatggtctctaattcacattggatcgtgggcaaatcacctcacctctctgagcctgttccctcctcttagaccatctctaagaccacttcatctatttacacatcatttgcttgaacattgctgaacatctgcgtgaacttggcctctccagcccttgcaggtggaaacagctgtgtcaaggctcaaggctcacgctgaggggacttggagggagggggcttctgcattaagctttcctggtgaagacccttgatcttgtccaaagccctgtgtctttgactggcttctcttcagagtccccgttgtcatcgtaagacccttgctgtttggagggtggtcttgtgactgtggcagctgctggccgctggaatgaggagcctatctccatcctccagtgtgactcaggcagagcattgagaattcccagggcagaaatccttcctgctcaggctttcattctaaaactacagtcttcattaaagctgaactttctgggtagctgagcttatatgcccggcatctgaatgagagctctctttgtaactgtgtgacttgagatctagtttgccagctcctgggaaacaatacatgtgttcttgtttgtgtttgctcagcaagcagatgtctgagatgtaagaagcttttcttttcctgtggcattgattctgacttagagctgaagtaaaagatcactgaaacatcacgtcaagttgaagtcactcataggtctttgtcctttaggcaggacaggagagtcattaagaagcatttcactgtagcattctatcacaatatcatctggaattgttttctttgcccagaaagccttaacttgcctctagagaatccctggtattacaacgatattgcggcattagaattccaactcttctgctgtggaagtttgaagcgaagctgcagcaaaaccagagaatttcctcaagtggcctgtaggctccttgttatcttatgcccccacccctccctcaacaatatgagtgatccagaactggcccaaacacctcagctctggtccctttttgcccttcttggccttactctgttgttcaaagccactttggattgcttggatgcttcgaacagccatgaaaagtagcctgcctgtggcatttagaggccaagcaattgacagaaagggtttcttctacctctgttatctaagcagagggaagtaaacctctcaccgccccccacccctcactgcccccgattaccctagaattgctttcgccaaattgtagttgaagctaaggaaggggaatctggcccctgctgggagagggaactggaatgccacacaaggcaaggcctgcttccttccttcccctctgctgctgctgcctcggaacgctgcagcccaggcttcctcccacagtggcccttggaagcaggccgcagagtagacagctgctccttttggaagagtcagtcccctgtgttttctgaactgtttttcctagcatgtatgtgggtagagctttcatgcatctctagtaataataagctgaaattagttttttttttaattctccaatttaaaacttttaattaaaaagtaaattttaatgtcgaaaatgcaaacttggggagggcagaaagatcacacacaaggctgtcacttcatacttgcaggattgcacagcagccgggcagaggcgctcctcacttcccagatggggcggcgggcagcagagacgcacctcacttcctagacagtgcggcagccaggcacaggcacacctcacttcccagacagttgggcggccaggcaagcgctcctcacttcccagatggggcggctcccgggaagcggggctcctcacttcccagacagggtggccaggcagaggtgctcctcacttcccagaacaattctttatgaatttgataaaggactgaagtgcaactgaaagctgctagtgatgatctggtaatatacaatttgtccagtagccagtttgtttttattgtgttttctaaccataagagatcattaaaggcaaagcctgtatgacgctgtacacacacaaaaaaatggtcaccgcaggccatactaccaatgaaatggtaggtaaacaaatcttctggtcaagagaaaaaaaaaagaaatagcactctgcatgctttgctctacaagacgaatttccctagaaagaatccaatgaaggccgggcatagtggctcactcctgtaatcccagcactttggaggccgaggcgggtagatcacctgaggttaggagttcaagaccagcctggccaacatggtgaaaccccttctctactaaaaatgcaaaaattagctgggtgtggtggcgggcgcctgtaatcccagctactcgggaggctgaggtgggagaattgcttgaacccaggagacggaggttgcagtgagccgagatcacgcctctgcactccagcctgggcaacaagagtgagactccgtctccaaaaaaagaaaaggaatccagtgaaaatggctgcaattacaacaagaagtgaaggaagaagactggtgacatctctgaaggatgcagttgaggttgatccaggtttatccgaatatgctacctttctgagccttaaaccttcatctctcaggtgttgatttgcttctgatagcttcatcatttctccctgaagtcttttacactcttctgttagtttccttgtttcagtatcatgaagtgaagcactgtgtggttgtggcgtgggcccgtcttgcttagatgcattcagtgggacagctttgctgggttccatgtcattcaatttatcattttcattggggatctccatttggaatccattaattcatgaggttttgcctcattccacacagcttccatatctgaagtgtttagtggagcaaaaattgtaccataaacttgtgtttactcttttcattcggatcatagtcaaagggctgtagcattactgaaacagtcacagttgaccctgggtcaataattccactgttgggcctcacacagtaccggtgaggcacggtagtcttcactttgaaacacacttttctatccgatggatttcgcaatttaagatttgtagtgactacatctgtgaaggggcctttgaatttgaggtctatgggcgggtcgaggaccaggatctgctcgtgcttcgccgtggccccggaggcagacgccattggagagacagcgcagagcagggggcggcttgctcgctgggggcgggggacgatggcgagaggggagggggagcgagttcgcatctctccttttcctggttagactctgttcaaccacattcttatgttggcagatctgcttccagattgatttttagagcaccatcactttcacattcctgattctgattttgttttgttttgtttgggttttctgaaacttaaaatgctgccccgaaaatactatatttttgagtttgtgttctgaaagcctccgtgctgctggatctttggggggaaatacaggatccttcagcactgaggtgtttaagatttgcaactagcaatgcaattttttctaaatatggggatatttacctttattaagaaattatactaaacattgatgtccttgatcattttatgttctcatattacttttgattctactatgattgtgtggtggtgaacaaagatcattacaaacaaaaactgtaattttgttatatttgattcaatggaatttacctaaaaaataaagactaaaaatgtggtgtg

SEQ ID NO: 512 - DNA, 2064 bp, Homo sapiens
  source 1..2064: mol_type = unassigned DNA
gtcggaagccgcgctccgccaggcaggagacactgtggtcgggagtaggcagcggcgccgcgtccgctctcgcccgctctcgcccgctcgccagccggctctcctcccgccgcaggacccgcgcgccgcgctcgggggccatgcagcgcctggccatggacctgcggatgttgtcccgggagctctccctctacctggaacaccaagtccgggtggggttcttcggctcgggggtgggcttatcccttatcctgggcttcagcgtcgcttatgccttctactacctgagcagcattgccaagaaaccccagttagtgaccgggggtgagagtttcagccgcttccttcaagaccactgtcccgtggttacagaaacgtactacccgacggtctggtgctgggagggtcgaggacagaccctgcttagacctttcatcacttcgaagcccccggtgcagtacaggaatgaacttattaaaactgcagatggaggacagatttcactggactggtttgataatgataacagtacgtgttatatggatgccagcaccagacctactatcttattgttgcctggcctcacgggaacaagcaaggagtcatatatccttcatatgatccatcttagtgaagaattaggatacagatgtgtggtttttaacaacagaggagtggcgggggagaatctcttgacgccaaggacttattgttgtgctaacactgaagacttggagacagttattcaccatgtacacagcctgtacccttctgctcctttcctggcagcaggggtttcaatgggaggaatgctgcttctaaattacttgggcaaaattgggtccaaaacgcctttgatggcagctgcaactttttccgttggttggaacaccttcgcttgctcagagtcattggaaaaaccactgaactggctactttttaattactatttgacaacctgccttcagtcttcagttaataagcaccgacatatgtttgtaaaacaagttgatatggatcatgtcatgaaggctaaatccatcagagagtttgataagcgattcacttcagtcatgtttggataccaaacaattgatgattattatactgatgccagtccgagtcctagactgaagtcagtaggaattccagtattgtgtctaaattctgtggatgatgttttctcacccagtcatgctattccaatagaaactgctaagcaaaatcctaatgttgctttggtccttacttcttatggaggccatattggttttctggagggaatctggccaagacagtccacttacatggatcgtgtcttcaagcaatttgtgcaagccatggttgagcatggacatgaactctcttaacatgtagttctttgggtgcattttgtctgaaccacaattgtgaaggcagctcagcttagtgcacaaattttaactgttgtatataaagcaaataagccagcagatgggtgaagaggtccagaatgatatgcaaaaactactttttagagaaacaaaacaactttgtagcaacaaattaaatatagtattagattgttacttacgtagattttatttttactatgccttaccaagtacatccttaaacaaagtagtatgtacatgaaattgcacttaaccaaaactattgtgtaaaacaaattttaattcctcagggttttaatttaaactagtatttttttagattatttgttttaggtgatttaatggtactttaataactactaagaaatattggctatttcaatgtaagttataaggtggtacattcctaagggtatttatagttgatgataacatgaaaactgaaataagataaaatacaacgtgctaaatcttttatgtattctaactttaaaagacaagtgcaacaaagttagactgacttctatatgtgctcttttactctgataatattaaattaggactaacttatgttttataatgattataatttacatgcttatttttaaaatagtatatgtggacacatatatatcattatattaaaataaattctaccattttaaattgg

SEQ ID NO: 513 - DNA, 1690 bp, Homo sapiens
  source 1..1690: mol_type = unassigned DNA
agtgcgcggaagacgcatgcgctggcggcctgcgccgccttaagtgccgcgccagcccggggcggcccagtcggcctgtcagccggcttcgagataagtcccggcgcttgcgcggcggcggctatggcggcggaggaggaggaggtggactctgccgacaccggagagaggtcaggatggctaactggttggctccccacatggtgccctacgtctatatcacaccttaaagaagctgaagagaagatgttaaaatgtgtgccttgcacatacaaaaaagaacctgttcgtatatctaatggaaataaaatatggacactgaagttctctcataatatttcaaataagactccacttgtccttctccatggttttggaggaggtcttgggctctgggcactgaattttggagatctttgcaccaacagacctgtctatgcttttgacctattgggttttggacgaagtagtagacccaggtttgacagtgatgcagaagaagtggagaatcagtttgtggaatccattgaagagtggagatgtgccctaggattggacaaaatgatcttgcttgggcacaacctaggtggattcttggctgctgcttactcgctgaagtacccatcaagggttaatcatctcattttagtggagccttggggtttccctgaacgaccagaccttgctgatcaagacagaccaattccagtttggatcagagccttgggagcagcattgactccctttaaccctttagctggcctaaggattgcaggaccctttggtttaagtctagtgcagcgtttaaggcctgatttcaaacgaaagtattcttcaatgttcgaagacgatactgtgacagaatacatctaccactgtaatgtgcagactccaagtggtgagacagctttcaagaatatgactattccttatggatgggcaaaaaggccaatgctccagcgaattggtaaaatgcaccctgacattccagtttcagtgatctttggcgcccgatcctgcatagatggcaattctggcaccagcatccagtccttacgaccacattcatatgtgaagacaatagctattcttggggcaggacattatgtatatgcagatcaaccagaagaattcaaccagaaagtaaaggagatctgcgacactgtggactgaacacactgaagctctgatgggaaaacctggtgactgatatagttgttcagcaataattcatagtctgtgatgaagagtagtgaatacaacacacaaccaggcagccttcttgactatactttgcacatgttttctttaggaattcactcacacatttaaaccagttagtgccttctagaagaatggctttcctttctcctacacaaaattgaaatatacaagtctctaaatataatacctttaaataaaaggttatttgtccctctgatgtactgaaaaactgtaatttttcagctgaaaattttttaatctaactttgctagttatttttatattgcaatctatattaccaatttaggaagtgatttctgagtctcttacactgtaaaggtgcactttattttctttgtcttccccatcatgtatttattgtgtcttgataactgatattaatctaaattcaatgtgtttttatgtaaaaatttgtcagttgtttagaatatttcactttgttttt

SEQ ID NO: 514 - DNA, 3689 bp, Homo sapiens
  source 1..3689: mol_type = unassigned DNA
gagaaataaacgctcgcgagagaacgaggttcaggcggctgcacgaagggggtggaggggggctggagagagtgaggaggaaggggaggaggtgccgtcccacaataccaggcgggagggcgggtaggcggtttgtatccgggctgtgaggtgctcggagcctcggcggaccttgctgcctctgtctctttaacgcgagaggaagcgatgcagaggggtggaaaatggcagagctgcagatgttactagaggaggagatcccgtctggcaagagggcgctgatcgagagttaccagaacctgactcgggtggcagactactgtgaaaacaactacatacagagacatggttttgctgtgttgctgtgtctgctctcaaactcctggcctcaggctacagacaagagaaaagctttagaggagaccaaagcctatacaacccaatctctagctagtgttgcttatcaaataaatgcattggccaacaatgtactccagttgctggatatccaagcctctcagcttcggagaatggagtcttccatcaatcatatctcacagactgtggatattcataaggagaaagtggcacgaagagagattggtattttgacaacaaataagaatacatcaagaactcacaaaataatagcacctgcgaatatggagcgccctgtaaggtatattcggaaacctatcgattacacagttctggatgatgtgggccatggtgtcaagtggctaaaagccaagcatggaaataaccagcctgcaagaactggcacactgtcgagaacaaatcctcctactcagaaaccgccaagtcctcccatgtcaggccggggaacactgggacggaatactccttataaaaccctggaacctgttaaacccccaacagttcctaatgactatatgaccagtcctgctaggcttggaagtcagcatagtccaggcaggacagcatctttaaatcagagaccaaggacacacagtggaagtagtggaggaagtggaagtcgagaaaacagtggtagcagtagtattggcattcccattgctgtgcctacaccttcgccacccactattggaccagaaaacatttctgtccctcctccttctggagctccaccagcaccacctctggcaccacttctcccagtgagcactgtgatagcagccccgggctcagctcctggttcccagtatggcacaatgaccaggcagatatctcgacacaactctactacttcttcgacatcttctggtggatacagacgaactccctctgtgactgctcaattttctgctcagcctcatgttaatggaggtccactttattctcaaaattcaattgctgatagtccaactccaccgccaccacctccaccagatgacattcccatgtttgatgactctccacctcccccaccaccaccaccagtggattatgaagatgaggaggctgcagtagttcagtataatgatccatatgcagatggggatcctgcttgggcccccaagaattatattgagaaagttgttgcaatatatgattatacaaaagacaaggatgatgagctgtcatttatggagggtgcaatcatttatgttataaagaagaatgatgatggctggtatgaaggagtctgcaatcgagtgactggtctgttccctgggaactatgttgaatcaatcatgcactatactgattaatttttttttttcttttgaagtagattcttattactcagtcatactgtgggactattatggttaacagaactgtcttaatatgttttaaaatgtgcccatattttcagaacatgctgttttattggtaaattgaatgtctacctgtaagcataaatctttgaggcagtttatgtattgctgaatagcaatttatacaagaagctgtccataactgattatgcttatgtacttacttacacatttttaactttatgaccagcctaaatattctgggggaagtggggtataatatttaacgaatcatgattcagattgtaccattacatgtttcagtgcagcatggttactaacgctatgtcagactaatattaaaatcagaaaatttaaatgctggtgctggtcagactttttttgttagattctctcatttaaaaaaaatactgtttgtttaaagcatgcataaaaatttatgtattgaaatatacttaaaaattcaagatgcttcccatttgtgtaatatttacctggaggactcgtacttaggtgtcttaacgtgaattgagtctccaaggtctccatgtgaaacaagcaaaaagagaattatctgtaatgttgtaatttgtacctaagttttttaatgagtgaaatttgcattataaactttttccattcataaatacataagtgaaccaaaggtttttgtcctttccttcactgatttgctttaaaaaaaataaaagataatgatttattgcagaattatgattctattttctcaatatgttaacttggaaaaaaattttagccttatcttaatctgtcccaacagcaatgtgacggatttttgcagattcaaaatctgcaatggttatttacaagtcaatctactgaattccttttttaaataatcttttgaaactaagaaaatgtgtcaaattgtgtgcattcattctgtaggtaaaattcttaaggattgccatgtcagtccttcagttgtacagtgaactgttgtacactggttcaatgaaaggaagttaaaagtaccttttacatattgtaaaagtggatacagttgatttgtgagtaggcactctttaatccattacctggcactagcaacattagaattttaaaataaaataattgggaaagaaggtgggtcatgtattaatcagtgaacagagatttacctaaccaacagacttggattgtcttttgacataatcaaaatgcaacacatgcactttgtgtgtctcctcttaattgaagggagggctgagggatgttttctcttcttgtcttgtgtataattctctattgcttaggatattaaagtagagcactcaagtgtgggtttctgtgttattgaggatttgtttggaattcaaattacagttatgtactggatgctacagacttataacagcatagtgaatggtaagactagtgcaaaacagttatttctgaaaattaaagaccattattgctaccaaatcaatgtgactatttcatatgcattttgcctttgttaattttaaacaaacaaagtatcattagtgatcagctagctaccttctactttccatttttcaagtggattgttctcttaatttgtatataacctgttgtctaaattttatgtacagtcttttataataaaccattctcctatatgaaattttggatactgttaaaatataactcatgtggacttcaatgcagacttcacatttttctgacctttactcctacggtaaatcaagacaaaccatttgaattttaacattggttatttatttgtgtaatggccttacatgtggatattaacagtgtaaacaataccacatataaccatcaagataccttgattataatttataggactagaatgacagattcaggtggtttattaattacatttaaaaagttttctgaaaaaacttttgcaataaaaaaaaataaattgcccatcaa

SEQ ID NO: 515 - DNA, 3728 bp, Homo sapiens
  source 1..3728: mol_type = unassigned DNA
gagaaataaacgctcgcgagagaacgaggttcaggcggctgcacgaagggggtggaggggggctggagagagtgaggaggaaggggaggaggtgccgtcccacaataccaggcgggagggcgggtaggcggtttgtatccgggctgtgaggtgctcggagcctcggcggaccttgctgcctctgtctctttaacgcgagaggaagcgatgcagaggggtggaaaatggcagagctgcagatgttactagaggaggagatcccgtctggcaagagggcgctgatcgagagttaccagaacctgactcgggtggcagactactgtgaaaacaactacatacaggctacagacaagagaaaagctttagaggagaccaaagcctatacaacccaatctctagctagtgttgcttatcaaataaatgcattggccaacaatgtactccagttgctggatatccaagcctctcagcttcggagaatggagtcttccatcaatcatatctcacagactgtggatattcataaggagaaagtggcacgaagagagattggtattttgacaacaaataagaatacatcaagaactcacaaaataatagcacctgcgaatatggagcgccctgtaaggtatattcggaaacctatcgattacacagttctggatgatgtgggccatggtgtcaagaaatggcataaaataatacatggaaataaccagcctgcaagaactggcacactgtcgagaacaaatcctcctactcagaaaccgccaagtcctcccatgtcaggccggggaacactgggacggaatactccttataaaaccctggaacctgttaaacccccaacagttcctaatgactatatgaccagtcctgctaggcttggaagtcagcatagtccaggcaggacagcatctttaaatcagagaccaaggacacacagtggaagtagtggaggaagtggaagtcgagaaaacagtggtagcagtagtattggcattcccattgctgtgcctacaccttcgccacccactattggaccagaaaacatttctgtccctcctccttctggagctccaccagcaccacctctggcaccacttctcccagtgagcactgtgatagcagccccgggctcagctcctggttcccagtatggcacaatgaccaggcagatatctcgacacaactctactacttcttcgacatcttctggtggatacagacgaactccctctgtgactgctcaattttctgctcagcctcatgttaatggaggtccactttattctcaaaattcaatttctattgctccaccccctccccctatgcctcagttgactccacagatacctctcacaggcttcgtggccagggtgcaggaaaacattgctgatagtccaactccaccgccaccacctccaccagatgacattcccatgtttgatgactctccacctcccccaccaccaccaccagtggattatgaagatgaggaggctgcagtagttcagtataatgatccatatgcagatggggatcctgcttgggcccccaagaattatattgagaaagttgttgcaatatatgattatacaaaagacaaggatgatgagctgtcatttatggagggtgcaatcatttatgttataaagaagaatgatgatggctggtatgaaggagtctgcaatcgagtgactggtctgttccctgggaactatgttgaatcaatcatgcactatactgattaatttttttttttcttttgaagtagattcttattactcagtcatactgtgggactattatggttaacagaactgtcttaatatgttttaaaatgtgcccatattttcagaacatgctgttttattggtaaattgaatgtctacctgtaagcataaatctttgaggcagtttatgtattgctgaatagcaatttatacaagaagctgtccataactgattatgcttatgtacttacttacacatttttaactttatgaccagcctaaatattctgggggaagtggggtataatatttaacgaatcatgattcagattgtaccattacatgtttcagtgcagcatggttactaacgctatgtcagactaatattaaaatcagaaaatttaaatgctggtgctggtcagactttttttgttagattctctcatttaaaaaaaatactgtttgtttaaagcatgcataaaaatttatgtattgaaatatacttaaaaattcaagatgcttcccatttgtgtaatatttacctggaggactcgtacttaggtgtcttaacgtgaattgagtctccaaggtctccatgtgaaacaagcaaaaagagaattatctgtaatgttgtaatttgtacctaagttttttaatgagtgaaatttgcattataaactttttccattcataaatacataagtgaaccaaaggtttttgtcctttccttcactgatttgctttaaaaaaaataaaagataatgatttattgcagaattatgattctattttctcaatatgttaacttggaaaaaaattttagccttatcttaatctgtcccaacagcaatgtgacggatttttgcagattcaaaatctgcaatggttatttacaagtcaatctactgaattccttttttaaataatcttttgaaactaagaaaatgtgtcaaattgtgtgcattcattctgtaggtaaaattcttaaggattgccatgtcagtccttcagttgtacagtgaactgttgtacactggttcaatgaaaggaagttaaaagtaccttttacatattgtaaaagtggatacagttgatttgtgagtaggcactctttaatccattacctggcactagcaacattagaattttaaaataaaataattgggaaagaaggtgggtcatgtattaatcagtgaacagagatttacctaaccaacagacttggattgtcttttgacataatcaaaatgcaacacatgcactttgtgtgtctcctcttaattgaagggagggctgagggatgttttctcttcttgtcttgtgtataattctctattgcttaggatattaaagtagagcactcaagtgtgggtttctgtgttattgaggatttgtttggaattcaaattacagttatgtactggatgctacagacttataacagcatagtgaatggtaagactagtgcaaaacagttatttctgaaaattaaagaccattattgctaccaaatcaatgtgactatttcatatgcattttgcctttgttaattttaaacaaacaaagtatcattagtgatcagctagctaccttctactttccatttttcaagtggattgttctcttaatttgtatataacctgttgtctaaattttatgtacagtcttttataataaaccattctcctatatgaaattttggatactgttaaaatataactcatgtggacttcaatgcagacttcacatttttctgacctttactcctacggtaaatcaagacaaaccatttgaattttaacattggttatttatttgtgtaatggccttacatgtggatattaacagtgtaaacaataccacatataaccatcaagataccttgattataatttataggactagaatgacagattcaggtggtttattaattacatttaaaaagttttctgaaaaaacttttgcaataaaaaaaaataaattgcccatcaa

SEQ ID NO: 516 - DNA, 3492 bp, Homo sapiens
  source 1..3492: mol_type = unassigned DNA
gctcggagcctcggcggaccttgctgcctctgtctctttaacgcgagaggaagcgatgcagaggggtggaaaatggcagagctgcagatgttactagaggaggagatcccgtctggcaagagggcgctgatcgagagttaccagaacctgactcgggtggcagactactgtgaaaacaactacatacaggctacagacaagagaaaagctttagaggagaccaaagcctatacaacccaatctctagctagtgttgcttatcaaataaatgcattggccaacaatgtactccagttgctggatatccaagcctctcagcttcggagaatggagtcttccatcaatcatatctcacagactgtggatattcataaggagaaagtggcacgaagagagattggtattttgacaacaaataagaatacatcaagaactcacaaaataatagcacctgcgaatatggagcgccctgtaaggtatattcggaaacctatcgattacacagttctggatgatgtgggccatggtgtcaagtggctaaaagccaagcatggaaataaccagcctgcaagaactggcacactgtcgagaacaaatcctcctactcagaaaccgccaagtcctcccatgtcaggccggggaacactgggacggaatactccttataaaaccctggaacctgttaaacccccaacagttcctaatgactatatgaccagtcctgctaggcttggaagtcagcatagtccaggcaggacagcatctttaaatcagagaccaaggacacacagtggaagtagtggaggaagtggaagtcgagaaaacagtggtagcagtagtattggcattcccattgctgtgcctacaccttcgccacccactattggaccagccccgggctcagctcctggttcccagtatggcacaatgaccaggcagatatctcgacacaactctactacttcttcgacatcttctggtggatacagacgaactccctctgtgactgctcaattttctgctcagcctcatgttaatggaggtccactttattctcaaaattcaatttctattgctccaccccctccccctatgcctcagttgactccacagatacctctcacaggcttcgtggccagggtgcaggaaaacattgctgatagtccaactccaccgccaccacctccaccagatgacattcccatgtttgatgactctccacctcccccaccaccaccaccagtggattatgaagatgaggaggctgcagtagttcagtataatgatccatatgcagatggggatcctgcttgggcccccaagaattatattgagaaagttgttgcaatatatgattatacaaaagacaaggatgatgagctgtcatttatggagggtgcaatcatttatgttataaagaagaatgatgatggctggtatgaaggagtctgcaatcgagtgactggtctgttccctgggaactatgttgaatcaatcatgcactatactgattaatttttttttttcttttgaagtagattcttattactcagtcatactgtgggactattatggttaacagaactgtcttaatatgttttaaaatgtgcccatattttcagaacatgctgttttattggtaaattgaatgtctacctgtaagcataaatctttgaggcagtttatgtattgctgaatagcaatttatacaagaagctgtccataactgattatgcttatgtacttacttacacatttttaactttatgaccagcctaaatattctgggggaagtggggtataatatttaacgaatcatgattcagattgtaccattacatgtttcagtgcagcatggttactaacgctatgtcagactaatattaaaatcagaaaatttaaatgctggtgctggtcagactttttttgttagattctctcatttaaaaaaaatactgtttgtttaaagcatgcataaaaatttatgtattgaaatatacttaaaaattcaagatgcttcccatttgtgtaatatttacctggaggactcgtacttaggtgtcttaacgtgaattgagtctccaaggtctccatgtgaaacaagcaaaaagagaattatctgtaatgttgtaatttgtacctaagttttttaatgagtgaaatttgcattataaactttttccattcataaatacataagtgaaccaaaggtttttgtcctttccttcactgatttgctttaaaaaaaataaaagataatgatttattgcagaattatgattctattttctcaatatgttaacttggaaaaaaattttagccttatcttaatctgtcccaacagcaatgtgacggatttttgcagattcaaaatctgcaatggttatttacaagtcaatctactgaattccttttttaaataatcttttgaaactaagaaaatgtgtcaaattgtgtgcattcattctgtaggtaaaattcttaaggattgccatgtcagtccttcagttgtacagtgaactgttgtacactggttcaatgaaaggaagttaaaagtaccttttacatattgtaaaagtggatacagttgatttgtgagtaggcactctttaatccattacctggcactagcaacattagaattttaaaataaaataattgggaaagaaggtgggtcatgtattaatcagtgaacagagatttacctaaccaacagacttggattgtcttttgacataatcaaaatgcaacacatgcactttgtgtgtctcctcttaattgaagggagggctgagggatgttttctcttcttgtcttgtgtataattctctattgcttaggatattaaagtagagcactcaagtgtgggtttctgtgttattgaggatttgtttggaattcaaattacagttatgtactggatgctacagacttataacagcatagtgaatggtaagactagtgcaaaacagttatttctgaaaattaaagaccattattgctaccaaatcaatgtgactatttcatatgcattttgcctttgttaattttaaacaaacaaagtatcattagtgatcagctagctaccttctactttccatttttcaagtggattgttctcttaatttgtatataacctgttgtctaaattttatgtacagtcttttataataaaccattctcctatatgaaattttggatactgttaaaatataactcatgtggacttcaatgcagacttcacatttttctgacctttactcctacggtaaatcaagacaaaccatttgaattttaacattggttatttatttgtgtaatggccttacatgtggatattaacagtgtaaacaataccacatataaccatcaagataccttgattataatttataggactagaatgacagattcaggtggtttattaattacatttaaaaagttttctgaaaaaacttttgcaataaaaaaaaataaattgcccatcaataa

SEQ ID NO: 517 - DNA, 3647 bp, Homo sapiens
  source 1..3647: mol_type = unassigned DNA
gagaaataaacgctcgcgagagaacgaggttcaggcggctgcacgaagggggtggaggggggctggagagagtgaggaggaaggggaggaggtgccgtcccacaataccaggcgggagggcgggtaggcggtttgtatccgggctgtgaggtgctcggagcctcggcggaccttgctgcctctgtctctttaacgcgagaggaagcgatgcagaggggtggaaaatggcagagctgcagatgttactagaggaggagatcccgtctggcaagagggcgctgatcgagagttaccagaacctgactcgggtggcagactactgtgaaaacaactacatacaggctacagacaagagaaaagctttagaggagaccaaagcctatacaacccaatctctagctagtgttgcttatcaaataaatgcattggccaacaatgtactccagttgctggatatccaagcctctcagcttcggagaatggagtcttccatcaatcatatctcacagactgtggatattcataaggagaaagtggcacgaagagagattggtattttgacaacaaataagaatacatcaagaactcacaaaataatagcacctgcgaatatggagcgccctgtaaggtatattcggaaacctatcgattacacagttctggatgatgtgggccatggtgtcaagaaatggcataaaataatacatggaaataaccagcctgcaagaactggcacactgtcgagaacaaatcctcctactcagaaaccgccaagtcctcccatgtcaggccggggaacactgggacggaatactccttataaaaccctggaacctgttaaacccccaacagttcctaatgactatatgaccagtcctgctaggcttggaagtcagcatagtccaggcaggacagcatctttaaatcagagaccaaggacacacagtggaagtagtggaggaagtggaagtcgagaaaacagtggtagcagtagtattggcattcccattgctgtgcctacaccttcgccacccactattggaccagcagccccgggctcagctcctggttcccagtatggcacaatgaccaggcagatatctcgacacaactctactacttcttcgacatcttctggtggatacagacgaactccctctgtgactgctcaattttctgctcagcctcatgttaatggaggtccactttattctcaaaattcaatttctattgctccaccccctccccctatgcctcagttgactccacagatacctctcacaggcttcgtggccagggtgcaggaaaacattgctgatagtccaactccaccgccaccacctccaccagatgacattcccatgtttgatgactctccacctcccccaccaccaccaccagtggattatgaagatgaggaggctgcagtagttcagtataatgatccatatgcagatggggatcctgcttgggcccccaagaattatattgagaaagttgttgcaatatatgattatacaaaagacaaggatgatgagctgtcatttatggagggtgcaatcatttatgttataaagaagaatgatgatggctggtatgaaggagtctgcaatcgagtgactggtctgttccctgggaactatgttgaatcaatcatgcactatactgattaatttttttttttcttttgaagtagattcttattactcagtcatactgtgggactattatggttaacagaactgtcttaatatgttttaaaatgtgcccatattttcagaacatgctgttttattggtaaattgaatgtctacctgtaagcataaatctttgaggcagtttatgtattgctgaatagcaatttatacaagaagctgtccataactgattatgcttatgtacttacttacacatttttaactttatgaccagcctaaatattctgggggaagtggggtataatatttaacgaatcatgattcagattgtaccattacatgtttcagtgcagcatggttactaacgctatgtcagactaatattaaaatcagaaaatttaaatgctggtgctggtcagactttttttgttagattctctcatttaaaaaaaatactgtttgtttaaagcatgcataaaaatttatgtattgaaatatacttaaaaattcaagatgcttcccatttgtgtaatatttacctggaggactcgtacttaggtgtcttaacgtgaattgagtctccaaggtctccatgtgaaacaagcaaaaagagaattatctgtaatgttgtaatttgtacctaagttttttaatgagtgaaatttgcattataaactttttccattcataaatacataagtgaaccaaaggtttttgtcctttccttcactgatttgctttaaaaaaaataaaagataatgatttattgcagaattatgattctattttctcaatatgttaacttggaaaaaaattttagccttatcttaatctgtcccaacagcaatgtgacggatttttgcagattcaaaatctgcaatggttatttacaagtcaatctactgaattccttttttaaataatcttttgaaactaagaaaatgtgtcaaattgtgtgcattcattctgtaggtaaaattcttaaggattgccatgtcagtccttcagttgtacagtgaactgttgtacactggttcaatgaaaggaagttaaaagtaccttttacatattgtaaaagtggatacagttgatttgtgagtaggcactctttaatccattacctggcactagcaacattagaattttaaaataaaataattgggaaagaaggtgggtcatgtattaatcagtgaacagagatttacctaaccaacagacttggattgtcttttgacataatcaaaatgcaacacatgcactttgtgtgtctcctcttaattgaagggagggctgagggatgttttctcttcttgtcttgtgtataattctctattgcttaggatattaaagtagagcactcaagtgtgggtttctgtgttattgaggatttgtttggaattcaaattacagttatgtactggatgctacagacttataacagcatagtgaatggtaagactagtgcaaaacagttatttctgaaaattaaagaccattattgctaccaaatcaatgtgactatttcatatgcattttgcctttgttaattttaaacaaacaaagtatcattagtgatcagctagctaccttctactttccatttttcaagtggattgttctcttaatttgtatataacctgttgtctaaattttatgtacagtcttttataataaaccattctcctatatgaaattttggatactgttaaaatataactcatgtggacttcaatgcagacttcacatttttctgacctttactcctacggtaaatcaagacaaaccatttgaattttaacattggttatttatttgtgtaatggccttacatgtggatattaacagtgtaaacaataccacatataaccatcaagataccttgattataatttataggactagaatgacagattcaggtggtttattaattacatttaaaaagttttctgaaaaaacttttgcaataaaaaaaaataaattgcccatcaa

SEQ ID NO: 518 - DNA, 3470 bp, Homo sapiens
  source 1..3470: mol_type = unassigned DNA
gagaaataaacgctcgcgagagaacgaggttcaggcggctgcacgaagggggtggaggggggctggagagagtgaggaggaaggggaggaggtgccgtcccacaataccaggcgggagggcgggtaggcggtttgtatccgggctgtgaggtgctcggagcctcggcggaccttgctgcctctgtctctttaacgcgagaggaagcgatgcagaggggtggaaaatggcagagctgcagatgttactagaggaggagatcccgtctggcaagagggcgctgatcgagagttaccagaacctgactcgggtggcagactactgtgaaaacaactacatacaggctacagacaagagaaaagctttagaggagaccaaagcctatacaacccaatctctagctagtgttgcttatcaaataaatgcattggccaacaatgtactccagttgctggatatccaagcctctcagcttcggagaatggagtcttccatcaatcatatctcacagactgtggatattcataaggagaaagtggcacgaagagagattggtattttgacaacaaataagaatacatcaagaactcacaaaataatagcacctgcgaatatggagcgccctgtaaggtatattcggaaacctatcgattacacagttctggatgatgtgggccatggtgtcaagaaatggcataaaataatacatggaaataaccagcctgcaagaactggcacactgtcgagaacaaatcctcctactcagaaaccgccaagtcctcccatgtcaggccggggaacactgggacggaatactccttataaaaccctggaacctgttaaacccccaacagttcctaatgactatatgaccagtcctgctaggcttggaagtcagcatagtccaggcaggacagcatctttaaatcagagaccaaggacacacagtggaagtagtggaggaagtggaagtcgagaaaacagtggtagcagtagtattggcattcccattgctgtgcctacaccttcgccacccactattggaccagtttctattgctccaccccctccccctatgcctcagttgactccacagatacctctcacaggcttcgtggccagggtgcaggaaaacattgctgatagtccaactccaccgccaccacctccaccagatgacattcccatgtttgatgactctccacctcccccaccaccaccaccagtggattatgaagatgaggaggctgcagtagttcagtataatgatccatatgcagatggggatcctgcttgggcccccaagaattatattgagaaagttgttgcaatatatgattatacaaaagacaaggatgatgagctgtcatttatggagggtgcaatcatttatgttataaagaagaatgatgatggctggtatgaaggagtctgcaatcgagtgactggtctgttccctgggaactatgttgaatcaatcatgcactatactgattaatttttttttttcttttgaagtagattcttattactcagtcatactgtgggactattatggttaacagaactgtcttaatatgttttaaaatgtgcccatattttcagaacatgctgttttattggtaaattgaatgtctacctgtaagcataaatctttgaggcagtttatgtattgctgaatagcaatttatacaagaagctgtccataactgattatgcttatgtacttacttacacatttttaactttatgaccagcctaaatattctgggggaagtggggtataatatttaacgaatcatgattcagattgtaccattacatgtttcagtgcagcatggttactaacgctatgtcagactaatattaaaatcagaaaatttaaatgctggtgctggtcagactttttttgttagattctctcatttaaaaaaaatactgtttgtttaaagcatgcataaaaatttatgtattgaaatatacttaaaaattcaagatgcttcccatttgtgtaatatttacctggaggactcgtacttaggtgtcttaacgtgaattgagtctccaaggtctccatgtgaaacaagcaaaaagagaattatctgtaatgttgtaatttgtacctaagttttttaatgagtgaaatttgcattataaactttttccattcataaatacataagtgaaccaaaggtttttgtcctttccttcactgatttgctttaaaaaaaataaaagataatgatttattgcagaattatgattctattttctcaatatgttaacttggaaaaaaattttagccttatcttaatctgtcccaacagcaatgtgacggatttttgcagattcaaaatctgcaatggttatttacaagtcaatctactgaattccttttttaaataatcttttgaaactaagaaaatgtgtcaaattgtgtgcattcattctgtaggtaaaattcttaaggattgccatgtcagtccttcagttgtacagtgaactgttgtacactggttcaatgaaaggaagttaaaagtaccttttacatattgtaaaagtggatacagttgatttgtgagtaggcactctttaatccattacctggcactagcaacattagaattttaaaataaaataattgggaaagaaggtgggtcatgtattaatcagtgaacagagatttacctaaccaacagacttggattgtcttttgacataatcaaaatgcaacacatgcactttgtgtgtctcctcttaattgaagggagggctgagggatgttttctcttcttgtcttgtgtataattctctattgcttaggatattaaagtagagcactcaagtgtgggtttctgtgttattgaggatttgtttggaattcaaattacagttatgtactggatgctacagacttataacagcatagtgaatggtaagactagtgcaaaacagttatttctgaaaattaaagaccattattgctaccaaatcaatgtgactatttcatatgcattttgcctttgttaattttaaacaaacaaagtatcattagtgatcagctagctaccttctactttccatttttcaagtggattgttctcttaatttgtatataacctgttgtctaaattttatgtacagtcttttataataaaccattctcctatatgaaattttggatactgttaaaatataactcatgtggacttcaatgcagacttcacatttttctgacctttactcctacggtaaatcaagacaaaccatttgaattttaacattggttatttatttgtgtaatggccttacatgtggatattaacagtgtaaacaataccacatataaccatcaagataccttgattataatttataggactagaatgacagattcaggtggtttattaattacatttaaaaagttttctgaaaaaacttttgcaataaaaaaaaataaattgcccatcaa

SEQ ID NO: 519 - DNA, 3503 bp, Homo sapiens
  source 1..3503: mol_type = unassigned DNA
gggggctggagagagtgaggaggaaggggaggaggtgccgtcccacaataccaggcgggagggcgggtaggcggtttgtatccgggctgtgaggtgctcggagcctcggcggaccttgctgcctctgtctctttaacgcgagaggaagcgatgcagaggggtggaaaatggcagagctgcagatgttactagaggaggagatcccgtctggcaagagggcgctgatcgagagttaccagaacctgactcgggtggcagactactgtgaaaacaactacatacaggctacagacaagagaaaagctttagaggagaccaaagcctatacaacccaatctctagctagtgttgcttatcaaataaatgcattggccaacaatgtactccagttgctggatatccaagcctctcagcttcggagaatggagtcttccatcaatcatatctcacagactgtggatattcataaggagaaagtggcacgaagagagattggtattttgacaacaaataagaatacatcaagaactcacaaaataatagcacctgcgaatatggagcgccctgtaaggtatattcggaaacctatcgattacacagttctggatgatgtgggccatggtgtcaagtggctaaaagccaagcatggaaataaccagcctgcaagaactggcacactgtcgagaacaaatcctcctactcagaaaccgccaagtcctcccatgtcaggccggggaacactgggacggaatactccttataaaaccctggaacctgttaaacccccaacagttcctaatgactatatgaccagtcctgctaggcttggaagtcagcatagtccaggcaggacagcatctttaaatcagagaccaaggacacacagtggaagtagtggaggaagtggaagtcgagaaaacagtggtagcagtagtattggcattcccattgctgtgcctacaccttcgccacccactattggaccagcagccccgggctcagctcctggttcccagtatggcacaatgaccaggcagatatctcgacacaactctactacttcttcgacatcttctggtggatacagacgaactccctctgtgactgctcaattttctgctcagcctcatgttaatggaggtccactttattctcaaaattcaattgctgatagtccaactccaccgccaccacctccaccagatgacattcccatgtttgatgactctccacctcccccaccaccaccaccagtggattatgaagatgaggaggctgcagtagttcagtataatgatccatatgcagatggggatcctgcttgggcccccaagaattatattgagaaagttgttgcaatatatgattatacaaaagacaaggatgatgagctgtcatttatggagggtgcaatcatttatgttataaagaagaatgatgatggctggtatgaaggagtctgcaatcgagtgactggtctgttccctgggaactatgttgaatcaatcatgcactatactgattaatttttttttttcttttgaagtagattcttattactcagtcatactgtgggactattatggttaacagaactgtcttaatatgttttaaaatgtgcccatattttcagaacatgctgttttattggtaaattgaatgtctacctgtaagcataaatctttgaggcagtttatgtattgctgaatagcaatttatacaagaagctgtccataactgattatgcttatgtacttacttacacatttttaactttatgaccagcctaaatattctgggggaagtggggtataatatttaacgaatcatgattcagattgtaccattacatgtttcagtgcagcatggttactaacgctatgtcagactaatattaaaatcagaaaatttaaatgctggtgctggtcagactttttttgttagattctctcatttaaaaaaaatactgtttgtttaaagcatgcataaaaatttatgtattgaaatatacttaaaaattcaagatgcttcccatttgtgtaatatttacctggaggactcgtacttaggtgtcttaacgtgaattgagtctccaaggtctccatgtgaaacaagcaaaaagagaattatctgtaatgttgtaatttgtacctaagttttttaatgagtgaaatttgcattataaactttttccattcataaatacataagtgaaccaaaggtttttgtcctttccttcactgatttgctttaaaaaaaataaaagataatgatttattgcagaattatgattctattttctcaatatgttaacttggaaaaaaattttagccttatcttaatctgtcccaacagcaatgtgacggatttttgcagattcaaaatctgcaatggttatttacaagtcaatctactgaattccttttttaaataatcttttgaaactaagaaaatgtgtcaaattgtgtgcattcattctgtaggtaaaattcttaaggattgccatgtcagtccttcagttgtacagtgaactgttgtacactggttcaatgaaaggaagttaaaagtaccttttacatattgtaaaagtggatacagttgatttgtgagtaggcactctttaatccattacctggcactagcaacattagaattttaaaataaaataattgggaaagaaggtgggtcatgtattaatcagtgaacagagatttacctaaccaacagacttggattgtcttttgacataatcaaaatgcaacacatgcactttgtgtgtctcctcttaattgaagggagggctgagggatgttttctcttcttgtcttgtgtataattctctattgcttaggatattaaagtagagcactcaagtgtgggtttctgtgttattgaggatttgtttggaattcaaattacagttatgtactggatgctacagacttataacagcatagtgaatggtaagactagtgcaaaacagttatttctgaaaattaaagaccattattgctaccaaatcaatgtgactatttcatatgcattttgcctttgttaattttaaacaaacaaagtatcattagtgatcagctagctaccttctactttccatttttcaagtggattgttctcttaatttgtatataacctgttgtctaaattttatgtacagtcttttataataaaccattctcctatatgaaattttggatactgttaaaatataactcatgtggacttcaatgcagacttcacatttttctgacctttactcctacggtaaatcaagacaaaccatttgaattttaacattggttatttatttgtgtaatggccttacatgtggatattaacagtgtaaacaataccacatataaccatcaagataccttgattataatttataggactagaatgacagattcaggtggtttattaattacatttaaaaagttttctgaaaaaacttttgcaataaaaaaaaataaattgcccatcaataa

SEQ ID NO: 520 - DNA, 3516 bp, Homo sapiens
  source 1..3516: mol_type = unassigned DNA
agggcgggtaggcggtttgtatccgggctgtgaggtgctcggagcctcggcggaccttgctgcctctgtctctttaacgcgagaggaagcgatgcagaggggtggaaaatggcagagctgcagatgttactagaggaggagatcccgtctggcaagagggcgctgatcgagagttaccagaacctgactcgggtggcagactactgtgaaaacaactacatacaggctacagacaagagaaaagctttagaggagaccaaagcctatacaacccaatctctagctagtgttgcttatcaaataaatgcattggccaacaatgtactccagttgctggatatccaagcctctcagcttcggagaatggagtcttccatcaatcatatctcacagactgtggatattcataaggagaaagtggcacgaagagagattggtattttgacaacaaataagaatacatcaagaactcacaaaataatagcacctgcgaatatggagcgccctgtaaggtatattcggaaacctatcgattacacagttctggatgatgtgggccatggtgtcaagcatggaaataaccagcctgcaagaactggcacactgtcgagaacaaatcctcctactcagaaaccgccaagtcctcccatgtcaggccggggaacactgggacggaatactccttataaaaccctggaacctgttaaacccccaacagttcctaatgactatatgaccagtcctgctaggcttggaagtcagcatagtccaggcaggacagcatctttaaatcagagaccaaggacacacagtggaagtagtggaggaagtggaagtcgagaaaacagtggtagcagtagtattggcattcccattgctgtgcctacaccttcgccacccactattggaccagcagccccgggctcagctcctggttcccagtatggcacaatgaccaggcagatatctcgacacaactctactacttcttcgacatcttctggtggatacagacgaactccctctgtgactgctcaattttctgctcagcctcatgttaatggaggtccactttattctcaaaattcaatttctattgctccaccccctccccctatgcctcagttgactccacagatacctctcacaggcttcgtggccagggtgcaggaaaacattgctgatagtccaactccaccgccaccacctccaccagatgacattcccatgtttgatgactctccacctcccccaccaccaccaccagtggattatgaagatgaggaggctgcagtagttcagtataatgatccatatgcagatggggatcctgcttgggcccccaagaattatattgagaaagttgttgcaatatatgattatacaaaagacaaggatgatgagctgtcatttatggagggtgcaatcatttatgttataaagaagaatgatgatggctggtatgaaggagtctgcaatcgagtgactggtctgttccctgggaactatgttgaatcaatcatgcactatactgattaatttttttttttcttttgaagtagattcttattactcagtcatactgtgggactattatggttaacagaactgtcttaatatgttttaaaatgtgcccatattttcagaacatgctgttttattggtaaattgaatgtctacctgtaagcataaatctttgaggcagtttatgtattgctgaatagcaatttatacaagaagctgtccataactgattatgcttatgtacttacttacacatttttaactttatgaccagcctaaatattctgggggaagtggggtataatatttaacgaatcatgattcagattgtaccattacatgtttcagtgcagcatggttactaacgctatgtcagactaatattaaaatcagaaaatttaaatgctggtgctggtcagactttttttgttagattctctcatttaaaaaaaatactgtttgtttaaagcatgcataaaaatttatgtattgaaatatacttaaaaattcaagatgcttcccatttgtgtaatatttacctggaggactcgtacttaggtgtcttaacgtgaattgagtctccaaggtctccatgtgaaacaagcaaaaagagaattatctgtaatgttgtaatttgtacctaagttttttaatgagtgaaatttgcattataaactttttccattcataaatacataagtgaaccaaaggtttttgtcctttccttcactgatttgctttaaaaaaaataaaagataatgatttattgcagaattatgattctattttctcaatatgttaacttggaaaaaaattttagccttatcttaatctgtcccaacagcaatgtgacggatttttgcagattcaaaatctgcaatggttatttacaagtcaatctactgaattccttttttaaataatcttttgaaactaagaaaatgtgtcaaattgtgtgcattcattctgtaggtaaaattcttaaggattgccatgtcagtccttcagttgtacagtgaactgttgtacactggttcaatgaaaggaagttaaaagtaccttttacatattgtaaaagtggatacagttgatttgtgagtaggcactctttaatccattacctggcactagcaacattagaattttaaaataaaataattgggaaagaaggtgggtcatgtattaatcagtgaacagagatttacctaaccaacagacttggattgtcttttgacataatcaaaatgcaacacatgcactttgtgtgtctcctcttaattgaagggagggctgagggatgttttctcttcttgtcttgtgtataattctctattgcttaggatattaaagtagagcactcaagtgtgggtttctgtgttattgaggatttgtttggaattcaaattacagttatgtactggatgctacagacttataacagcatagtgaatggtaagactagtgcaaaacagttatttctgaaaattaaagaccattattgctaccaaatcaatgtgactatttcatatgcattttgcctttgttaattttaaacaaacaaagtatcattagtgatcagctagctaccttctactttccatttttcaagtggattgttctcttaatttgtatataacctgttgtctaaattttatgtacagtcttttataataaaccattctcctatatgaaattttggatactgttaaaatataactcatgtggacttcaatgcagacttcacatttttctgacctttactcctacggtaaatcaagacaaaccatttgaattttaacattggttatttatttgtgtaatggccttacatgtggatattaacagtgtaaacaataccacatataaccatcaagataccttgattataatttataggactagaatgacagattcaggtggtttattaattacatttaaaaagttttctgaaaaaacttttgcaataaaaaaaaataaattgcccatcaataa

SEQ ID NO: 521 - DNA, 1446 bp, Homo sapiens
  source 1..1446: mol_type = unassigned DNA
atggcagagctgcagatgttactagaggaggagatcccgtctggcaagagggcgctgatcgagagttaccagaacctgactcgggtggcagactactgtgaaaacaactacatacaggctacagacaagagaaaagctttagaggagaccaaagcctatacaacccaatctctagctagtgttgcttatcaaataaatgcattggccaacaatgtactccagttgctggatatccaagcctctcagcttcggagaatggagtcttccatcaatcatatctcacagactgtggatattcataaggagaaagtggcacgaagagagattggtattttgacaacaaataagaatacatcaagaactcacaaaataatagcacctgcgaatatggagcgccctgtaaggtatattcggaaacctatcgattacacagttctggatgatgtgggccatggtgtcaagtggctaaaagccaagcatggaaataaccagcctgcaagaactggcacactgtcgagaacaaatcctcctactcagaaaccgccaagtcctcccatgtcaggccggggaacactgggacggaatactccttataaaaccctggaacctgttaaacccccaacagttcctaatgactatatgaccagtcctgctaggcttggaagtcagcatagtccaggcaggacagcatctttaaatcagagaccaaggacacacagtggaagtagtggaggaagtggaagtcgagaaaacagtggtagcagtagtattggcattcccattgctgtgcctacaccttcgccacccactattggaccagcagccccgggctcagctcctggttcccagtatggcacaatgaccaggcagatatctcgacacaactctactacttcttcgacatcttctggtggatacagacgaactccctctgtgactgctcaattttctgctcagcctcatgttaatggaggtccactttattctcaaaattcaatttctattgctccaccccctccccctatgcctcagttgactccacagatacctctcacaggcttcgtggccagggtgcaggaaaacattgctgatagtccaactccaccgccaccacctccaccagatgacattcccatgtttgatgactctccacctcccccaccaccaccaccagtggattatgaagatgaggaggctgcagtagttcagtataatgatccatatgcagatggggatcctgcttgggcccccaagaattatattgagaaagttgttgcaatatatgattatacaaaagacaaggatgatgagctgtcatttatggagggtgcaatcatttatgttataaagaagaatgatgatggctggtatgaaggagtctgcaatcgagtgactggtctgttccctgggaactatgttgaatcaatcatgcactatactgattaa

SEQ ID NO: 522 - DNA, 3576 bp, Homo sapiens
  source 1..3576: mol_type = unassigned DNA
gctcggagcctcggcggaccttgctgcctctgtctctttaacgcgagaggaagcgatgcagaggggtggaaaatggcagagctgcagatgttactagaggaggagatcccgtctggcaagagggcgctgatcgagagttaccagaacctgactcgggtggcagactactgtgaaaacaactacatacaggctacagacaagagaaaagctttagaggagaccaaagcctatacaacccaatctctagctagtgttgcttatcaaataaatgcattggccaacaatgtactccagttgctggatatccaagcctctcagcttcggagaatggagtcttccatcaatcatatctcacagactgtggatattcataaggagaaagtggcacgaagagagattggtattttgacaacaaataagaatacatcaagaactcacaaaataatagcacctgcgaatatggagcgccctgtaaggtatattcggaaacctatcgattacacagttctggatgatgtgggccatggtgtcaagtggctaaaagccaagcatggaaataaccagcctgcaagaactggcacactgtcgagaacaaatcctcctactcagaaaccgccaagtcctcccatgtcaggccggggaacactgggacggaatactccttataaaaccctggaacctgttaaacccccaacagttcctaatgactatatgaccagtcctgctaggcttggaagtcagcatagtccaggcaggacagcatctttaaatcagagaccaaggacacacagtggaagtagtggaggaagtggaagtcgagaaaacagtggtagcagtagtattggcattcccattgctgtgcctacaccttcgccacccactattggaccagaaaacatttctgtccctcctccttctggagctccaccagcaccacctctggcaccacttctcccagtgagcactgtgatagcagccccgggctcagctcctggttcccagtatggcacaatgaccaggcagatatctcgacacaactctactacttcttcgacatcttctggtggatacagacgaactccctctgtgactgctcaattttctgctcagcctcatgttaatggaggtccactttattctcaaaattcaatttctattgctccaccccctccccctatgcctcagttgactccacagatacctctcacaggcttcgtggccagggtgcaggaaaacattgctgatagtccaactccaccgccaccacctccaccagatgacattcccatgtttgatgactctccacctcccccaccaccaccaccagtggattatgaagatgaggaggctgcagtagttcagtataatgatccatatgcagatggggatcctgcttgggcccccaagaattatattgagaaagttgttgcaatatatgattatacaaaagacaaggatgatgagctgtcatttatggagggtgcaatcatttatgttataaagaagaatgatgatggctggtatgaaggagtctgcaatcgagtgactggtctgttccctgggaactatgttgaatcaatcatgcactatactgattaatttttttttttcttttgaagtagattcttattactcagtcatactgtgggactattatggttaacagaactgtcttaatatgttttaaaatgtgcccatattttcagaacatgctgttttattggtaaattgaatgtctacctgtaagcataaatctttgaggcagtttatgtattgctgaatagcaatttatacaagaagctgtccataactgattatgcttatgtacttacttacacatttttaactttatgaccagcctaaatattctgggggaagtggggtataatatttaacgaatcatgattcagattgtaccattacatgtttcagtgcagcatggttactaacgctatgtcagactaatattaaaatcagaaaatttaaatgctggtgctggtcagactttttttgttagattctctcatttaaaaaaaatactgtttgtttaaagcatgcataaaaatttatgtattgaaatatacttaaaaattcaagatgcttcccatttgtgtaatatttacctggaggactcgtacttaggtgtcttaacgtgaattgagtctccaaggtctccatgtgaaacaagcaaaaagagaattatctgtaatgttgtaatttgtacctaagttttttaatgagtgaaatttgcattataaactttttccattcataaatacataagtgaaccaaaggtttttgtcctttccttcactgatttgctttaaaaaaaataaaagataatgatttattgcagaattatgattctattttctcaatatgttaacttggaaaaaaattttagccttatcttaatctgtcccaacagcaatgtgacggatttttgcagattcaaaatctgcaatggttatttacaagtcaatctactgaattccttttttaaataatcttttgaaactaagaaaatgtgtcaaattgtgtgcattcattctgtaggtaaaattcttaaggattgccatgtcagtccttcagttgtacagtgaactgttgtacactggttcaatgaaaggaagttaaaagtaccttttacatattgtaaaagtggatacagttgatttgtgagtaggcactctttaatccattacctggcactagcaacattagaattttaaaataaaataattgggaaagaaggtgggtcatgtattaatcagtgaacagagatttacctaaccaacagacttggattgtcttttgacataatcaaaatgcaacacatgcactttgtgtgtctcctcttaattgaagggagggctgagggatgttttctcttcttgtcttgtgtataattctctattgcttaggatattaaagtagagcactcaagtgtgggtttctgtgttattgaggatttgtttggaattcaaattacagttatgtactggatgctacagacttataacagcatagtgaatggtaagactagtgcaaaacagttatttctgaaaattaaagaccattattgctaccaaatcaatgtgactatttcatatgcattttgcctttgttaattttaaacaaacaaagtatcattagtgatcagctagctaccttctactttccatttttcaagtggattgttctcttaatttgtatataacctgttgtctaaattttatgtacagtcttttataataaaccattctcctatatgaaattttggatactgttaaaatataactcatgtggacttcaatgcagacttcacatttttctgacctttactcctacggtaaatcaagacaaaccatttgaattttaacattggttatttatttgtgtaatggccttacatgtggatattaacagtgtaaacaataccacatataaccatcaagataccttgattataatttataggactagaatgacagattcaggtggtttattaattacatttaaaaagttttctgaaaaaacttttgcaataaaaaaaaataaattgcccatcaataa

SEQ ID NO: 523 - DNA, 3515 bp, Homo sapiens
  source 1..3515: mol_type = unassigned DNA
ggagggcgggtaggcggtttgtatccgggctgtgaggtgctcggagcctcggcggaccttgctgcctctgtctctttaacgcgagaggaagcgatgcagaggggtggaaaatggcagagctgcagatgttactagaggaggagatcccgtctggcaagagggcgctgatcgagagttaccagaacctgactcgggtggcagactactgtgaaaacaactacatacaggctacagacaagagaaaagctttagaggagaccaaagcctatacaacccaatctctagctagtgttgcttatcaaataaatgcattggccaacaatgtactccagttgctggatatccaagcctctcagcttcggagaatggagtcttccatcaatcatatctcacagactgtggatattcataaggagaaagtggcacgaagagagattggtattttgacaacaaataagaatacatcaagaactcacaaaataatagcacctgcgaatatggagcgccctgtaaggtatattcggaaacctatcgattacacagttctggatgatgtgggccatggtgtcaagcatggaaataaccagcctgcaagaactggcacactgtcgagaacaaatcctcctactcagaaaccgccaagtcctcccatgtcaggccggggaacactgggacggaatactccttataaaaccctggaacctgttaaacccccaacagttcctaatgactatatgaccagtcctgctaggcttggaagtcagcatagtccaggcaggacagcatctttaaatcagagaccaaggacacacagtggaagtagtggaggaagtggaagtcgagaaaacagtggtagcagtagtattggcattcccattgctgtgcctacaccttcgccacccactattggaccagccccgggctcagctcctggttcccagtatggcacaatgaccaggcagatatctcgacacaactctactacttcttcgacatcttctggtggatacagacgaactccctctgtgactgctcaattttctgctcagcctcatgttaatggaggtccactttattctcaaaattcaatttctattgctccaccccctccccctatgcctcagttgactccacagatacctctcacaggcttcgtggccagggtgcaggaaaacattgctgatagtccaactccaccgccaccacctccaccagatgacattcccatgtttgatgactctccacctcccccaccaccaccaccagtggattatgaagatgaggaggctgcagtagttcagtataatgatccatatgcagatggggatcctgcttgggcccccaagaattatattgagaaagttgttgcaatatatgattatacaaaagacaaggatgatgagctgtcatttatggagggtgcaatcatttatgttataaagaagaatgatgatggctggtatgaaggagtctgcaatcgagtgactggtctgttccctgggaactatgttgaatcaatcatgcactatactgattaatttttttttttcttttgaagtagattcttattactcagtcatactgtgggactattatggttaacagaactgtcttaatatgttttaaaatgtgcccatattttcagaacatgctgttttattggtaaattgaatgtctacctgtaagcataaatctttgaggcagtttatgtattgctgaatagcaatttatacaagaagctgtccataactgattatgcttatgtacttacttacacatttttaactttatgaccagcctaaatattctgggggaagtggggtataatatttaacgaatcatgattcagattgtaccattacatgtttcagtgcagcatggttactaacgctatgtcagactaatattaaaatcagaaaatttaaatgctggtgctggtcagactttttttgttagattctctcatttaaaaaaaatactgtttgtttaaagcatgcataaaaatttatgtattgaaatatacttaaaaattcaagatgcttcccatttgtgtaatatttacctggaggactcgtacttaggtgtcttaacgtgaattgagtctccaaggtctccatgtgaaacaagcaaaaagagaattatctgtaatgttgtaatttgtacctaagttttttaatgagtgaaatttgcattataaactttttccattcataaatacataagtgaaccaaaggtttttgtcctttccttcactgatttgctttaaaaaaaataaaagataatgatttattgcagaattatgattctattttctcaatatgttaacttggaaaaaaattttagccttatcttaatctgtcccaacagcaatgtgacggatttttgcagattcaaaatctgcaatggttatttacaagtcaatctactgaattccttttttaaataatcttttgaaactaagaaaatgtgtcaaattgtgtgcattcattctgtaggtaaaattcttaaggattgccatgtcagtccttcagttgtacagtgaactgttgtacactggttcaatgaaaggaagttaaaagtaccttttacatattgtaaaagtggatacagttgatttgtgagtaggcactctttaatccattacctggcactagcaacattagaattttaaaataaaataattgggaaagaaggtgggtcatgtattaatcagtgaacagagatttacctaaccaacagacttggattgtcttttgacataatcaaaatgcaacacatgcactttgtgtgtctcctcttaattgaagggagggctgagggatgttttctcttcttgtcttgtgtataattctctattgcttaggatattaaagtagagcactcaagtgtgggtttctgtgttattgaggatttgtttggaattcaaattacagttatgtactggatgctacagacttataacagcatagtgaatggtaagactagtgcaaaacagttatttctgaaaattaaagaccattattgctaccaaatcaatgtgactatttcatatgcattttgcctttgttaattttaaacaaacaaagtatcattagtgatcagctagctaccttctactttccatttttcaagtggattgttctcttaatttgtatataacctgttgtctaaattttatgtacagtcttttataataaaccattctcctatatgaaattttggatactgttaaaatataactcatgtggacttcaatgcagacttcacatttttctgacctttactcctacggtaaatcaagacaaaccatttgaattttaacattggttatttatttgtgtaatggccttacatgtggatattaacagtgtaaacaataccacatataaccatcaagataccttgattataatttataggactagaatgacagattcaggtggtttattaattacatttaaaaagttttctgaaaaaacttttgcaataaaaaaaaataaattgcccatcaataa

SEQ ID NO: 524 - DNA, 3441 bp, Homo sapiens
  source 1..3441: mol_type = unassigned DNA
acaataccaggcgggagggcgggtaggcggtttgtatccgggctgtgaggtgctcggagcctcggcggaccttgctgcctctgtctctttaacgcgagaggaagcgatgcagaggggtggaaaatggcagagctgcagatgttactagaggaggagatcccgtctggcaagagggcgctgatcgagagttaccagaacctgactcgggtggcagactactgtgaaaacaactacatacaggctacagacaagagaaaagctttagaggagaccaaagcctatacaacccaatctctagctagtgttgcttatcaaataaatgcattggccaacaatgtactccagttgctggatatccaagcctctcagcttcggagaatggagtcttccatcaatcatatctcacagactgtggatattcataaggagaaagtggcacgaagagagattggtattttgacaacaaataagaatacatcaagaactcacaaaataatagcacctgcgaatatggagcgccctgtaaggtatattcggaaacctatcgattacacagttctggatgatgtgggccatggtgtcaagcatggaaataaccagcctgcaagaactggcacactgtcgagaacaaatcctcctactcagaaaccgccaagtcctcccatgtcaggccggggaacactgggacggaatactccttataaaaccctggaacctgttaaacccccaacagttcctaatgactatatgaccagtcctgctaggcttggaagtcagcatagtccaggcaggacagcatctttaaatcagagaccaaggacacacagtggaagtagtggaggaagtggaagtcgagaaaacagtggtagcagtagtattggcattcccattgctgtgcctacaccttcgccacccactattggaccagccccgggctcagctcctggttcccagtatggcacaatgaccaggcagatatctcgacacaactctactacttcttcgacatcttctggtggatacagacgaactccctctgtgactgctcaattttctgctcagcctcatgttaatggaggtccactttattctcaaaattcaattgctgatagtccaactccaccgccaccacctccaccagatgacattcccatgtttgatgactctccacctcccccaccaccaccaccagtggattatgaagatgaggaggctgcagtagttcagtataatgatccatatgcagatggggatcctgcttgggcccccaagaattatattgagaaagttgttgcaatatatgattatacaaaagacaaggatgatgagctgtcatttatggagggtgcaatcatttatgttataaagaagaatgatgatggctggtatgaaggagtctgcaatcgagtgactggtctgttccctgggaactatgttgaatcaatcatgcactatactgattaatttttttttttcttttgaagtagattcttattactcagtcatactgtgggactattatggttaacagaactgtcttaatatgttttaaaatgtgcccatattttcagaacatgctgttttattggtaaattgaatgtctacctgtaagcataaatctttgaggcagtttatgtattgctgaatagcaatttatacaagaagctgtccataactgattatgcttatgtacttacttacacatttttaactttatgaccagcctaaatattctgggggaagtggggtataatatttaacgaatcatgattcagattgtaccattacatgtttcagtgcagcatggttactaacgctatgtcagactaatattaaaatcagaaaatttaaatgctggtgctggtcagactttttttgttagattctctcatttaaaaaaaatactgtttgtttaaagcatgcataaaaatttatgtattgaaatatacttaaaaattcaagatgcttcccatttgtgtaatatttacctggaggactcgtacttaggtgtcttaacgtgaattgagtctccaaggtctccatgtgaaacaagcaaaaagagaattatctgtaatgttgtaatttgtacctaagttttttaatgagtgaaatttgcattataaactttttccattcataaatacataagtgaaccaaaggtttttgtcctttccttcactgatttgctttaaaaaaaataaaagataatgatttattgcagaattatgattctattttctcaatatgttaacttggaaaaaaattttagccttatcttaatctgtcccaacagcaatgtgacggatttttgcagattcaaaatctgcaatggttatttacaagtcaatctactgaattccttttttaaataatcttttgaaactaagaaaatgtgtcaaattgtgtgcattcattctgtaggtaaaattcttaaggattgccatgtcagtccttcagttgtacagtgaactgttgtacactggttcaatgaaaggaagttaaaagtaccttttacatattgtaaaagtggatacagttgatttgtgagtaggcactctttaatccattacctggcactagcaacattagaattttaaaataaaataattgggaaagaaggtgggtcatgtattaatcagtgaacagagatttacctaaccaacagacttggattgtcttttgacataatcaaaatgcaacacatgcactttgtgtgtctcctcttaattgaagggagggctgagggatgttttctcttcttgtcttgtgtataattctctattgcttaggatattaaagtagagcactcaagtgtgggtttctgtgttattgaggatttgtttggaattcaaattacagttatgtactggatgctacagacttataacagcatagtgaatggtaagactagtgcaaaacagttatttctgaaaattaaagaccattattgctaccaaatcaatgtgactatttcatatgcattttgcctttgttaattttaaacaaacaaagtatcattagtgatcagctagctaccttctactttccatttttcaagtggattgttctcttaatttgtatataacctgttgtctaaattttatgtacagtcttttataataaaccattctcctatatgaaattttggatactgttaaaatataactcatgtggacttcaatgcagacttcacatttttctgacctttactcctacggtaaatcaagacaaaccatttgaattttaacattggttatttatttgtgtaatggccttacatgtggatattaacagtgtaaacaataccacatataaccatcaagataccttgattataatttataggactagaatgacagattcaggtggtttattaattacatttaaaaagttttctgaaaaaacttttgcaataaaaaaaaataaattgcccatcaataa

SEQ ID NO: 525 - DNA, 3362 bp, Homo sapiens
  source 1..3362: mol_type = unassigned DNA
cgagaggaagcgatgcagaggggtggaaaatggcagagctgcagatgttactagaggaggagatcccgtctggcaagagggcgctgatcgagagttaccagaacctgactcgggtggcagactactgtgaaaacaactacatacaggctacagacaagagaaaagctttagaggagaccaaagcctatacaacccaatctctagctagtgttgcttatcaaataaatgcattggccaacaatgtactccagttgctggatatccaagcctctcagcttcggagaatggagtcttccatcaatcatatctcacagactgtggatattcataaggagaaagtggcacgaagagagattggtattttgacaacaaataagaatacatcaagaactcacaaaataatagcacctgcgaatatggagcgccctgtaaggtatattcggaaacctatcgattacacagttctggatgatgtgggccatggtgtcaagtggctaaaagccaagcatggaaataaccagcctgcaagaactggcacactgtcgagaacaaatcctcctactcagaaaccgccaagtcctcccatgtcaggccggggaacactgggacggaatactccttataaaaccctggaacctgttaaacccccaacagttcctaatgactatatgaccagtcctgctaggcttggaagtcagcatagtccaggcaggacagcatctttaaatcagagaccaaggacacacagtggaagtagtggaggaagtggaagtcgagaaaacagtggtagcagtagtattggcattcccattgctgtgcctacaccttcgccacccactattggaccagccccgggctcagctcctggttcccagtatggcacaatgaccaggcagatatctcgacacaactctactacttcttcgacatcttctggtggatacagacgaactccctctgtgactgctcaattttctgctcagcctcatgttaatggaggtccactttattctcaaaattcaattgctgatagtccaactccaccgccaccacctccaccagatgacattcccatgtttgatgactctccacctcccccaccaccaccaccagtggattatgaagatgaggaggctgcagtagttcagtataatgatccatatgcagatggggatcctgcttgggcccccaagaattatattgagaaagttgttgcaatatatgattatacaaaagacaaggatgatgagctgtcatttatggagggtgcaatcatttatgttataaagaagaatgatgatggctggtatgaaggagtctgcaatcgagtgactggtctgttccctgggaactatgttgaatcaatcatgcactatactgattaatttttttttttcttttgaagtagattcttattactcagtcatactgtgggactattatggttaacagaactgtcttaatatgttttaaaatgtgcccatattttcagaacatgctgttttattggtaaattgaatgtctacctgtaagcataaatctttgaggcagtttatgtattgctgaatagcaatttatacaagaagctgtccataactgattatgcttatgtacttacttacacatttttaactttatgaccagcctaaatattctgggggaagtggggtataatatttaacgaatcatgattcagattgtaccattacatgtttcagtgcagcatggttactaacgctatgtcagactaatattaaaatcagaaaatttaaatgctggtgctggtcagactttttttgttagattctctcatttaaaaaaaatactgtttgtttaaagcatgcataaaaatttatgtattgaaatatacttaaaaattcaagatgcttcccatttgtgtaatatttacctggaggactcgtacttaggtgtcttaacgtgaattgagtctccaaggtctccatgtgaaacaagcaaaaagagaattatctgtaatgttgtaatttgtacctaagttttttaatgagtgaaatttgcattataaactttttccattcataaatacataagtgaaccaaaggtttttgtcctttccttcactgatttgctttaaaaaaaataaaagataatgatttattgcagaattatgattctattttctcaatatgttaacttggaaaaaaattttagccttatcttaatctgtcccaacagcaatgtgacggatttttgcagattcaaaatctgcaatggttatttacaagtcaatctactgaattccttttttaaataatcttttgaaactaagaaaatgtgtcaaattgtgtgcattcattctgtaggtaaaattcttaaggattgccatgtcagtccttcagttgtacagtgaactgttgtacactggttcaatgaaaggaagttaaaagtaccttttacatattgtaaaagtggatacagttgatttgtgagtaggcactctttaatccattacctggcactagcaacattagaattttaaaataaaataattgggaaagaaggtgggtcatgtattaatcagtgaacagagatttacctaaccaacagacttggattgtcttttgacataatcaaaatgcaacacatgcactttgtgtgtctcctcttaattgaagggagggctgagggatgttttctcttcttgtcttgtgtataattctctattgcttaggatattaaagtagagcactcaagtgtgggtttctgtgttattgaggatttgtttggaattcaaattacagttatgtactggatgctacagacttataacagcatagtgaatggtaagactagtgcaaaacagttatttctgaaaattaaagaccattattgctaccaaatcaatgtgactatttcatatgcattttgcctttgttaattttaaacaaacaaagtatcattagtgatcagctagctaccttctactttccatttttcaagtggattgttctcttaatttgtatataacctgttgtctaaattttatgtacagtcttttataataaaccattctcctatatgaaattttggatactgttaaaatataactcatgtggacttcaatgcagacttcacatttttctgacctttactcctacggtaaatcaagacaaaccatttgaattttaacattggttatttatttgtgtaatggccttacatgtggatattaacagtgtaaacaataccacatataaccatcaagataccttgattataatttataggactagaatgacagattcaggtggtttattaattacatttaaaaagttttctgaaaaaacttttgcaataaaaaaaaataaattgcccatcaataa

SEQ ID NO: 526 - DNA, 3188 bp, Homo sapiens
  source 1..3188: mol_type = unassigned DNA
gagaaataaacgctcgcgagagaacgaggttcaggcggctgcacgaagggggtggaggggggctggagagagtgaggaggaaggggaggaggtgccgtcccacaataccaggcgggagggcgggtaggcggtttgtatccgggctgtgaggtgctcggagcctcggcggaccttgctgcctctgtctctttaacgcgagaggaagcgatgcagaggggtggaaaatggcagagctgcagatgttactagaggaggagatcccgtctggcaagagggcgctgatcgagagttaccagaacctgactcgggtggcagactactgtgaaaacaactacatacaggctacagacaagagaaaagctttagaggagaccaaagcctatacaacccaatctctagctagtgttgcttatcaaataaatgcattggccaacaatgtactccagttgctggatatccaagcctctcagcttcggagaatggagtcttccatcaatcatatctcacagcatggaaataaccagcctgcaagaactggcacactgtcgagaacaaatcctcctactcagaaaccgccaagtcctcccatgtcaggccggggaacactgggacggaatactccttataaaaccctggaacctgttaaacccccaacagttcctaatgactatatgaccagtcctgctaggcttggaagtcagcatagtccaggcaggacagcatctttaaatcagagaccaaggacacacagtggaagtagtggaggaagtggaagtcgagaaaacagtggtagcagtagtattggcattcccattgctgtgcctacaccttcgccacccactattggaccagttgctgatagtccaactccaccgccaccacctccaccagatgacattcccatgtttgatgactctccacctcccccaccaccaccaccagtggattatgaagatgaggaggctgcagtagttcagtataatgatccatatgcagatggggatcctgcttgggcccccaagaattatattgagaaagttgttgcaatatatgattatacaaaagacaaggatgatgagctgtcatttatggagggtgcaatcatttatgttataaagaagaatgatgatggctggtatgaaggagtctgcaatcgagtgactggtctgttccctgggaactatgttgaatcaatcatgcactatactgattaatttttttttttcttttgaagtagattcttattactcagtcatactgtgggactattatggttaacagaactgtcttaatatgttttaaaatgtgcccatattttcagaacatgctgttttattggtaaattgaatgtctacctgtaagcataaatctttgaggcagtttatgtattgctgaatagcaatttatacaagaagctgtccataactgattatgcttatgtacttacttacacatttttaactttatgaccagcctaaatattctgggggaagtggggtataatatttaacgaatcatgattcagattgtaccattacatgtttcagtgcagcatggttactaacgctatgtcagactaatattaaaatcagaaaatttaaatgctggtgctggtcagactttttttgttagattctctcatttaaaaaaaatactgtttgtttaaagcatgcataaaaatttatgtattgaaatatacttaaaaattcaagatgcttcccatttgtgtaatatttacctggaggactcgtacttaggtgtcttaacgtgaattgagtctccaaggtctccatgtgaaacaagcaaaaagagaattatctgtaatgttgtaatttgtacctaagttttttaatgagtgaaatttgcattataaactttttccattcataaatacataagtgaaccaaaggtttttgtcctttccttcactgatttgctttaaaaaaaataaaagataatgatttattgcagaattatgattctattttctcaatatgttaacttggaaaaaaattttagccttatcttaatctgtcccaacagcaatgtgacggatttttgcagattcaaaatctgcaatggttatttacaagtcaatctactgaattccttttttaaataatcttttgaaactaagaaaatgtgtcaaattgtgtgcattcattctgtaggtaaaattcttaaggattgccatgtcagtccttcagttgtacagtgaactgttgtacactggttcaatgaaaggaagttaaaagtaccttttacatattgtaaaagtggatacagttgatttgtgagtaggcactctttaatccattacctggcactagcaacattagaattttaaaataaaataattgggaaagaaggtgggtcatgtattaatcagtgaacagagatttacctaaccaacagacttggattgtcttttgacataatcaaaatgcaacacatgcactttgtgtgtctcctcttaattgaagggagggctgagggatgttttctcttcttgtcttgtgtataattctctattgcttaggatattaaagtagagcactcaagtgtgggtttctgtgttattgaggatttgtttggaattcaaattacagttatgtactggatgctacagacttataacagcatagtgaatggtaagactagtgcaaaacagttatttctgaaaattaaagaccattattgctaccaaatcaatgtgactatttcatatgcattttgcctttgttaattttaaacaaacaaagtatcattagtgatcagctagctaccttctactttccatttttcaagtggattgttctcttaatttgtatataacctgttgtctaaattttatgtacagtcttttataataaaccattctcctatatgaaattttggatactgttaaaatataactcatgtggacttcaatgcagacttcacatttttctgacctttactcctacggtaaatcaagacaaaccatttgaattttaacattggttatttatttgtgtaatggccttacatgtggatattaacagtgtaaacaataccacatataaccatcaagataccttgattataatttataggactagaatgacagattcaggtggtttattaattacatttaaaaagttttctgaaaaaacttttgcaataaaaaaaaataaattgcccatcaa

SEQ ID NO: 527 - DNA, 3383 bp, Homo sapiens
  source 1..3383: mol_type = unassigned DNA
gagaaataaacgctcgcgagagaacgaggttcaggcggctgcacgaagggggtggaggggggctggagagagtgaggaggaaggggaggaggtgccgtcccacaataccaggcgggagggcgggtaggcggtttgtatccgggctgtgaggtgctcggagcctcggcggaccttgctgcctctgtctctttaacgcgagaggaagcgatgcagaggggtggaaaatggcagagctgcagatgttactagaggaggagatcccgtctggcaagagggcgctgatcgagagttaccagaacctgactcgggtggcagactactgtgaaaacaactacatacaggctacagacaagagaaaagctttagaggagaccaaagcctatacaacccaatctctagctagtgttgcttatcaaataaatgcattggccaacaatgtactccagttgctggatatccaagcctctcagcttcggagaatggagtcttccatcaatcatatctcacagactgtggatattcataaggagaaagtggcacgaagagagattggtattttgacaacaaataagaatacatcaagaactcacaaaataatagcacctgcgaatatggagcgccctgtaaggtatattcggaaacctatcgattacacagttctggatgatgtgggccatggtgtcaagaaatggcataaaataatacatggaaataaccagcctgcaagaactggcacactgtcgagaacaaatcctcctactcagaaaccgccaagtcctcccatgtcaggccggggaacactgggacggaatactccttataaaaccctggaacctgttaaacccccaacagttcctaatgactatatgaccagtcctgctaggcttggaagtcagcatagtccaggcaggacagcatctttaaatcagagaccaaggacacacagtggaagtagtggaggaagtggaagtcgagaaaacagtggtagcagtagtattggcattcccattgctgtgcctacaccttcgccacccactattggaccagttgctgatagtccaactccaccgccaccacctccaccagatgacattcccatgtttgatgactctccacctcccccaccaccaccaccagtggattatgaagatgaggaggctgcagtagttcagtataatgatccatatgcagatggggatcctgcttgggcccccaagaattatattgagaaagttgttgcaatatatgattatacaaaagacaaggatgatgagctgtcatttatggagggtgcaatcatttatgttataaagaagaatgatgatggctggtatgaaggagtctgcaatcgagtgactggtctgttccctgggaactatgttgaatcaatcatgcactatactgattaatttttttttttcttttgaagtagattcttattactcagtcatactgtgggactattatggttaacagaactgtcttaatatgttttaaaatgtgcccatattttcagaacatgctgttttattggtaaattgaatgtctacctgtaagcataaatctttgaggcagtttatgtattgctgaatagcaatttatacaagaagctgtccataactgattatgcttatgtacttacttacacatttttaactttatgaccagcctaaatattctgggggaagtggggtataatatttaacgaatcatgattcagattgtaccattacatgtttcagtgcagcatggttactaacgctatgtcagactaatattaaaatcagaaaatttaaatgctggtgctggtcagactttttttgttagattctctcatttaaaaaaaatactgtttgtttaaagcatgcataaaaatttatgtattgaaatatacttaaaaattcaagatgcttcccatttgtgtaatatttacctggaggactcgtacttaggtgtcttaacgtgaattgagtctccaaggtctccatgtgaaacaagcaaaaagagaattatctgtaatgttgtaatttgtacctaagttttttaatgagtgaaatttgcattataaactttttccattcataaatacataagtgaaccaaaggtttttgtcctttccttcactgatttgctttaaaaaaaataaaagataatgatttattgcagaattatgattctattttctcaatatgttaacttggaaaaaaattttagccttatcttaatctgtcccaacagcaatgtgacggatttttgcagattcaaaatctgcaatggttatttacaagtcaatctactgaattccttttttaaataatcttttgaaactaagaaaatgtgtcaaattgtgtgcattcattctgtaggtaaaattcttaaggattgccatgtcagtccttcagttgtacagtgaactgttgtacactggttcaatgaaaggaagttaaaagtaccttttacatattgtaaaagtggatacagttgatttgtgagtaggcactctttaatccattacctggcactagcaacattagaattttaaaataaaataattgggaaagaaggtgggtcatgtattaatcagtgaacagagatttacctaaccaacagacttggattgtcttttgacataatcaaaatgcaacacatgcactttgtgtgtctcctcttaattgaagggagggctgagggatgttttctcttcttgtcttgtgtataattctctattgcttaggatattaaagtagagcactcaagtgtgggtttctgtgttattgaggatttgtttggaattcaaattacagttatgtactggatgctacagacttataacagcatagtgaatggtaagactagtgcaaaacagttatttctgaaaattaaagaccattattgctaccaaatcaatgtgactatttcatatgcattttgcctttgttaattttaaacaaacaaagtatcattagtgatcagctagctaccttctactttccatttttcaagtggattgttctcttaatttgtatataacctgttgtctaaattttatgtacagtcttttataataaaccattctcctatatgaaattttggatactgttaaaatataactcatgtggacttcaatgcagacttcacatttttctgacctttactcctacggtaaatcaagacaaaccatttgaattttaacattggttatttatttgtgtaatggccttacatgtggatattaacagtgtaaacaataccacatataaccatcaagataccttgattataatttataggactagaatgacagattcaggtggtttattaattacatttaaaaagttttctgaaaaaacttttgcaataaaaaaaaataaattgcccatcaa

SEQ ID NO: 528 - DNA, 8290 bp, Homo sapiens
  source 1..8290: mol_type = unassigned DNA
atgccgctgtccccgccagcccagggcgaccccggggagcccagcccgtgcaggccccctaagaagcacaccaccttccacctctggcgctccaaaaagaagcagcagccggcgccgcctgactgtggggtgttcgttccgcacccgctcccggcgcctgccggagaggccagagctttggatgtagtcgatggaaaatatgtggttcgagactcccaggaatttccactgcactgtggggaatcccagttcttccacaccaccagtgaggcgcttggttccttacttctagagtctggaatatttaaaaagtccagagcacaacctccagaagacaacagaaggaagccagttttggggaaacttggcactctattcactgcaggaaggagaagaaacagtagaaacgggttagagagtcccaccagatcaaatgccaaaccactctctcccaaagatgtggtagcctctcctaagctcccagagagagagagtgagaggagcagatctcagagcagccaactgaagcaaacggacacaagcgaggagggctccccgcgggagaatccccgagaggcagagggcgagctccccgagagcggtggccccgcagccccccctgacgccgagctgtcacctcgctggagcagcagtgcagcggctgtggctgtgcagcagtgccatgaaaatgattcaccccaattagaacctctggaggcagagggagagcctttcccagatgccaccaccactgccaagcagctgcattcctcgccgggaaattcctccaggcaagagaacgcagagacgcccgcccgcagtccgggggaggacgcttcaccaggtgctggccacgaacaggaggctttcctgggtgtgaggggtgcgccagggtcgcccacccaggagcggcccgcgggaggactaggcgaggcccctaacggagcccccagtgtgtgtgccgaagaaggctccctggggccccgcaacgcccgcagccagccccccaagggcgcgtctgatttgccaggtgagcctccggccgagggcgcagcgcacacggccagctccgcgcaggcagactgcacagcccgccccaagggtcacgcccaccctgctaaggtgctaactttggacatctacttgagtaagactgagggggcacaagtggacgagccggtcgtgattactcccagagcggaagattgcggtgactgggacgacatggagaagaggtccagcggccgtaggtcggggaggcggagggggtcgcagaaatccaccgactcccccggcgcggacgccgagctccctgagagcgctgccagggacgacgcggtgttcgacgacgaggtggcgccaaacgcggccagcgataacgcctcggcggaaaagaaagtgaaatctccgcgggcagccctcgacgggggcgttgcctccgctgcgagcccagagtccaagcccagccccggtaccaaagggcagctccgaggggagtcggaccggagcaaacagccacccccggcttcgtcccccacgaagaggaagggcaggagccgtgccctcgaggccgtgcccgccccgcccgccagcggcccccgggctcccgccaaggagtccccacccaagagggtgcccgatcccagcccagtcaccaagggcactgcggccgagagcggggaggaggcggcgcgggccatcccccgcgagctcccggtcaagagcagctcgctgctgccggagatcaagcccgagcacaagaggggcccgctccccaaccacttcaacggccgggcagagggaggtcgaagcagagagctgggcagagcggccggagcgcctggagcttctgacgccgacggcttgaagcccaggaaccatttcggcgtgggcaggtcgacagtgaccactaaagtgaccctccctgccaagcccaaacatgtggaactaaatcttaaaacccctaagaatcttgacagtttgggaaatgagcacaatccatttagccagccagttcacaaaggcaacactgccaccaaaatctccttatttgaaaacaaacggacaaacagtagcccaagacacactgacattcgaggccaaaggaatactcctgcctctagtaaaacgtttgttgggagggcaaagctgaatttagccaaaaaagccaaagaaatggagcaacctgaaaagaaagtaatgccaaacagtccccagaatggtgtgctggttaaggaaactgctatagaaaccaaagttaccgtctcggaagaagagattctgccagcaaccagaggaatgaatggagactcttctgagaatcaagctcttggtcctcagcctaaccaagatgataaagcagatgtacaaacagatgctggctgcctttcagaaccagtggcttctgctctgattcctgtcaaggatcataagctcttagagaaggaggactcagaggctgcagacagcaaaagccttgtacttgaaaatgtaaccgatacagcacaagacatccccaccactgtggataccaaagatttacctccaacggccatgccaaagccacagcatacattttctgactcacagtcccctgctgagtcatctcctgggccttctctttcactgtctgcacccgctcctggggatgttcccaaagacacatgtgttcaatcacccataagcagtttcccatgcactgatctaaaagtgtcagaaaaccataaaggatgtgttttgcctgtgtctcgtcagaacaatgagaaaatgccacttttagaacttggaggagaaacaacccctcctttgtccacagagcgtagtccagaagctgtgggaagtgagtgtccatccagagtcctcgtccaggtcaggtccttcgtgctccccgtggagagcacccaggatgtgagctcccaggtcatcccagagagctctgaagttagagaagtgcagttgccaacttgtcacagtaatgaacctgaagtggtttccgttgcaagttgtgctcccccacaagaggaagtactgggcaatgaacactctcattgcacagcagagctcgcggcaaaatctggcccacaagtcataccgccagcatcagagaaaactctgcctattcaggctcaaagtcagggcagcagaacacccctgatggctgaatccagtcccaccaactctcccagcagcggaaatcacttagccactcctcaaaggccagatcagactgttacaaatggccaggatagccctgccagccttttgaacatttctgctggtagtgatgatagtgtatttgattcttcttctgatatggaaaaattcactgaaattataaaacagatggatagcgcagtttgtatgcccatgaaaagaaagaaggccaggatgccaaactctcctgctcctcactttgccatgcctcctattcacgaagaccatttagaaaaggtgtttgatcccaaagtgtttacctttggtttggggaagaagaaggaaagtcagccagaaatgtcaccggctttacatttgatgcagaaccttgacacaaaatccaaactgagacccaaacgtgcatctgctgaacagagcgtcctcttcaagtccctgcacaccaacactaatgggaacagtgagcctctggtgatgccggaaatcaatgacaaagagaacagggacgtcacaaatggtggcattaagagatcgagactagaaaaaagtgcacttttctcaagcttgttatcttctttaccacaagacaaaatcttttctccttctgtgacatcagtcaacactatgaccacggctttcagtacttctcagaacggttccctatctcagtcttcagtgtcacagcccacgactgagggtgccccgccctgtggtttgaacaaagaacagtcaaatcttctgcccgacaactccttaaaggtcttcaatttcaactcgtcaagtacatcacactccagtttgaaaagtccaagccacatggaaaaatacccgcaaaaagagaaaaccaaagaagatctggattcacgaagcaacctacacttgccagaaactaaattttctgaattgtcaaaactgaagaatgatgatatggaaaaggctaatcatattgaaagtgttattaaatcaaacttgccaaactgtgcaaacagtgacaccgacttcatgggtcttttcaaatcaagccggtatgacccaagcatttctttttctggaatgtcattatcagacacaatgacacttagaggaagtgtccaaaataaactcaatccccgacctggaaaggtagtgatatatagtgaacccgacgtctctgagaagtgcattgaagttttcagtgacattcaggattgcagttcttggagcctctctccagtgatactcataaaagttgttagaggatgttggattttgtatgagcaaccaaattttgaagggcactccatccccttagaagaaggagaattggaactctctggtctctggggtatagaagacattttggaaaggcacgaagaagcagagtctgataagccagtggtgattggttccatcagacatgtggttcaggattacagagttagtcacattgacttatttactgaaccagaagggttaggaatcctaagttcctactttgatgatactgaagaaatgcagggatttggtgtaatgcagaagacttgttccatgaaagtacattggggcacgtggctgatttatgaagaacctggatttcagggtgttcctttcatcctggaacctggtgaataccctgacttgtccttctgggatacagaagaagcgtacattggatccatgcggcctctgaaaatgggtggccgtaaagttgaattccctacagatccaaaggtagttgtttatgaaaagcctttctttgaaggaaaatgtgtggaactagaaacaggaatgtgtagttttgtcatggagggaggtgaaacagaagaggcgactggagacgatcatttgccgtttacgtcagtggggtctatgaaagttctaagaggcatttgggttgcatatgagaaacctggatttaccggtcatcagtatttgctagaagaaggagaatacagggactggaaagcctggggaggttacaatggagagcttcagtctttacgacctatattaggtgatttttcaaatgctcacatgataatgtacagtgaaaaaaactttggatccaaaggttccagtattgatgtattgggaattgttgctaatttaaaggagactggatatggagtgaagacacagtctattaatgtactgagtggagtatgggtagcctatgaaaatcctgacttcacaggagaacagtatatactggataaaggattttataccagttttgaggactggggaggcaaaaattgtaagatctcttctgttcaacctatatgtttggattctttcactggcccaaggagacgaaatcagattcacttgttttcagaaccacagtttcaaggtcacagtcaaagttttgaagaaacaacaagtcaaattgatgattcattttctaccaagtcttgcagagtttcaggaggcagctgggttgtatatgatggagaaaatttcactggtaatcaatacgtgttggaagaaggccattatccttgtctgtctgcaatgggatgcccgcctggagcaactttcaagtctcttcgttttatagatgttgaattttctgaaccaacaattattctctttgaaagagaagacttcaaaggaaaaaagattgaacttaatgcagaaactgtcaatctccgatccctgggattcaacacacaaatacgctctgttcaggttattggtggcatatgggttacttatgaatatggcagttacagagggcgacagttcctattgtcacctgcagaagtacctaattggtatgaattcagtggctgtcgccaaataggttctctacgaccttttgttcagaagcgaatttatttcagacttcgaaacaaagcaacagggttattcatgtcaaccaatggaaacttagaggatctgaagcttctgaggatacaggtcatggaggatgtcggggccgatgatcagatttggatctatcaagaaggatgtatcaaatgcaggatagcagaagactgctgcctgacgattgtgggcagcctggtaacatctggctccaagctaggcctggccctggaccagaatgctgacagccagttctggagcttgaagtccgatggcaggatttacagcaagttgaagccaaatttagttttagacattaaagggggcacacagtatgatcaaaatcacattatcctcaacactgtcagcaaagagaagtttacacaagtgtgggaagccatggtcctatatacctgaacaaagaaggaagaagaatcttctggaggtccttccagccaccttatttcttaaaaaggacaatgctgatggaagaccagactggaaagtggatcgactcctccttcattgattctaaattcaaccttaaatcatgctgccatgactcagagaacttactcatcgtttcaaaagactatcatagctttaaaccaataatttgtcctcctttcatttcttgcctttcatttttggtagctgcttaaacaggttgcctaattagcagcttttgggtgattttgtaaaatgttatatcaagatttcaagactgtgtacattttaaattatttccaaagatagtgacaggagagaactggaacaaatttaccaactttgtggacctacaaagcccttacactttaaagggtaagacaaaggcttaagtttgaaaggtagagaactgtttagcatctgagaagaaatactttattaggcctgtaattttggttcttggccttaaacactttctggaacctttaaatatgctgcatagcacaatgggaaagccttaggtattcacacatttaaggaactctaaacaaaatactattttcctttagttcatattaaaaattaatacattttaaaaatttaatgtcaaagtctggtaacatttgttagtaggatttgagttattattttttgagacaggatctcaggctggagtgcagtggcacaatcacggctcactgcagcctctacctccccaggctcaggtgatcctcccacctcagcctcccaagtagctgggactataggcacacatcaccaagcccagccaaattttgttttttttttgtagagatggggtttcatcacgttgcccaggctgatctcgaacctctgggctcaagcaattcactcgcctcggcctcccaaaatgctgggattacaggcctgagccactgcgcccagccaggatttgaattattttaactcatccatgggctgccctagaatgtcacaaatgagggttgtttaatgcctttcttatagctgctactggaacactattatgacctaatttatgagccatccttactcatctacaagtgctgaagcaatgttacatacttttttgctaaactcagattttttagcctaatttcttgtcctcctatccacctgcatccacacatggcctgcatggggctgccttccctgcagtgttctgcagccatgcttcagggtatagctgttggtggacagcctcaggtcttgggggcactatagccactaaacgaggtgtgaaaggctcaagaggatgaccagcaattaattatccccagaaagtgaaggaaaagagacctttagggatgttgctggtcaagtcttgatttgaccggagtcaaatcaatcttcaagcaatcttggaatcctcaactgcagtaagcatttcaaaatgcaaacaaactgcttaacaactgacaagacaccagcccatacgctgctcttccaacagtgggttctagctttgaacaaaagtgctaaacatttccttgaatatattcttcctctttttgtcctcatcactcaatactggtgctcttgtcacaggtagaacagcttgtttcttttccatctattcaagtgtgtttctaattctaaaatgctgatcttctctggagtctatggtaggcaattatggtcactggaatagtttgtcttgttttaaaatattattggtgcatgtacaacagcatccaacatatctgtcttgttcctagatatatagctctgattttaggccttttgtgcataccattacaatatggtggggtaagacattctacagtagcctgtgctgaactgatctcttaaataaacttgcttctggttaactatgttgatgaaa

SEQ ID NO: 529 - DNA, 7544 bp, Homo sapiens
  source 1..7544: mol_type = unassigned DNA
agatgccaccaccactgccaagcagctgcattcctcgccgggaaattcctccaggcaagagaacgcagagacgcccgcccgcagtccgggggaggacgcttcaccaggtgctggccacgaacaggaggctttcctgggtgtgaggggtgcgccagggtcgcccacccaggagcggcccgcgggaggactaggcgaggcccctaacggagcccccagtgtgtgtgccgaagaaggctccctggggccccgcaacgcccgcagccagccccccaagggcgcgtctgatttgccaggtgagcctccggccgagggcgcagcgcacacggccagctccgcgcaggcagactgcacagcccgccccaagggtcacgcccaccctgctaaggtgctaactttggacatctacttgagtaagactgagggggcacaagtggacgagccggtcgtgattactcccagagcggaagattgcggtgactgggacgacatggagaagaggtccagcggccgtaggtcggggaggcggagggggtcgcagaaatccaccgactcccccggcgcggacgccgagctccctgagagcgctgccagggacgacgcggtgttcgacgacgaggtggcgccaaacgcggccagcgataacgcctcggcggaaaagaaagtgaaatctccgcgggcagccctcgacgggggcgttgcctccgctgcgagcccagagtccaagcccagccccggtaccaaagggcagctccgaggggagtcggaccggagcaaacagccacccccggcttcgtcccccacgaagaggaagggcaggagccgtgccctcgaggccgtgcccgccccgcccgccagcggcccccgggctcccgccaaggagtccccacccaagagggtgcccgatcccagcccagtcaccaagggcactgcggccgagagcggggaggaggcggcgcgggccatcccccgcgagctcccggtcaagagcagctcgctgctgccggagatcaagcccgagcacaagaggggcccgctccccaaccacttcaacggccgggcagagggaggtcgaagcagagagctgggcagagcggccggagcgcctggagcttctgacgccgacggcttgaagcccaggaaccatttcggcgtgggcaggtcgacagtgaccactaaagtgaccctccctgccaagcccaaacatgtggaactaaatcttaaaacccctaagaatcttgacagtttgggaaatgagcacaatccatttagccagccagttcacaaaggcaacactgccaccaaaatctccttatttgaaaacaaacggacaaacagtagcccaagacacactgacattcgaggccaaaggaatactcctgcctctagtaaaacgtttgttgggagggcaaagctgaatttagccaaaaaagccaaagaaatggagcaacctgaaaagaaagtaatgccaaacagtccccagaatggtgtgctggttaaggaaactgctatagaaaccaaagttaccgtctcggaagaagagattctgccagcaaccagaggaatgaatggagactcttctgagaatcaagctcttggtcctcagcctaaccaagatgataaagcagatgtacaaacagatgctggctgcctttcagaaccagtggcttctgctctgattcctgtcaaggatcataagctcttagagaaggaggactcagaggctgcagacagcaaaagccttgtacttgaaaatgtaaccgatacagcacaagacatccccaccactgtggataccaaagatttacctccaacggccatgccaaagccacagcatacattttctgactcacagtcccctgctgagtcatctcctgggccttctctttcactgtctgcacccgctcctggggatgttcccaaagacacatgtgttcaatcacccataagcagtttcccatgcactgatctaaaagtgtcagaaaaccataaaggatgtgttttgcctgtgtctcgtcagaacaatgagaaaatgccacttttagaacttggaggagaaacaacccctcctttgtccacagagcgtagtccagaagctgtgggaagtgagtgtccatccagagtcctcgtccaggtcaggtccttcgtgctccccgtggagagcacccaggatgtgagctcccaggtcatcccagagagctctgaagttagagaagtgcagttgccaacttgtcacagtaatgaacctgaagtggtttccgttgcaagttgtgctcccccacaagaggaagtactgggcaatgaacactctcattgcacagcagagctcgcggcaaaatctggcccacaagtcataccgccagcatcagagaaaactctgcctattcaggctcaaagtcagggcagcagaacacccctgatggctgaatccagtcccaccaactctcccagcagcggaaatcacttagccactcctcaaaggccagatcagactgttacaaatggccaggatagccctgccagccttttgaacatttctgctggtagtgatgatagtgtatttgattcttcttctgatatggaaaaattcactgaaattataaaacagatggatagcgcagtttgtatgcccatgaaaagaaagaaggccaggatgccaaactctcctgctcctcactttgccatgcctcctattcacgaagaccatttagaaaaggtgtttgatcccaaagtgtttacctttggtttggggaagaagaaggaaagtcagccagaaatgtcaccggctttacatttgatgcagaaccttgacacaaaatccaaactgagacccaaacgtgcatctgctgaacagagcgtcctcttcaagtccctgcacaccaacactaatgggaacagtgagcctctggtgatgccggaaatcaatgacaaagagaacagggacgtcacaaatggtggcattaagagatcgagactagaaaaaagtgcacttttctcaagcttgttatcttctttaccacaagacaaaatcttttctccttctgtgacatcagtcaacactatgaccacggctttcagtacttctcagaacggttccctatctcagtcttcagtgtcacagcccacgactgagggtgccccgccctgtggtttgaacaaagaacagtcaaatcttctgcccgacaactccttaaaggtcttcaatttcaactcgtcaagtacatcacactccagtttgaaaagtccaagccacatggaaaaatacccgcaaaaagagaaaaccaaagaagatctggattcacgaagcaacctacacttgccagaaactaaattttctgaattgtcaaaactgaagaatgatgatatggaaaaggctaatcatattgaaagtgttattaaatcaaacttgccaaactgtgcaaacagtgacaccgacttcatgggtcttttcaaatcaagccggtatgacccaagcatttctttttctggaatgtcattatcagacacaatgacacttagaggaagtgtccaaaataaactcaatccccgacctggaaaggtagtgatatatagtgaacccgacgtctctgagaagtgcattgaagttttcagtgacattcaggattgcagttcttggagcctctctccagtgatactcataaaagttgttagaggatgttggattttgtatgagcaaccaaattttgaagggcactccatccccttagaagaaggagaattggaactctctggtctctggggtatagaagacattttggaaaggcacgaagaagcagagtctgataagccagtggtgattggttccatcagacatgtggttcaggattacagagttagtcacattgacttatttactgaaccagaagggttaggaatcctaagttcctactttgatgatactgaagaaatgcagggatttggtgtaatgcagaagacttgttccatgaaagtacattggggcacgtggctgatttatgaagaacctggatttcagggtgttcctttcatcctggaacctggtgaataccctgacttgtccttctgggatacagaagaagcgtacattggatccatgcggcctctgaaaatgggtggccgtaaagttgaattccctacagatccaaaggtagttgtttatgaaaagcctttctttgaaggaaaatgtgtggaactagaaacaggaatgtgtagttttgtcatggagggaggtgaaacagaagaggcgactggagacgatcatttgccgtttacgtcagtggggtctatgaaagttctaagaggcatttgggttgcatatgagaaacctggatttaccggtcatcagtatttgctagaagaaggagaatacagggactggaaagcctggggaggttacaatggagagcttcagtctttacgacctatattaggtgatttttcaaatgctcacatgataatgtacagtgaaaaaaactttggatccaaaggttccagtattgatgtattgggaattgttgctaatttaaaggagactggatatggagtgaagacacagtctattaatgtactgagtggagtatgggtagcctatgaaaatcctgacttcacaggagaacagtatatactggataaaggattttataccagttttgaggactggggaggcaaaaattgtaagatctcttctgttcaacctatatgtttggattctttcactggcccaaggagacgaaatcagattcacttgttttcagaaccacagtttcaaggtcacagtcaaagttttgaagaaacaacaagtcaaattgatgattcattttctaccaagtcttgcagagtttcaggaggcagctgggttgtatatgatggagaaaatttcactggtaatcaatacgtgttggaagaaggccattatccttgtctgtctgcaatgggatgcccgcctggagcaactttcaagtctcttcgttttatagatgttgaattttctgaaccaacaattattctctttgaaagagaagacttcaaaggaaaaaagattgaacttaatgcagaaactgtcaatctccgatccctgggattcaacacacaaatacgctctgttcaggttattggtggcatatgggttacttatgaatatggcagttacagagggcgacagttcctattgtcacctgcagaagtacctaattggtatgaattcagtggctgtcgccaaataggttctctacgaccttttgttcagaagcgaatttatttcagacttcgaaacaaagcaacagggttattcatgtcaaccaatggaaacttagaggatctgaagcttctgaggatacaggtcatggaggatgtcggggccgatgatcagatttggatctatcaagaaggatgtatcaaatgcaggatagcagaagactgctgcctgacgattgtgggcagcctggtaacatctggctccaagctaggcctggccctggaccagaatgctgacagccagttctggagcttgaagtccgatggcaggatttacagcaagttgaagccaaatttagttttagacattaaagggggcacacagtatgatcaaaatcacattatcctcaacactgtcagcaaagagaagtttacacaagtgtgggaagccatggtcctatatacctgaacaaagaaggaagaagaatcttctggaggtccttccagccaccttatttcttaaaaaggacaatgctgatggaagaccagactggaaagtggatcgactcctccttcattgattctaaattcaaccttaaatcatgctgccatgactcagagaacttactcatcgtttcaaaagactatcatagctttaaaccaataatttgtcctcctttcatttcttgcctttcatttttggtagctgcttaaacaggttgcctaattagcagcttttgggtgattttgtaaaatgttatatcaagatttcaagactgtgtacattttaaattatttccaaagatagtgacaggagagaactggaacaaatttaccaactttgtggacctacaaagcccttacactttaaagggtaagacaaaggcttaagtttgaaaggtagagaactgtttagcatctgagaagaaatactttattaggcctgtaattttggttcttggccttaaacactttctggaacctttaaatatgctgcatagcacaatgggaaagccttaggtattcacacatttaaggaactctaaacaaaatactattttcctttagttcatattaaaaattaatacattttaaaaatttaatgtcaaagtctggtaacatttgttagtaggatttgagttattattttttgagacaggatctcaggctggagtgcagtggcacaatcacggctcactgcagcctctacctccccaggctcaggtgatcctcccacctcagcctcccaagtagctgggactataggcacacatcaccaagcccagccaaattttgttttttttttgtagagatggggtttcatcacgttgcccaggctgatctcgaacctctgggctcaagcaattcactcgcctcggcctcccaaaatgctgggattacaggcctgagccactgcgcccagccaggatttgaattattttaactcatccatgggctgccctagaatgtcacaaatgagggttgtttaatgcctttcttatagctgctactggaacactattatgacctaatttatgagccatccttactcatctacaagtgctgaagcaatgttacatacttttttgctaaactcagattttttagcctaatttcttgtcctcctatccacctgcatccacacatggcctgcatggggctgccttccctgcagtgttctgcagccatgcttcagggtatagctgttggtggacagcctcaggtcttgggggcactatagccactaaacgaggtgtgaaaggctcaagaggatgaccagcaattaattatccccagaaagtgaaggaaaagagacctttagggatgttgctggtcaagtcttgatttgaccggagtcaaatcaatcttcaagcaatcttggaatcctcaactgcagtaagcatttcaaaatgcaaacaaactgcttaacaactgacaagacaccagcccatacgctgctcttccaacagtgggttctagctttgaacaaaagtgctaaacatttccttgaatatattcttcctctttttgtcctcatcactcaatactggtgctcttgtcacaggtagaacagcttgtttcttttccatctattcaagtgtgtttctaattctaaaatgctgatcttctctggagtctatggtaggcaattatggtcactggaatagtttgtcttgttttaaaatattattggtgcatgtacaacagcatccaacatatctgtcttgttcctagatatatagctctgattttaggccttttgtgcataccattacaatatggtggggtaagacattctacagtagcctgtgctgaactgatctcttaaataaacttgcttctggttaactatg

SEQ ID NO: 530 - DNA, 1032 bp, Homo sapiens
  source 1..1032: mol_type = unassigned DNA
gagagttaaaccgaagggaatggtagagacggcaaccccgggcctgtgcccagctgaaggatgaactgagggcaggatcgttaaatgcagaagccgaagacagtggcctgggagaatctgggtccagagatgtcagctcttggaactgctttttcaagagaaggtggccgtaaagttgaattccctacagatccaaaggtagttgtttatgaaaagcctttctttgaaggaaaatgtgtggaactagaaacaggaatgtgtagttttgtcatggagggaggtgaaacagaagaggcgactggagacgatcatttgccgtttacgtcagtggggtctatgaaagttctaagaggcatttgggttgcatatgagaaacctggatttaccggtcatcagtatttgctagaagaaggagaatacagggactggaaagcctggggaggttacaatggagagcttcagtctttacgacctatattaggtgatttttcaaatgctcacatgataatgtacagtgaaaaaaactttggatccaaaggttccagtattgatgtattgggaattgttgctaatttaaaggagactggatatggagtgaagacacagtctattaatgtactgagtggagtatgggtagcctatgaaaatcctgacttcacaggagaacagtatatactggataaaggattttataccagttttgaggactggggaggcaaaaattgtaagatctcttctgttcaacctatatgtttggattctttcactggcccaaggagacgaaatcagattcacttgttttcagaaccacagtttcaaggtcacagtcaaagttttgaagaaacaacaagtcaaattgatgattcattttctaccaagtcttgcagagtttcaggaggcagctgggttgtatatgatggagaaaatttcactggtaatcaatacgtgttggaagaaggccattatccttgtctgtctgcaatgggatgcccgcctggagcaactttcaagtctcttcgttttatagatgtt

SEQ ID NO: 531 - DNA, 2355 bp, Homo sapiens
  source 1..2355: mol_type = unassigned DNA
tggtagagacggcaaccccgggcctgtgcccagctgaaggatgaactgagggcaggatcgttaaatgcagaagccgaagacagtggcctgggagaatctgggtccagagatgtcagctcttggaactgctttttcaagagaaggtggccgtaaagttgaattccctacagatccaaaggtagttgtttatgaaaagcctttctttgaaggaaaatgtgtggaactagaaacaggaatgtgtagttttgtcatggagggaggtgaaacagaagaggcgactggagacgatcatttgccgtttacgtcagtggggtctatgaaagttctaagaggcatttgggttgcatatgagaaacctggatttaccggtcatcagtatttgctagaagaaggagaatacagggactggaaagcctggggaggttacaatggagagcttcagtctttacgacctatattaggtgatttttcaaatgctcacatgataatgtacagtgaaaaaaactttggatccaaaggttccagtattgatgtattgggaattgttgctaatttaaaggagactggatatggagtgaagacacagtctattaatgtactgagtggagtatgggtagcctatgaaaatcctgacttcacaggagaacagtatatactggataaaggattttataccagttttgaggactggggaggcaaaaattgtaagatctcttctgttcaacctatatgtttggattctttcactggcccaaggagacgaaatcagattcacttgttttcagaaccacagtttcaaggtcacagtcaaagttttgaagaaacaacaagtcaaattgatgattcattttctaccaagtcttgcagagtttcaggaggcagctgggttgtatatgatggagaaaatttcactggtaatcaatacgtgttggaagaaggccattatccttgtctgtctgcaatgggatgcccgcctggagcaactttcaagtctcttcgttttatagatgttgaattttctgaaccaacaattattctctttgaaagagaagacttcaaaggaaaaaagattgaacttaatgcagaaactgtcaatctccgatccctgggattcaacacacaaatacgctctgttcaggttattggtggcatatgggttacttatgaatatggcagttacagagggcgacagttcctattgtcacctgcagaagtacctaattggtatgaattcagtggctgtcgccaaataggttctctacgaccttttgttcagaagcgaatttatttcagacttcgaaacaaagcaacagggttattcatgtcaaccaatggaaacttagaggatctgaagcttctgaggatacaggtcatggaggatgtcggggccgatgatcagatttggatctatcaagaaggatgtatcaaatgcaggatagcagaagactgctgcctgacgattgtgggcagcctggtaacatctggctccaagctaggcctggccctggaccagaatgctgacagccagttctggagcttgaagtccgatggcaggatttacagcaagttgaagccaaatttagttttagacattaaagggggcacacagtatgatcaaaatcacattatcctcaacactgtcagcaaagagaagtttacacaagtgtgggaagccatggtcctatatacctgaacaaagaaggaagaagaatcttctggaggtccttccagccaccttatttcttaaaaaggacaatgctgatggaagaccagactggaaagtggatcgactcctccttcattgattctaaattcaaccttaaatcatgctgccatgactcagagaacttactcatcgtttcaaaagactatcatagctttaaaccaataatttgtcctcctttcatttcttgcctttcatttttggtagctgcttaaacaggttgcctaattagcagcttttgggtgattttgtaaaatgttatatcaagatttcaagactgtgtacattttaaattatttccaaagatagtgacaggagagaactggaacaaatttaccaactttgtggacctacaaagcccttacactttaaagggtaagacaaaggcttaagtttgaaaggtagagaactgtttagcatctgagaagaaatactttattaggcctgtaattttggttcttggccttaaacactttctggaacctttaaatatgctgcatagcacaatgggaaagccttaggtattcacacatttaaggaactctaaacaaaatactattttcctttagttcatattaaaaattaatacattttaaaaatttaatgtcaaagtctggtaacatttgttagta

SEQ ID NO: 532 - DNA, 594 bp, Homo sapiens
  source 1..594: mol_type = unassigned DNA
tgcacttgcactctaaggaagctgaggtgggggaggcgggaaagtccacagaggagtttaaagcagccatgccaaaagcctgaacagaaacagatggtggcccagcaggaatctatcagagaagggtttcagaagcgctgtttgccagttatggtactgaaagcaaagaagcccttcacgtttgagacccaagaaggcaagcaggagatgtttcatgctacagtggctacagaaaaggaattcttctttgtaaaagtttttaatacactgctgaaagataaattcattccaaagagaataattataatagcaagatattatcggcacagtggtttcttagaggtaaatagcgcctcacgtgtgttagatgctgaatctgaccaaaaggttaatgtcccgctgaacattatcagaaaagctggtgaaaccccgaagatcaacacgcttcaaactcagccccttggaacaattgtgaatggtttgtttgtagtccagaaggtaacagaaaagaagaaaaacatattatttgacctaagtgacaacactgggaaaatggaagtactgggggttagaaacgaggacacaatgaaatgt

SEQ ID NO: 533 - DNA, 1529 bp, Homo sapiens
  source 1..1529: mol_type = unassigned DNA
atagacattttcttctgtggctgctagtgagaacccaaaccagctcagccaattagagctccagttgtcactcctacccacactgggcctgggggtgaagggaagtgtttattaggggtacatgtgaagccgtccagaagtgtcagagtctttgtagctttgaaagtcacctaggttatttgggcatgctctcctgagtcctctgctagttaagctctctgaaaagaaggtggcagacccggtttgctgatcgccccagggatcaggaggctgatcccaaagttgtcagatggagagtaaatacaaggagatactcttgctaacaggcctggataacatcactgatgaggaactggataggtttaagttctttctttcagacgagtttaatattgccacaggcaaactacatactgcaaacagaatacaagtagctaccttgatgattcaaaatgctggggcggtgtctgcagtgatgaagaccattcgtatttttcagaagttgaattatatgcttttggcaaaacgtcttcaggaggagaaggagaaagttgataagcaatacaaatcggtaacaaaaccaaagccactaagtcaagctgaaatgagtcctgctgcatctgcagccatcagaaatgatgtcgcaaagcaacgtgctgcaccaaaagtctctcctcatgttaagcctgaacagaaacagatggtggcccagcaggaatctatcagagaagggtttcagaagcgctgtttgccagttatggtactgaaagcaaagaagcccttcacgtttgagacccaagaaggcaagcaggagatgtttcatgctacagtggctacagaaaaggaattcttctttgtaaaagtttttaatacactgctgaaagataaattcattccaaagagaataattataatagcaagatattatcggcacagtggtttcttagaggtaaatagcgcctcacgtgtgttagatgctgaatctgaccaaaaggttaatgtcccgctgaacattatcagaaaagctggtgaaaccccgaagatcaacacgcttcaaactcagccccttggaacaattgtgaatggtttgtttgtagtccagaaggtaacagaaaagaagaaaaacatattatttgacctaagtgacaacactgggaaaatggaagtactgggggttagaaacgaggacacaatgaaatgtaaggaaggagataaggttcgacttacattcttcacactgtcaaaaaatggagaaaaactacagctgacatctggagttcatagcaccataaaggttattaaggccaaaaaaaaaacatagagaagtaaaaaggaccaattcaagccaactggtctaagcagcatttaattgaagaatatgtgatacagcctcttcaatcagattgtaagttacctgaaagctgcagttcacaggctcctctctccaccaaattaggatagaataattgctggataaacaaattcagaatatcaacagatgatcacaataaacatctgtttctcattca

SEQ ID NO: 534 - DNA, 832 bp, Homo sapiens
  source 1..832: mol_type = unassigned DNA
aatataggtgtgttgtagagtcaggcagaacccagaacgtctggagatgaatgtagggaagaaggaaggaccagcaagttcttccaggctggagtacgatggcgcaatctccgctcactgcaatctccactgactacaacctccgcctcccgggttcaagtgattatcctgcctcagcctcctgagtagctgggattacagatacttaactatcaggaaacatttacagatgaagaaagaagaacatctgaacacagactgagcttactggatattgatgccagtggcaatattggcaaacaaatcttgaagatagatggccagagaaatgatggaaactgtgtctgagtcactgcttggaagagagccaccaaaccaggagcacttacatccgactggaatgctgatcccaaagttgtcagatggagagtaaatacaaggagatactcttgctaacaggcctggataacatcactgatgaggaactggataggtttaagttctttctttcagacgagtttaatattgccacaggcaaactacatactgcaaacagaatacaagtagctaccttgatgattcaaaatgctggggcggtgtctgcagtgatgaagaccattcgtatttttcagaagttgaattatatgcttttggcaaaacgtcttcaggaggagaaggagaaagttgataagcaatacaaatcggtaacaaaaccaaagccactaagtcaagctgaaatgagtcctgctgcatctgcagccatcagaaatgatgtcgcaaagcaacgtgctgcaccaaaagtctctcctcatgttaagcctgaacagaaaca

SEQ ID NO: 535 - DNA, 3046 bp, Homo sapiens
  source 1..3046: mol_type = unassigned DNA
ttgttccccgccgccgccgtcgctgacccagcccgccaggcgctcctgaccgtcgcttcctccggtcccaggtccccggccctcgcctcagccccggcccctggtccccagccctcgtcgcagccccggccgcccgccgccgccatgtccaaggaggagcgccccggtcgggaggagatcctggagtgccaggtgatgtgggagcctgacagtaagaagaacacgcagatggaccgcttccgggcggctgtgggcgccgcctgcggcctggcgctggagagttatgatgacttgtaccattggtccgttgagtcatattcagacttctgggcagagttctggaaattcagtggaattgtcttctcacgtgtgtatgatgaggttgtggacacatcgaaaggaatcgcagatgtccccgagtggttcaaaggcagtcggctcaactatgcagaaaacctcctgcggcacaaagagaatgacagagttgccctttacattgcaagggaaggcaaagaggaaattgtgaaggtgacttttgaagagctgaggcaagaagtggctttgtttgcagcagcaatgaggaaaatgggtgtgaagaaaggagatcgggttgttggttatttacccaacagtgagcacgctgtcgaggcgatgctggctgcggcaagcattggtgccatctggagctccacgtccccggacttcggtgtgaatggtgtgctggaccggttttctcaaattcagccaaagctcatcttctctgtggaggctgttgtctataatggcaaagagcacaaccacatggaaaagctgcagcaggtggttaaaggcctaccagacttgaagaaagtggtggtgattccttatgtgtcctccagagagaacatagacctttcaaagattccaaacagtgtgtttctggatgactttcttgccaccggcaccagtgagcaggccccgcagctggagttcgagcagctgcccttcagccacccactgttcatcatgttctcatcgggcaccacgggcgcacccaagtgcatggtgcattccgctgggggcaccctcatccagcatctgaaggagcacctgctgcacggcaacatgaccagcagtgacatcctcctgtgctacaccacggtcggctggatgatgtggaactggatggtgtcccttctggccacaggagcggccatggtcttgtacgatggctcccccctggtgcccacgcccaatgtgctctgggacctggttgacaggataggcatcactgtcctggtaactggggccaagtggctgtcagtgctggaagagaaggccatgaagccggtggaaacccacagtctccagatgctccacacgatcctgtccactggctccccactgaaagcccagagctacgagtatgtctacaggtgcatcaagagcagcatcctcctgggctccatctcaggaggcaccgacatcatctcctgcttcatgggccacaatttttctcttcctgtgtataaaggggagattcaggcccggaacctgggcatggccgtggaagcgtggaacgaggaaggaaaggcggtctggggagagagcggcgagctggtgtgtactaagccgatcccttgccagcccacacacttctggaacgatgagaacggcaacaagtacaggaaggcgtatttctccaaattcccaggtatctgggctcatggcgactactgcagaatcaaccccaagaccgggggcatcgtcatgcttggccggagtgacggcaccctcaaccccaacggggtgcggttcggcagctcggaaatctataacattgtatacgctcaacggcaagaaagtggaagttgccgtcaaacagatcatcgctggaaaagccgtggagcaaggaggtgctttctcgaaccccgagaccctggatctgtaccgggacatccctgagctgcagggcttctgagtcagactggctggcgtgtcactcagccgcacccgtgtgcactgtaacttttgtgtgctcaagaaattatacagaaacctacagctgttgtaaaaggatgctcgcaccaagtgttctgtaggcttggggagggatcgtttctctgttttgttaaatctggtgggtacctggatcttccacacgagtgggattctggccttcagagaccaggagggagtgtctgggccgcaggtgtggcactgtggtgagagtgtgtgtctttgcacacacagtgcagcgggaacggtggggctggctggtgctgaagacagacacactcctgagccaaggtcttgtcttcaacctccccgtcccgttgtcccattttgctctgtgaaggtgcaaatccctttcttcccttcccatctcaggctctcctgttttccctcagggtccagtatgcctttgagctttagctgttagaaaggaacccccgtgacttgacacagctttcacagctggctgctaggaccggcgggctgggtgttcacgtgtgtctgtgtcatggatgcaatgcaggccctggaggactgtgcgtcacccgtcaaccagagcgtgcctccgggccagcttccctccaaggaatgagtggatttcatacaggatctctttattgcacagactgaatggctttacatgtttctaatgtgaattaggcatgtgaagcagtgggtgtccacccgtgtccctcatgggtgagccctccagctgtgagcccaggcagtgtggtcaccgagtgaggaccctcctcaccaggaaccgcatccctgtgctgcctccacctgagagttgctagggggttcttgtcgagatcatgtcatcagcacccctaagtcaagtcacgggtttccatagccaggcagttggtatgtacaattcagttcagcgtatgaacttgtatctctaatctgatgtccatttttatattttttgaaactgagcacaatgaaatcctttcttgaatcattttccttttggattataaaaatatgggggaaagtgctatgatgaattttatgcaataaatgtatacatgtgtgcacatgc

SEQ ID NO: 536 - DNA, 3316 bp, Homo sapiens
  source 1..3316: mol_type = unassigned DNA
ggcctgcggggcggggcctgggccaagcggcccgcaggaggcggcggcggccgttcagtcccttgttccccgccgccgccgtcgctgacccagcccgccaggcgctcctgaccgtcgcttcctccggtcccaggtccccggccctcgcctcagccccggcccctggtccccagccctcgtcgcagccccggccgcccgccgccgccatgtccaaggaggagcgccccggtcgggaggagatcctggagtgccaggtgatgtgggagcctgacagtaagaagaacacgcagatggaccgcttccgggcggctgtgggcgccgcctgcggcctggcgctggagagttatgatgacttgtaccattggtccgttgagtcatattcagacttctgggcagagttctggaaattcagtggaattgtcttctcacgtgtgtatgatgaggttgtggacacatcgaaaggaatcgcagatgtccccgagtggttcaaaggcagtcggctcaactatgcagaaaacctcctgcggcacaaagagaatgacagagttgccctttacattgcaagggaaggcaaagaggaaattgtgaaggtgacttttgaagagctgaggcaagaagtggctttgtttgcagcagcaatgaggaaaatgggtgtgaagaaaggagatcgggttgttggttatttacccaacagtgagcacgctgtcgaggcgatgctggctgcggcaagcattggtgccatctggagctccacgtccccggacttcggtgtgaatggtgtgctggaccggttttctcaaattcagccaaagctcatcttctctgtggaggctgttgtctataatggcaaagagcacaaccacatggaaaagctgcagcaggtggttaaaggcctaccagacttgaagaaagtggtggtgattccttatgtgtcctccagagagaacatagacctttcaaagattccaaacagtgtgtttctggatgactttcttgccaccggcaccagtgagcaggccccgcagctggagttcgagcagctgcccttcagccacccactgttcatcatgttctcatcgggcaccacgggcgcacccaagtgcatggtgcattccgctgggggcaccctcatccagcatctgaaggagcacctgctgcacggcaacatgaccagcagtgacatcctcctgtgctacaccacggtcggctggatgatgtggaactggatggtgtcccttctggccacaggagcggccatggtcttgtacgatggctcccccctggtgcccacgcccaatgtgctctgggacctggttgacaggataggcatcactgtcctggtaactggggccaagtggctgtcagtgctggaagagaaggccatgaagccggtggaaacccacagtctccagatgctccacacgatcctgtccactggctccccactgaaagcccagagctacgagtatgtctacaggtgcatcaagagcagcatcctcctgggctccatctcaggaggcaccgacatcatctcctgcttcatgggccacaatttttctcttcctgtgtataaaggggagattcaggcccggaacctgggcatggccgtggaagcgtggaacgaggaaggaaaggcggtctggggagagagcggcgagctggtgtgtactaagccgatcccttgccagcccacacacttctggaacgatgagaacggcaacaagtacaggaaggcgtatttctccaaattcccaggtatctgggctcatggcgactactgcagaatcaaccccaagaccgggggcatcgtcatgcttggccggagtgacggcaccctcaaccccaacggggtgcggttcggcagctcggaaatctataacattgtggaatccttcgaggaggtggaggacagcctgtgtgtcccccagtataacaagtacagggaggagagggtgatcctcttcctgaagatggcctccgggcacgccttccagcctgacttggttaagaggatccgtgacgccatccgcatgggcttgtctgcgcgacacgtgcccagcctcatcctggaaaccaagggcatcccgtatacgctcaacggcaagaaagtggaagttgccgtcaaacagatcatcgctggaaaagccgtggagcaaggaggtgctttctcgaaccccgagaccctggatctgtaccgggacatccctgagctgcagggcttctgagtcagactggctggcgtgtcactcagccgcacccgtgtgcactgtaacttttgtgtgctcaagaaattatacagaaacctacagctgttgtaaaaggatgctcgcaccaagtgttctgtaggcttggggagggatcgtttctctgttttgttaaatctggtgggtacctggatcttccacacgagtgggattctggccttcagagaccaggagggagtgtctgggccgcaggtgtggcactgtggtgagagtgtgtgtctttgcacacacagtgcagcgggaacggtggggctggctggtgctgaagacagacacactcctgagccaaggtcttgtcttcaacctccccgtcccgttgtcccattttgctctgtgaaggtgcaaatccctttcttcccttcccatctcaggctctcctgttttccctcagggtccagtatgcctttgagctttagctgttagaaaggaacccccgtgacttgacacagctttcacagctggctgctaggaccggcgggctgggtgttcacgtgtgtctgtgtcatggatgcaatgcaggccctggaggactgtgcgtcacccgtcaaccagagcgtgcctccgggccagcttccctccaaggaatgagtggatttcatacaggatctctttattgcacagactgaatggctttacatgtttctaatgtgaattaggcatgtgaagcagtgggtgtccacccgtgtccctcatgggtgagccctccagctgtgagcccaggcagtgtggtcaccgagtgaggaccctcctcaccaggaaccgcatccctgtgctgcctccacctgagagttgctagggggttcttgtcgagatcatgtcatcagcacccctaagtcaagtcacgggtttccatagccaggcagttggtatgtacaattcagttcagcgtatgaacttgtatctctaatctgatgtccatttttatattttttgaaactgagcacaatgaaatcctttcttgaatcattttccttttggattataaaaatatgggggaaagtgctatgatgaattttatgcaataaatgtatacatgtgtgcacatgcaccca

SEQ ID NO: 537 - DNA, 2279 bp, Homo sapiens
  source 1..2279: mol_type = unassigned DNA
gacacatcgaaaggaatcgcagatgtccccgagtggttcaaaggcagtcggctcaactatgcagaaaacctcctgcggcacaaagagaatgacagagttgccctttacattgcaagggaaggcaaagaggaaattgtgaaggtgacttttgaagagctgaggcaagaagtggctttgtttgcagcagcaatgaggaaaatgggtgtgaagaaaggagatcgggttgttggttatttacccaacagtgagcacgctgtcgaggcgatgctggctgcggcaagcattggtgccatctggagctccacgtccccggacttcggtgtgaatggtgtgctggaccggttttctcaaattcagccaaagctcatcttctctgtggaggctgttgtctataatggcaaagagcacaaccacatggaaaagctgcagcaggtggttaaaggcctaccagacttgaagaaagtggtggtgattccttatgtgtcctccagagagaacatagacctttcaaagattccaaacagtgtgtttctggatgactttcttgccaccggcaccagtgagcaggccccgcagctggagttcgagcagctgcccttcagccacccactgttcatcatgttctcatcgggcaccacgggcgcacccaagtgcatggtgcattccgctgggggcaccctcatccagcatctgaaggagcacctgctgcacggcaacatgaccagcagtgacatcctcctgtgctacaccacggtcggctggatgatgtggaactggatggtgtcccttctggccacaggagcggccatggtcttgtacgatggctcccccctggtgcccacgcccaatgtgctctgggacctggttgacaggatagggtatctgggctcatggcgactactgcagaatcaaccccaagaccgggggcatcgtcatgcttggccggagtgacggcaccctcaaccccaacggggtgcggttcggcagctcggaaatctataacattgtggaatccttcgaggaggtggaggacagcctgtgtgtcccccagtataacaagtacagggaggagagggtgatcctcttcctgaagatggcctccgggcacgccttccagcctgacttggttaagaggatccgtgacgccatccgcatgggcttgtctgcgcgacacgtgcccagcctcatcctggaaaccaagggcatcccgtatacgctcaacggcaagaaagtggaagttgccgtcaaacagatcatcgctggaaaagccgtggagcaaggaggtgctttctcgaaccccgagaccctggatctgtaccgggacatccctgagctgcagggcttctgagtcagactggctggcgtgtcactcagccgcacccgtgtgcactgtaacttttgtgtgctcaagaaattatacagaaacctacagctgttgtaaaaggatgctcgcaccaagtgttctgtaggcttggggagggatcgtttctctgttttgttaaatctggtgggtacctggatcttccacacgagtgggattctggccttcagagaccaggagggagtgtctgggccgcaggtgtggcactgtggtgagagtgtgtgtctttgcacacacagtgcagcgggaacggtggggctggctggtgctgaagacagacacactcctgagccaaggtcttgtcttcaacctccccgtcccgttgtcccattttgctctgtgaaggtgcaaatccctttcttcccttcccatctcaggctctcctgttttccctcagggtccagtatgcctttgagctttagctgttagaaaggaatgagtggatttcatacaggatctctttattgcacagactgaatggctttacatgtttctaatgtgaattaggcatgtgaagcagtgggtgtccacccgtgtccctcatgggtgagccctccagctgtgagcccaggcagtgtggtcaccgagtgaggaccctcctcaccaggaaccgcatccctgtgctgcctccacctgagagttgctagggggttcttgtcgagatcatgtcatcagcacccctaagtcaagtcacgggtttccatagccaggcagttggtatgtacaattcagttcagcgtatgaacttgtatctctaatctgatgtccatttttatattttttgaaactgagcacaatgaaatcctttcttgaatcattttccttttggattataaaaatatgggggaaagtgctatgatgaattttatgcaataaatgtatacatgtgtgcacatgc

SEQ ID NO: 538 - DNA, 2172 bp, Homo sapiens
  source 1..2172: mol_type = unassigned DNA
gtcagagtcggctcagcctgcgccggggaacatcggccgcctccagctcccggcgcggcccggcccggcccggctcggccgcctcagacgccgcctgccctgcagccatgaggcccccgcagtgtctgctgcacacgccttccctggcttccccactccttctcctcctcctctggctcctgggtggaggagtgggggctgagggccgggaggatgcagagctgctggtgacggtgcgtgggggccggctgcggggcattcgcctgaagacccccgggggccctgtctctgctttcctgggcatcccctttgcggagccacccatgggaccccgtcgctttctgccaccggagcccaagcagccttggtcaggggtggtagacgctacaaccttccagagtgtctgctaccaatatgtggacaccctatacccaggttttgagggcaccgagatgtggaaccccaaccgtgagctgagcgaggactgcctgtacctcaacgtgtggacaccatacccccggcctacatcccccacccctgtcctcgtctggatctatgggggtggcttctacagtggggcctcctccttggacgtgtacgatggccgcttcttggtacaggccgagaggactgtgctggtgtccatgaactaccgggtgggagcctttggcttcctggccctgccggggagccgagaggccccgggcaatgtgggtctcctggatcagaggctggccctgcagtgggtgcaggagaacgtggcagccttcgggggtgacccgacatcagtgacgctgtttggggagagcgcgggagccgcctcggtgggcatgcacctgctgtccccgcccagccggggcctgttccacagggccgtgctgcagagcggtgcccccaatggaccctgggccacggtgggcatgggagaggcccgtcgcagggccacgcagctggcccaccttgtgggctgtcctccaggcggcactggtgggaatgacacagagctggtagcctgccttcggacacgaccagcgcaggtcctggtgaaccacgaatggcacgtgctgcctcaagaaagcgtcttccggttctccttcgtgcctgtggtagatggagacttcctcagtgacaccccagaggccctcatcaacgcgggagacttccacggcctgcaggtgctggtgggtgtggtgaaggatgagggctcgtattttctggtttacggggccccaggcttcagcaaagacaacgagtctctcatcagccgggccgagttcctggccggggtgcgggtcggggttccccaggtaagtgacctggcagccgaggctgtggtcctgcattacacagactggctgcatcccgaggacccggcacgcctgagggaggccctgagcgatgtggtgggcgaccacaatgtcgtgtgccccgtggcccagctggctgggcgactggctgcccagggtgcccgggtctacgcctacgtctttgaacaccgtgcttccacgctctcctggcccctgtggatgggggtgccccacggctacgagatcgagttcatctttgggatccccctggacccctctcgaaactacacggcagaggagaaaatcttcgcccagcgactgatgcgatactgggccaactttgcccgcacaggggatcccaatgagccccgagaccccaaggccccacaatggcccccgtacacggcgggggctcagcagtacgttagtctggacctgcggccgctggaggtgcggcgggggctgcgcgcccaggcctgcgccttctggaaccgcttcctccccaaattgctcagcgccaccgacacgctcgacgaggcggagcgccagtggaaggccgagttccaccgctggagctcctacatggtgcactggaagaaccagttcgaccactacagcaagcaggatcgctgctcagacctgtgaccccggcgggacccccatgtcctccgctccgcccggccccctagctgtatatactatttatttcagggctgggctataacacagacgagccccagactctgcccatccccaccccaccccgacgtcccccggggctcccggtcctctgcatgtctcaggctgagctccctcccccgcggtgccttcgcccctctgggctgccaataaactgttacagcca

SEQ ID NO: 539 - DNA, 2956 bp, Homo sapiens
  source 1..2956: mol_type = unassigned DNA
ggggtgtgtgcggggggccggaggcggcggctgtcagagtcggctcagcctgcgccggggaacatcggccgcctccagctcccggcgcggcccggcccggcccggctcggccgcctcagacgccgcctgccctgcagccatgaggcccccgcagtgtctgctgcacacgccttccctggcttccccactccttctcctcctcctctggctcctgggtggaggagtgggggctgagggccgggaggatgcagagctgctggtgacggtgcgtgggggccggctgcggggcattcgcctgaagacccccgggggccctgtctctgctttcctgggcatcccctttgcggagccacccatgggaccccgtcgctttctgccaccggagcccaagcagccttggtcaggggtggtagacgctacaaccttccagagtgtctgctaccaatatgtggacaccctatacccaggttttgagggcaccgagatgtggaaccccaaccgtgagctgagcgaggactgcctgtacctcaacgtgtggacaccatacccccggcctacatcccccacccctgtcctcgtctggatctatgggggtggcttctacagtggggcctcctccttggacgtgtacgatggccgcttcttggtacaggccgagaggactgtgctggtgtccatgaactaccgggtgggagcctttggcttcctggccctgccggggagccgagaggccccgggcaatgtgggtctcctggatcagaggctggccctgcagtgggtgcaggagaacgtggcagccttcgggggtgacccgacatcagtgacgctgtttggggagagcgcgggagccgcctcggtgggcatgcacctgctgtccccgcccagccggggcctgttccacagggccgtgctgcagagcggtgcccccaatggaccctgggccacggtgggcatgggagaggcccgtcgcagggccacgcagctggcccaccttgtgggctgtcctccaggcggcactggtgggaatgacacagagctggtagcctgccttcggacacgaccagcgcaggtcctggtgaaccacgaatggcacgtgctgcctcaagaaagcgtcttccggttctccttcgtgcctgtggtagatggagacttcctcagtgacaccccagaggccctcatcaacgcgggagacttccacggcctgcaggtgctggtgggtgtggtgaaggatgagggctcgtattttctggtttacggggccccaggcttcagcaaagacaacgagtctctcatcagccgggccgagttcctggccggggtgcgggtcggggttccccaggtaagtgacctggcagccgaggctgtggtcctgcattacacagactggctgcatcccgaggacccggcacgcctgagggaggccctgagcgatgtggtgggcgaccacaatgtcgtgtgccccgtggcccagctggctgggcgactggctgcccagggtgcccgggtctacgcctacgtctttgaacaccgtgcttccacgctctcctggcccctgtggatgggggtgccccacggctacgagatcgagttcatctttgggatccccctggacccctctcgaaactacacggcagaggagaaaatcttcgcccagcgactgatgcgatactgggccaactttgcccgcacaggggatcccaatgagccccgagaccccaaggccccacaatggcccccgtacacggcgggggctcagcagtacgttagtctggacctgcggccgctggaggtgcggcgggggctgcgcgcccaggcctgcgccttctggaaccgcttcctccccaaattgctcagcgccaccgcctcggaggctcccagcacctgcccaggcttcacccatggggaggctgctccgaggcccggcctccccctgcccctcctcctcctccaccagcttctcctcctcttcctctcccacctccggcggctgtgaacacggcctcttcccctacggccacaggggcccctcctctaatgagtggtcggaccgtggggaagggccccactcagggatctcagacctagtgctcccttcctcctcaaaccgagagactcacactggacagggcaggaggagggggccgtgcctcccacccttctcagggacccccacgcctttgttgtttgaatggaaatggaaaagccagtattcttttataaaattatcttttggaacctgagcctgacattggggggaagtgggaggccccggacggggtagcaccccccattggggctataacggtcaaccatttctgtctcttctttttcccccaacctccccctcctgtcccctctgttcccgtcttccggtcattcttttctcctcctctctccttcctgctgtccttctccggccccgcctctgccctcatcctccctctcgtctttcgcacattctcctgatcctcttgccaccgtcccacgtggtcgcctgcatttctccgtgcgtcctccctgcactcatacccccccttcaacccgcccaaatgtccgatccccgaccttcctcgtgccgtcctcccctcccgcctcgctgggcgccctggccgcagacacgctcgacgaggcggagcgccagtggaaggccgagttccaccgctggagctcctacatggtgcactggaagaaccagttcgaccactacagcaagcaggatcgctgctcagacctgtgaccccggcgggacccccatgtcctccgctccgcccggccccctagctgtatatactatttatttcagggctgggctataacacagacgagccccagactctgcccatccccaccccaccccgacgtcccccggggctcccggtcctctgcatgtctcaggctgagctccctcccccgcggtgccttcgcccctctgggctgccaataaactgttacagcc

SEQ ID NO: 540 - DNA, 2179 bp, Homo sapiens
  source 1..2179: mol_type = unassigned DNA
gaacatcggccgcctccagctcccggcgcggcccggcccggcccggctcggccgcctcagcagacgccgcctgccctgcagccatgaggcccccgcagtgtctgctgcacacgccttccctggcttccccactccttctcctcctcctctggctcctgggtggaggagtgggggctgagggccgggaggatgcagagctgctggtgacggtgcgtgggggccggctgcggggcattcgcctgaagacccccgggggccctgtctctgctttcctgggcatcccctttgcggagccacccatgggaccccgtcgctttctgccaccggagcccaagcagccttggtcaggggtggtagacgctacaaccttccagagtgtctgctaccaatatgtggacaccctatacccaggttttgagggcaccgagatgtggaaccccaaccgtgagctgagcgaggactgcctgtacctcaacgtgtggacaccatacccccggcctacatcccccacccctgtcctcgtctggatctatgggggtggcttctacagtggggcctcctccttggacgtgtacgatggccgcttcttggtacaggccgagaggactgtgctggtgtccatgaactaccgggtgggagcctttggcttcctggccctgccggggagccgagaggccccgggcaatgtgggtctcctggatcagaggctggccctgcagtgggtgcaggagaacgtggcagccttcgggggtgacccgacatcagtgacgctgtttggggagagcgcgggagccgcctcggtgggcatgcacctgctgtccccgcccagccggggcctgttccacagggccgtgctgcagagcggtgcccccaatggaccctgggccacggtgggcatgggagaggcccgtcgcagggccacgcagctggcccaccttgtgggctgtcctccaggcggcactggtgggaatgacacagagctggtagcctgccttcggacacgaccagcgcaggtcctggtgaaccacgaatggcacgtgctgcctcaagaaagcgtcttccggttctccttcgtgcctgtggtagatggagacttcctcagtgacaccccagaggccctcatcaacgcgggagacttccacggcctgcaggtgctggtgggtgtggtgaaggatgagggctcgtattttctggtttacggggccccaggcttcagcaaagacaacgagtctctcatcagccgggccgagttcctggccggggtgcgggtcggggttccccaggtaagtgacctggcagccgaggctgtggtcctgcattacacagactggctgcatcccgaggacccggcacgcctgagggaggccctgagcgatgtggtgggcgaccacaatgtcgtgtgccccgtggcccagctggctgggcgactggctgcccagggtgcccgggtctacgcctacgtctttgaacaccgtgcttccacgctctcctggcccctgtggatgggggtgccccacggctacgagatcgagttcatctttgggatccccctggacccctctcgaaactacacggcagaggagaaaatcttcgcccagcgactgatgcgatactgggccaactttgcccgcacaggggatcccaatgagccccgagaccccaaggccccacaatggcccccgtacacggcgggggctcagcagtacgttagtctggacctgcggccgctggaggtgcggcgggggctgcgcgcccaggcctgcgccttctggaaccgcttcctccccaaattgctcagcgccaccgcctcggaggctcccagcacctgcccaggcttcacccatggggaggctgctccgaggcccggcctccccctgcccctcctcctcctccaccagcttctcctcctcttcctctcccacctccggcggctgtgaacacggcctcttcccctacggccacaggggcccctcctctaatgagtggtcggaccgtggggaagggccccactcagggatctcagacctagtgctcccttcctcctcaaaccgagagactcacactggacagggcaggaggagggggccgtgcctcccacccttctcagggacccccacgcctttgttgtttgaatggaaatggaaaagccagtattcttttataaaattatcttttggaa

SEQ ID NO: 541 - DNA, 2218 bp, Homo sapiens
  source 1..2218: mol_type = unassigned DNA
ctctcccctcatctttgccaacctgccccacctcctctgcagctgagcgataacccttgggccgacagtgccctaatctcctccctcctggcttctcgaccgacccttcaccctttccctttctttctcccagcagacgccgcctgccctgcagccatgaggcccccgcagtgtctgctgcacacgccttccctggcttccccactccttctcctcctcctctggctcctgggtggaggagtgggggctgagggccgggaggatgcagagctgctggtgacggtgcgtgggggccggctgcggggcattcgcctgaagacccccgggggccctgtctctgctttcctgggcatcccctttgcggagccacccatgggaccccgtcgctttctgccaccggagcccaagcagccttggtcaggggtggtagacgctacaaccttccagagtgtctgctaccaatatgtggacaccctatacccaggttttgagggcaccgagatgtggaaccccaaccgtgagctgagcgaggactgcctgtacctcaacgtgtggacaccatacccccggcctacatcccccacccctgtcctcgtctggatctatgggggtggcttctacagtggggcctcctccttggacgtgtacgatggccgcttcttggtacaggccgagaggactgtgctggtgtccatgaactaccgggtgggagcctttggcttcctggccctgccggggagccgagaggccccgggcaatgtgggtctcctggatcagaggctggccctgcagtgggtgcaggagaacgtggcagccttcgggggtgacccgacatcagtgacgctgtttggggagagcgcgggagccgcctcggtgggcatgcacctgctgtccccgcccagccggggcctgttccacagggccgtgctgcagagcggtgcccccaatggaccctgggccacggtgggcatgggagaggcccgtcgcagggccacgcagctggcccaccttgtgggctgtcctccaggcggcactggtgggaatgacacagagctggtagcctgccttcggacacgaccagcgcaggtcctggtgaaccacgaatggcacgtgctgcctcaagaaagcgtcttccggttctccttcgtgcctgtggtagatggagacttcctcagtgacaccccagaggccctcatcaacgcgggagacttccacggcctgcaggtgctggtgggtgtggtgaaggatgagggctcgtattttctggtttacggggccccaggcttcagcaaagacaacgagtctctcatcagccgggccgagttcctggccggggtgcgggtcggggttccccaggtaagtgacctggcagccgaggctgtggtcctgcattacacagactggctgcatcccgaggacccggcacgcctgagggaggccctgagcgatgtggtgggcgaccacaatgtcgtgtgccccgtggcccagctggctgggcgactggctgcccagggtgcccgggtctacgcctacgtctttgaacaccgtgcttccacgctctcctggcccctgtggatgggggtgccccacggctacgagatcgagttcatctttgggatccccctggacccctctcgaaactacacggcagaggagaaaatcttcgcccagcgactgatgcgatactgggccaactttgcccgcacaggggatcccaatgagccccgagaccccaaggccccacaatggcccccgtacacggcgggggctcagcagtacgttagtctggacctgcggccgctggaggtgcggcgggggctgcgcgcccaggcctgcgccttctggaaccgcttcctccccaaattgctcagcgccaccgacacgctcgacgaggcggagcgccagtggaaggccgagttccaccgctggagctcctacatggtgcactggaagaaccagttcgaccactacagcaagcaggatcgctgctcagacctgtgaccccggcgggacccccatgtcctccgctccgcccggccccctagctgtatatactatttatttcagggctgggctataacacagacgagccccagactctgcccatccccaccccaccccgacgtcccccggggctcccggtcctctgcatgtctcaggctgagctccctcccccgcggtgccttcgcccctctgggctgccaataaactgttacag

SEQ ID NO: 542 - DNA, 1906 bp, Homo sapiens
  source 1..1906: mol_type = unassigned DNA
cagagtcggctcagcctgcgccggggaacatcggccgcctccagctcccggcgcggcccggcccggcccggctcggccgcctcagacgccgcctgccctgcagccatgaggcccccgcagtgtctgctgcacacgccttccctggcttccccactccttctcctcctcctctggctcctgggtggaggagtgggggctgagggccgggaggatgcagagctgctggtgacggtgcgtgggggccggctgcggggcattcgcctgaagacccccgggggccctgtctctgctttcctgggcatcccctttgcggagccacccatgggaccccgtcgctttctgccaccggagcccaagcagccttggtcaggggtggtagacgctacaaccttccagagtgtctgctaccaatatgtggacaccctatacccaggttttgagggcaccgagatgtggaaccccaaccgtgagctgagcgaggactgcctgtacctcaacgtgtggacaccatacccccggcctacatcccccacccctgtcctcgtctggatctatgggggtggcttctacagtggggcctcctccttggacgtgtacgatggccgcttcttggtacaggccgagaggactgtgctggtgtccatgaactaccgggtgggagcctttggcttcctggccctgccggggagccgagaggccccgggcaatgtgggtctcctggatcagaggctggccctgcagtgggtgcaggagaacgtggcagccttcgggggtgacccgacatcagtgacgctgtttggggagagcgcgggagccgcctcggtgggcatgcacctgctgtccccgcccagccggggcctgttccacagggccgtgctgcagagcggtgcccccaatggaccctgggccacggtgggcatgggagaggcccgtcgcagggccacgcagctggcccaccttgtgggctgtcctccaggcggcactggtgggaatgacacagagctggtagcctgccttcggacacgaccagcgcaggtcctggtgaaccacgaatggcacgtgctgcctcaagaaagcgtcttccggttctccttcgtgcctgtggtagatggagacttcctcagtgacaccccagaggccctcatcaacgcgggagacttccacggcctgcagctggctgggcgactggctgcccagggtgcccgggtctacgcctacgtctttgaacaccgtgcttccacgctctcctggcccctgtggatgggggtgccccacggctacgagatcgagttcatctttgggatccccctggacccctctcgaaactacacggcagaggagaaaatcttcgcccagcgactgatgcgatactgggccaactttgcccgcacaggggatcccaatgagccccgagaccccaaggccccacaatggcccccgtacacggcgggggctcagcagtacgttagtctggacctgcggccgctggaggtgcggcgggggctgcgcgcccaggcctgcgccttctggaaccgcttcctccccaaattgctcagcgccaccgacacgctcgacgaggcggagcgccagtggaaggccgagttccaccgctggagctcctacatggtgcactggaagaaccagttcgaccactacagcaagcaggatcgctgctcagacctgtgaccccggcgggacccccatgtcctccgctccgcccggccccctagctgtatatactatttatttcagggctgggctataacacagacgagccccagactctgcccatccccaccccaccccgacgtcccccggggctcccggtcctctgcatgtctcaggctgagctccctcccccgcggtgccttcgcccctctgggctgccaataaactgttacagcca

SEQ ID NO: 543 - DNA, 1942 bp, Homo sapiens
  source 1..1942: mol_type = unassigned DNA
ggggtgtgtgcggggggccggaggcggcggctgtcagagtcggctcagcctgcgccggggaacatcggccgcctccagctcccggcgcggcccggcccggcccggctcggccgcctcagacgccgcctgccctgcagccatgaggcccccgcagtgtctgctgcacacgccttccctggcttccccactccttctcctcctcctctggctcctgggtggaggagtgggggctgagggccgggaggatgcagagctgctggtgacggtgcgtgggggccggctgcggggcattcgcctgaagacccccgggggccctgtctctgctttcctgggcatcccctttgcggagccacccatgggaccccgtcgctttctgccaccggagcccaagcagccttggtcaggggtggtagacgctacaaccttccagagtgtctgctaccaatatgtggacaccctatacccaggttttgagggcaccgagatgtggaaccccaaccgtgagctgagcgaggactgcctgtacctcaacgtgtggacaccatacccccggcctacatcccccacccctgtcctcgtctggatctatgggggtggcttctacagtggggcctcctccttggacgtgtacgatggccgcttcttggtacaggccgagaggactgtgctggtgtccatgaactaccgggtgggagcctttggcttcctggccctgccggggagccgagaggccccgggcaatgtgggtctcctggatcagaggctggccctgcagtgggtgcaggagaacgtggcagccttcgggggtgacccgacatcagtgacgctgtttggggagagcgcgggagccgcctcggtgggcatgcacctgctgtccccgcccagccggggcctgttccacagggccgtgctgcagagcggtgcccccaatggaccctgggccacggtgggcatgggagaggcccgtcgcagggccacgcagctggcccaccttgtgggctgtcctccaggcggcactggtgggaatgacacagagctggtagcctgccttcggacacgaccagcgcaggtcctggtgaaccacgaatggcacgtgctgcctcaagaaagcgtcttccggttctccttcgtgcctgtggtagatggagacttcctcagtgacaccccagaggccctcatcaacgcgggagacttccacggcctgcaggtgctggtgggtgtggtgaaggatgagggctcgtattttctggtttacggggccccaggcttcagcaaagacaacgagtctctcatcagccgggccgagttcctggccggggtgcgggtcggggttccccaggtaagtgacctggcagccgaggctgtggtcctgcattacacagactggctgcatcccgaggacccggcacgcctgagggaggccctgagcgatgtggtgggcgaccacaatgtcgtgtgccccgtggcccagctggctgggcgactggctgcccagggtgcccgggtctacgcctacgtctttgaacaccgtgcttccacgctctcctggcccctgtggatgggggtgccccacggctacgagatcgagttcatctttgggatccccctggacccctctcgaaactacacggcagaggagaaaatcttcgcccagcgactgatgcgatactgggccaactttgcccgcacaggggatcccaatgagccccgagaccccaaggccccacaatggcccccgtacacggcgggggctcagcagtacgttagtctggacctgcggccgctggaggtgcggcgggggctgcgcgcccaggcctgcgccttctggaaccgcttcctccccaaattgctcagcgccaccggtatgcaggggccagcgggcagcgggaggaggggagtgggagcccgctgtaacccctctcttctccccctagcctcggag

SEQ ID NO: 544 - DNA, 2159 bp, Homo sapiens
  source 1..2159: mol_type = unassigned DNA
tctactccgccgctgcaggtctttgggtcgcgtctgtcactgcgctctgtcgtcggtcggcgtctggcactggaacgccgcctgccctgcagccatgaggcccccgcagtgtctgctgcacacgccttccctggcttccccactccttctcctcctcctctggctcctgggtggaggagtgggggctgagggccgggaggatgcagagctgctggtgacggtgcgtgggggccggctgcggggcattcgcctgaagacccccgggggccctgtctctgctttcctgggcatcccctttgcggagccacccatgggaccccgtcgctttctgccaccggagcccaagcagccttggtcaggggtggtagacgctacaaccttccagagtgtctgctaccaatatgtggacaccctatacccaggttttgagggcaccgagatgtggaaccccaaccgtgagctgagcgaggactgcctgtacctcaacgtgtggacaccatacccccggcctacatcccccacccctgtcctcgtctggatctatgggggtggcttctacagtggggcctcctccttggacgtgtacgatggccgcttcttggtacaggccgagaggactgtgctggtgtccatgaactaccgggtgggagcctttggcttcctggccctgccggggagccgagaggccccgggcaatgtgggtctcctggatcagaggctggccctgcagtgggtgcaggagaacgtggcagccttcgggggtgacccgacatcagtgacgctgtttggggagagcgcgggagccgcctcggtgggcatgcacctgctgtccccgcccagccggggcctgttccacagggccgtgctgcagagcggtgcccccaatggaccctgggccacggtgggcatgggagaggcccgtcgcagggccacgcagctggcccaccttgtgggctgtcctccaggcggcactggtgggaatgacacagagctggtagcctgccttcggacacgaccagcgcaggtcctggtgaaccacgaatggcacgtgctgcctcaagaaagcgtcttccggttctccttcgtgcctgtggtagatggagacttcctcagtgacaccccagaggccctcatcaacgcgggagacttccacggcctgcaggtgctggtgggtgtggtgaaggatgagggctcgtattttctggtttacggggccccaggcttcagcaaagacaacgagtctctcatcagccgggccgagttcctggccggggtgcgggtcggggttccccaggtaagtgacctggcagccgaggctgtggtcctgcattacacagactggctgcatcccgaggacccggcacgcctgagggaggccctgagcgatgtggtgggcgaccacaatgtcgtgtgccccgtggcccagctggctgggcgactggctgcccagggtgcccgggtctacgcctacgtctttgaacaccgtgcttccacgctctcctggcccctgtggatgggggtgccccacggctacgagatcgagttcatctttgggatccccctggacccctctcgaaactacacggcagaggagaaaatcttcgcccagcgactgatgcgatactgggccaactttgcccgcacaggggatcccaatgagccccgagaccccaaggccccacaatggcccccgtacacggcgggggctcagcagtacgttagtctggacctgcggccgctggaggtgcggcgggggctgcgcgcccaggcctgcgccttctggaaccgcttcctccccaaattgctcagcgccaccgacacgctcgacgaggcggagcgccagtggaaggccgagttccaccgctggagctcctacatggtgcactggaagaaccagttcgaccactacagcaagcaggatcgctgctcagacctgtgaccccggcgggacccccatgtcctccgctccgcccggccccctagctgtatatactatttatttcagggctgggctataacacagacgagccccagactctgcccatccccaccccaccccgacgtcccccggggctcccggtcctctgcatgtctcaggctgagctccctcccccgcggtgccttcgcccctctgggctgccaataaactgttacagcca

SEQ ID NO: 545 - DNA, 585 bp, Homo sapiens
  source 1..585: mol_type = unassigned DNA
gtccctgcgtttgtctgtgcctgtcactgcatgaggtcgtccgtctgcgcgtgtctgtctccacgggcttctgtccgtctgtctgtcacacgccgcctgccctgcagccatgaggcccccgcagtgtctgctgcacacgccttccctggcttccccactccttctcctcctcctctggctcctgggtggaggagtgggggctgagggccgggaggatgcagagctgctggtgacggtgcgtgggggccggctgcggggcattcgcctgaagacccccgggggccctgtctctgctttcctgggcatcccctttgcggagccacccatgggaccccgtcgctttctgccaccggagcccaagcagccttggtcaggggtggtagacgctacaaccttccagagtgtctgctaccaatatgtggacaccctatacccaggttttgagggcaccgagatgtggaaccccaaccgtgagctgagcgaggactgcctgtacctcaacgtgtggacaccatacccccggcctacatcccccacccctgtcctcgtctggatctatgggggtggcttctacagtggggcctc

SEQ ID NO: 546 - DNA, 153 bp, Homo sapiens
  source 1..153: mol_type = unassigned DNA
cctcgcccagcagccttgcgcgtgctaccacgctgtcctgccttctcagacgccgcctgccctgcagccatgaggcccccgcagtgtctgctgcacacgccttccctggcttccccactccttctcctcctcctctggctcctgggtggagga

SEQ ID NO: 547 - DNA, 2259 bp, Homo sapiens
  source 1..2259: mol_type = unassigned DNA
atgctaggcctggtgatgtcatgccccgaccggaccctggtgacgaaagtccgaagtcacccgtcagggaaccagcacagacccacccgcgggggttccagaagtttccactgccgccgcggagtgcctcgcccagcagccttgcgcgtgctaccacgctgtcctgccttctcagacgccgcctgccctgcagccatgaggcccccgcagtgtctgctgcacacgccttccctggcttccccactccttctcctcctcctctggctcctgggtggaggagtgggggctgagggccgggaggatgcagagctgctggtgacggtgcgtgggggccggctgcggggcattcgcctgaagacccccgggggccctgtctctgctttcctgggcatcccctttgcggagccacccatgggaccccgtcgctttctgccaccggagcccaagcagccttggtcaggggtggtagacgctacaaccttccagagtgtctgctaccaatatgtggacaccctatacccaggttttgagggcaccgagatgtggaaccccaaccgtgagctgagcgaggactgcctgtacctcaacgtgtggacaccatacccccggcctacatcccccacccctgtcctcgtctggatctatgggggtggcttctacagtggggcctcctccttggacgtgtacgatggccgcttcttggtacaggccgagaggactgtgctggtgtccatgaactaccgggtgggagcctttggcttcctggccctgccggggagccgagaggccccgggcaatgtgggtctcctggatcagaggctggccctgcagtgggtgcaggagaacgtggcagccttcgggggtgacccgacatcagtgacgctgtttggggagagcgcgggagccgcctcggtgggcatgcacctgctgtccccgcccagccggggcctgttccacagggccgtgctgcagagcggtgcccccaatggaccctgggccacggtgggcatgggagaggcccgtcgcagggccacgcagctggcccaccttgtgggctgtcctccaggcggcactggtgggaatgacacagagctggtagcctgccttcggacacgaccagcgcaggtcctggtgaaccacgaatggcacgtgctgcctcaagaaagcgtcttccggttctccttcgtgcctgtggtagatggagacttcctcagtgacaccccagaggccctcatcaacgcgggagacttccacggcctgcaggtgctggtgggtgtggtgaaggatgagggctcgtattttctggtttacggggccccaggcttcagcaaagacaacgagtctctcatcagccgggccgagttcctggccggggtgcgggtcggggttccccaggtaagtgacctggcagccgaggctgtggtcctgcattacacagactggctgcatcccgaggacccggcacgcctgagggaggccctgagcgatgtggtgggcgaccacaatgtcgtgtgccccgtggcccagctggctgggcgactggctgcccagggtgcccgggtctacgcctacgtctttgaacaccgtgcttccacgctctcctggcccctgtggatgggggtgccccacggctacgagatcgagttcatctttgggatccccctggacccctctcgaaactacacggcagaggagaaaatcttcgcccagcgactgatgcgatactgggccaactttgcccgcacaggggatcccaatgagccccgagaccccaaggccccacaatggcccccgtacacggcgggggctcagcagtacgttagtctggacctgcggccgctggaggtgcggcgggggctgcgcgcccaggcctgcgccttctggaaccgcttcctccccaaattgctcagcgccaccgacacgctcgacgaggcggagcgccagtggaaggccgagttccaccgctggagctcctacatggtgcactggaagaaccagttcgaccactacagcaagcaggatcgctgctcagacctgtgaccccggcgggacccccatgtcctccgctccgcccggccccctagctgtatatactatttatttcagggctgggctataacacagacgagccccagactctgcccatccccaccccaccccgacgtcccccggggctcccggtcctctgcatgtctcaggctgagctccctcccccgcggtgccttcgcccctctgggctgccaataaactgttacagcc

SEQ ID NO: 548 - DNA, 1761 bp, Homo sapiens
  source 1..1761: mol_type = unassigned DNA
gcggtgcccgcgccgggccgctaggggtgcggggttggggaggaggccgctagtctacgcctgtggagccgatactcagccctctgcgaccatggctgtgctggcggcacttctgcgcagcggcgcccgcagccgcagccccctgctccggaggctggtgcaggaaataagatatgtggaacggagttatgtatcaaaacccactttgaaggaagtggtcatagtaagtgctacaagaacacccattggatcttttttaggcagcctttccttgctgccagccactaagcttggttccattgcaattcagggagccattgaaaaggcagggattccaaaagaagaagtgaaagaagcatacatgggtaatgttctacaaggaggtgaaggacaagctcctacaaggcaggcagtattgggtgcaggcttacctatttctactccatgtaccaccataaacaaagtttgtgcttcaggaatgaaagccatcatgatggcctctcaaagtcttatgtgtggacatcaggatgtgatggtggcaggtgggatggagagcatgtccaatgttccatatgtaatgaacagaggatcaacaccatatggtggggtaaagcttgaagatttgattgtaaaagacgggctaactgatgtctacaataaaattcatatgggcagctgtgctgagaatacagcaaagaagctgaatattgcacgaaatgaacaggacgcttatgctattaattcttataccagaagtaaagcagcatgggaagctgggaaatttggaaatgaagttattcctgtcacagttacagtaaaaggtcaaccagatgtagtggtgaaagaagatgaagaatataaacgtgttgattttagcaaagttccaaagctgaagacagttttccagaaagaaaatggcacagtaacagctgccaatgccagtacactgaatgatggagcagctgctctggttctcatgacggcagatgcagcgaagaggctcaatgttacaccactggcaagaatagtagcatttgctgacgctgctgtagaacctattgattttccaattgctcctgtatatgctgcatctatggttcttaaagatgtgggattgaaaaaagaagatattgcaatgtgggaagtaaatgaagcctttagtctggttgtactagcaaacattaaaatgttggagattgatccccaaaaagtgaatatcaatggaggagctgtttctctgggacatccaattgggatgtctggagccaggattgttggtcatttgactcatgccttgaagcaaggagaatacggtcttgccagtatttgcaatggaggaggaggtgcttctgccatgctaattcagaagctgtagacaacctctgctatttaaggagacaaccctatgtgaccagaaggcctgctgtaatcagtgtgactactgtgggtcagcttatattcagataagctgtttcattttttattattttctatgttaacttttaaaaatcaaaatgatgaaatcccaaaacattttgaaattaaaaataaatttcttcttctgcttttttcttggtaaccttgaaaagtttgatacatttttgcattctgagtctatacttatcgaaatatggtagaaataccaatgtgtaatattagtgacttacataagtagctagaagtttccatttgtgagaacacatttatatttttgaggattgttaaaggtcaagtgaatgctctttataggtaatttacatt

SEQ ID NO: 549 - DNA, 3180 bp, Homo sapiens
  source 1..3180: mol_type = unassigned DNA
ggtgtgatctcggctcactgaaacctctgcctcctaggttcaagcgattttcccatgtcagcctccccagtagctgggattacaggcgcacggcaccacgcccggctaatttttctattttatggtagaaacgggatatcaccatgttggccaggctggtgtcaaactgctgacctcaaatgatccgccctcctcggcctcccaaagtgctgggattacaggtgtgagccaaggtgcccgacctgatgtgcttgtaagaatttaaatgaagagggtcagtcagcttaggagacgaggttagatgtaaggatttcagacttgtcagtatacaggtggtgattgatgccgtaggaatgactggtattacccagggagctggtgcaaagtaggagccttggggaacatgttaaggggatgtgagagtaagcccacaaagactcagaagtggccagggagtaaggggaaaatgggatagaatagagcaaaagccacgggaggcattccttgaattccttggactcagatatgttaggggacaggaaacacattgaagacaactgaagagacttcagtgtgctgctgagttcttagcagagtagacagctgatttcaccactattccagaccctaaagatttctcctgaaattgcactgttatgcaatttttttccttctctattgccccacctctggggcctacactctttaccttctctgatttatctgacccatccgcatatctctgcaaagtcttaatgtaggtttccaggatttaatgattctttcaatcaactttaaagttcttcaggaagattctccaggtccgtcaacagttttccccttcatgactttgtgacaaagctttcttgttccactatccaggtgttcccaacaagttgctgtaacggtggcccctcataagcttgcctggaaaccctagaaagctcagaaaaattatgaactttgcccagtaagaggctgggaagtcagaaagggttttaaacaaaactgaccccacttgttacatgctcctttcactgtccaaacgtcaaccaaaggaacttttgtgacgctaagacgctcccggcgtcctcacccgttcacagccagagttgatcttagaaggcagggggctcgcaccgagacgctcctagcaagcccctcacgcgagcgaatgactggcgccaggagaaacgcataggacctcccgaagccgccgagagcaaaaggacccatcagagctgtgctgagacccgccgcgggccgggctcgcactcgagattctcgcccgtgggattccagtcctgagctgaacgagagataagtctttgtcaccccccagtctttactgtttcgagaaaccctaagattttttaaaaaaaagcccaagacgtcaagtcggggaactccaacattggggtgtccagaaacactggggtttcaggcgctctgtaaatgcgtccgaggtccgcggttctgcccgcaagcccagaccccggcctcacttccgccccgcgccccgcgccccggcctcacttccgccccgcgccccgcgccccgcgccccgcgcgcctccgcccgcccctgctccggccttgcgcctgcgcacagtgggatgcgcggggaggtggtgcgcggggaggtggagggcgaggggcggggctacctcaggtcccgcccgcggcaggcctgtgggctgcgaggaggagctttgcctagcttgcaggcagcgcagggcagacggcggcaggagaagcaagatgaatgcaggctcagatcctgtggtcatcgtctcggcggcgcggaccatcataggttccttcaatggtgccttagctgctgttcctgtccaggacctgggctccactgtcatcaaagaagtcttgaagagggccactgtggctccggaagatgtgtctgaggtcatctttggacatgtcttggcagcaggctgtgggcagaatcctgttagacaagccagtgtgggtgcaggaattccctactctgttccagcatggagctgccagatgatctgtgggtcaggcctaaaagctgtgtgccttgcagtccagtcaatagggataggagactccagcattgtggttgcaggaggcatggaaaatatgagcaaggctcctcacttggcttacttgagaacaggagtaaagataggtgagatgccactgactgacagtatactctgtgatggtcttacagatgcatttcacaactgtcatatgggtattacagctgaaaatgtagccaaaaaatggcaagtgagtagagaagatcaggacaaggttgcagttctgtcccagaacaggacagagaatgcacagaaagctggccattttgacaaagagattgtaccagttttggtgtcaactagaaaaggtcttattgaagttaaaacagatgagtttcctcgccatgggagcaacatagaagccatgtccaagctaaagccttactttcttactgatggaacgggaacagtcaccccagccaatgcttcaggaataaatgatggtgctgcagctgtcgttcttatgaagaagtcagaagctgataaacgtgggcttacacctttagcacggatagtttcctggtcccaagtgggtgtggagccttccattatgggaataggaccaattccagccataaagcaagctgttacaaaagcaggttggtcactggaagatgttgacatatttgaaatcaatgaagcctttgcagctgtctctgctgcaatagttaaagaacttggattaaacccagagaaggtcaatattgaaggaggggctatagccttgggccaccctcttggagcatctggctgtcgaattcttgtgaccctgttacacacactggagagaatgggcagaagtcgtggtgttgcagccctgtgcattgggggtgggatgggaatagcaatgtgtgttcagagagaatgaattgcttaaactttgaacaacctcaatttctttttaaactaataaagtactaggttgcaatatgtgaaatcagaggaccaaagtacagatggaaaccatttcctacatcacaaaaacccaagtttacagcttgtactttactttaatgtgtaatactcaactcaaggtacaagacaattgcatttaacattgttataaataaaaggaacatcagatcaatcattaa

SEQ ID NO: 550 - DNA, 1723 bp, Homo sapiens
  source 1..1723: mol_type = unassigned DNA
ggtaatgcctgcggcaggggcggaactgctaggtggtctgagcccggctttgggctggggtcgggctgtcacacaatggctagaagtcgtgacttcgtctccttcgtgccgcatggttttcaacgcccttgacccgccggttccttttgtttgggaagcatggggtcgcatccagtccttcggatttggggaaatagaagggctacagcggcgtccctaggccgttctggaggtcgcctgtccagccctcggctgctgcgagttgtggcacccaccttgacctttgctcagaccagcaggtgttccttcaatggtgccttagctgctgttcctgtccaggacctgggctccactgtcatcaaagaagtcttgaagagggccactgtggctccggaagatgtgtctgaggtcatctttggacatgtcttggcagcaggctgtgggcagaatcctgttagacaagccagtgtgggtgcaggaattccctactctgttccagcatggagctgccagatgatctgtgggtcaggcctaaaagctgtgtgccttgcagtccagtcaatagggataggagactccagcattgtggttgcaggaggcatggaaaatatgagcaaggctcctcacttggcttacttgagaacaggagtaaagataggtgagatgccactgactgacagtatactctgtgatggtcttacagatgcatttcacaactgtcatatgggtattacagctgaaaatgtagccaaaaaatggcaagtgagtagagaagatcaggacaaggttgcagttctgtcccagaacaggacagagaatgcacagaaagctggccattttgacaaagagattgtaccagttttggtgtcaactagaaaaggtcttattgaagttaaaacagatgagtttcctcgccatgggagcaacatagaagccatgtccaagctaaagccttactttcttactgatggaacgggaacagtcaccccagccaatgcttcaggaataaatgatggtgctgcagctgtcgttcttatgaagaagtcagaagctgataaacgtgggcttacacctttagcacggatagtttcctggtcccaagtgggtgtggagccttccattatgggaataggaccaattccagccataaagcaagctgttacaaaagcaggttggtcactggaagatgttgacatatttgaaatcaatgaagcctttgcagctgtctctgctgcaatagttaaagaacttggattaaacccagagaaggtcaatattgaaggaggggctatagccttgggccaccctcttggagcatctggctgtcgaattcttgtgaccctgttacacacactggagagaatgggcagaagtcgtggtgttgcagccctgtgcattgggggtgggatgggaatagcaatgtgtgttcagagagaatgaattgcttaaactttgaacaacctcaatttctttttaaactaataaagtactaggttgcaatatgtgaaatcagaggaccaaagtacagatggaaaccatttcctacatcacaaaaacccaagtttacagcttgtactttactttaatgtgtaatactcaactcaaggtacaagacaattgcatttaacattgttataaataaaaggaacatcagatcaatcattaagggctccagagtgaacagcatcttcataacttccatgtttatcatctttactttctg

SEQ ID NO: 551 - DNA, 1785 bp, Homo sapiens
  source 1..1785: mol_type = unassigned DNA
aggctggaggtggacgggacttttggagggtcgctcgcgtctgttcgcagagctgtgggcggagttgaggccttggaggctgagatgtggttctgcgcgtgtgcggacggctgtctgttaactccgcggtcagttcccggactggtggctggtctgcagggttgacctgcgcaatgcagaggctgcaggtagtgctgggccacctgaggggtccggccgattccggctggatgccgcaggccgcgccttgcctgagcggtgccccgcaggcctcggccgcggacgtggtggtggtgcacgggcggcgcacggccatctgccgggcgggccgcggcggcttcaaggacaccacccccgacgagcttctctcggcagtcatgaccgcggttctcaaggacgtgaatctgaggccggaacagctgggggacatctgtgtcggaaatgtgctgcagcctggggccggggcaatcatggcccgaatcgcccagtttctgagtgacatcccggagactgtgcctttgtccactgtcaatagacagtgttcgtcggggctacaggcagtggccagcatagcaggtggcatcagaaatgggtcttatgacattggcatggcctgtggggtggagtccatgtccctggctgacagagggaaccctggaaatattacttcgcgcttgatggagaaggagaaggccagagattgcctgattcctatggggataacctctgagaatgtggctgagcggtttggcatttcacgggagaagcaggatacctttgccctggcttcccagcagaaggcagcaagagcccagagcaagggctgtttccaagctgagattgtgcctgtgaccaccacggtccatgatgacaagggcaccaagaggagcatcactgtgacccaggatgagggtatccgccccagcaccaccatggagggcctggccaaactgaagcctgccttcaagaaagatggttctaccacagctggaaactctagccaggtgagtgatggggcagctgccatcctgctggcccggaggtccaaggcagaagagttgggccttcccatccttggggtcctgaggtcttatgcagtggttggggtcccacctgacatcatgggcattggacctgcctatgccatcccagtagctttgcaaaaagcagggctgacagtgagtgacgtggacatcttcgagatcaatgaggcctttgcaagccaggctgcctactgtgtggagaagctacgactcccccctgagaaggtgaaccccctggggggtgcagtggccttagggcacccactgggctgcactggggcacgacaggtcatcacgctgctcaatgagctgaagcgccgtgggaagagggcatacggagtggtgtccatgtgcatcgggactggaatgggagccgctgccgtctttgaataccctgggaactgagtgaggtcccaggctggaggcgctacgcagacagtcctgctgctctagcagcaaggcagtaacaccacaaaagcaaaaccacatgggaaaactcagcactggtggtggtggcagtggacagatcaaggcacttcaactcatttggaaaatgtgaacactgatgacatggtataggagtgggtggggtgttgagccacccatcagaccctctttagctgtgcaagataaaagcagcctgggtcacccaggccacaaggccatggttaattcttaaggcaaggcaaatccatggatgagaagtgcaatgggcatagtaaaagtgcatgaatttatctta

SEQ ID NO: 552 - DNA, 1454 bp, Homo sapiens
  source 1..1454: mol_type = unassigned DNA
agttcccggactggtggctggtctgcagggttgacctgcgcaatgcagaggctgcaggtagtgctgggccacctgagcggtgccccgcaggcctcggccgcggacgtggtggtggtgcacgggcggcgcacggccatctgccgggcgggccgcggcggcttcaaggacaccacccccgacgagcttctctcggcagtcatgaccgcggttctcaaggacgtgaatctgaggccggaacagctgggggacatctgtgtcggaaatgtgctgcagcctggggccggggcaatcatggcccgaatcgcccagtttctgagtgacatcccggagactgtgcctttgtccactgtcaatagacagtgttcgtcggggctacaggcagtggccagcatagcaggtggcatcagaaatgggtcttatgacattggcatggcctgtggggtggagtccatgtccctggctgacagagggaaccctggaaatattacttcgcgcttgatggagaaggagaaggccagagattgcctgattcctatggggataacctctgagaatgtggctgagcggtttggcatttcacgggagaagcaggatacctttgccctggcttcccagcagaaggcagcaagagcccagagcaagggctgtttccaagctgagattgtgcctgtgaccaccacggtccatgatgacaagggcaccaagaggagcatcactgtgacccaggatgagggtatccgccccagcaccaccatggagggcctggccaaactgaagcctgccttcaagaaagatggttctaccacagctggaaactctagccaggtgagtgatggggcagctgccatcctgctggcccggaggtccaaggcagaagagttgggccttcccatccttggggtcctgaggtcttatgcagtggttggggtcccacctgacatcatgggcattggacctgcctatgccatcccagtagctttgcaaaaagcagggctgacagtgagtgacgtggacatcttcgagatcaatgaggcctttgcaagccaggctgcctactgtgtggagaagctacgactcccccctgagaaggtgaaccccctggggggtgcagtggccttagggcacccactgggctgcactggggcacgacaggtcatcacgctgctcaatgagctgaagcgccgtgggaagagggcatacggagtggtgtccatgtgcatcgggactggaatgggagccgctgccgtctttgaataccctgggaactgagtgaggtcccaggctggaggcgctacgcagacagtcctgctgctctagcagcaaggcagtaacaccacaaaagcaaaaccacatgggaaaactcagcactggtggtggtggcagtggacagatcaaggcacttcaactcatttggaaaatgtgaacactgatgacatggtataggagtgggtggg

SEQ ID NO: 553 - DNA, 1009 bp, Homo sapiens
  source 1..1009: mol_type = unassigned DNA
gttaactccgcggtcagttcccggactggtggctggtctgcagggttgacctgcgcaatgcagaggctgcaggtagtgctgggccacctgaggggtccggccgattccggctggatgccgcaggccgcgccttgcctgagcggtgccccgcaggcctcggccgcggacgtggtggtggtgcacgggcggcgcacggccatctgccgggcgggccgcggcggcttcaaggacaccacccccgacgagcttctctcggcagtcatgaccgcggttctcaaggacgtgaatctgaggccggaacagctgggggacatctgtgtcggaaatgtgctgcagcctggggccggggcaatcatggcccgaatcgcccagtttctgagtgacatcccggagactgtgcctttgtccactgtcaatagacagtgttcgtcggggctacaggcagtggccagcatagcagggtggagtccatgtccctggctgacagagggaaccctggaaatattacttcgcgcttgatggagaaggagaaggccagagattgcctgattcctatggggataacctctgagaatgtggctgagcggtttggcatttcacgggagaagcaggatacctttgccctggcttcccagcagaaggcagcaagagcccagagcaagggctgtttccaagctgagattgtgcctgtgaccaccacggtccatgatgacaagggcaccaagaggagcatcactgtgacccaggatgagggtatccgccccagcaccaccatggagggcctggccaaactgaagcctgccttcaagaaagatggttctaccacagctggtgagactggtccggggtaggggtatgagaaagcaggccatggccatgctgggtgctgtactctgggaacctggaatagaccaggcccctctgcaaagtagaagtgggagggctgggatctcctcatccccaccccgatgccttcttaccccaacagtttgcccctaggaaactctag

SEQ ID NO: 554 - DNA, 1268 bp, Homo sapiens
  source 1..1268: mol_type = unassigned DNA
aatgcagaggctgcaggtagtgctgggccacctgaggggtccggccgattccggctggatgccgcaggccgcgccttgcctgagcggtgccccgcaggcctcggccgcggacgtggtggtggtgcacgggcggcgcacggccatctgccgggcgggccgcggcggcttcaaggacaccacccccgacgagcttctctcggcagtcatgaccgcggttctcaaggacgtgaatctgaggccggaacagctgggggacatctgtgtcgatcaacatggagtttcttatgtcttccttttctacatacacacggaaatgtgctgcagcctggggccggggcaatcatggcccgaatcgcccagtttctgagtgacatcccggagactgtgcctttgtccactgtcaatagacagtgttcgtcggggctacaggcagtggccagcatagcagggtggagtccatgtccctggctgacagagggaaccctggaaatattacttcgcgcttgatggagaaggagaaggccagagattgcctgattcctatggggataacctctgagaatgtggctgagcggtttggcatttcacgggagaagcaggatacctttgccctggcttcccagcagaaggcagcaagagcccagagcaagggctgtttccaagctgagattgtgcctgtgaccaccacggtccatgatgacaagggcaccaagaggagcatcactgtgacccaggatgagggtatccgccccagcaccaccatggagggcctggccaaactgaagcctgccttcaagaaagatggttctaccacagctggtgagactggtccggggtaggggtatgagaaagcaggccatggccatgctgggtgctgtactctgggaacctggaatagaccaggcccctctgcaaagtagaagtgggagggctgggatctcctcatccccaccccgatgccttcttaccccaacagtttgcccctaggaaactctagccaggtgagtgatggggcagctgccatcctgctggcccggaggtccaaggcagaagagttgggccttcccatccttggggtcctgaggtcttatgcagtggttggggtcccacctgacatcatgggcattggacctgcctatgccatcccagtagctttgcaaaaagcaggtaaggtggctccttcatatagtatctgggtcccacctggatcctgcagctgccctgcatgctgttgccaggggcatgagggtggtcctgtgggtgctgca

SEQ ID NO: 555 - DNA, 1540 bp, Homo sapiens
  source 1..1540: mol_type = unassigned DNA
gggttcccaggccgactctccttgtggttggctgaggctggaggtggacgggacttttggagggtcgctcgcgtctgttcgcagagctgtgggcggagttgaggccttggaggctgagatgtggttctgcgcgtgtgcggacggctgtctgttaactccgcggtcagttcccggactggtggctggtctgcagggttgacctgcgcaatgcagaggctgcaggtagtgctgggccacctgaggggtccggccgattccggctggatgccgcaggccgcgccttgcctgagcggtgccccgcaggcctcggccgcggacgtggtggtggtgcacgggcggcgcacggccatctgccgggcgggccgcggcggcttcaaggacaccacccccgacgagcttctctcggcagtcatgaccgcggttctcaaggacgtgaatctgaggccggaacagctgggggacatctgtgtcggaaatgtgctgcagcctggggccggggcaatcatggcccgaatcgcccagtttctgagtgacatcccggagactgtgcctttgtccactgtcaatagacagtgttcgtcggggctacaggcagtggccagcatagcaggtggcatcagaaatgggtcttatgacattggcatggcctgtgggataacctctgagaatgtggctgagcggtttggcatttcacgggagaagcaggatacctttgccctggcttcccagcagaaggcagcaagagcccagagcaagggctgtttccaagctgagattgtgcctgtgaccaccacggtccatgatgacaagggcaccaagaggagcatcactgtgacccaggatgagggtatccgccccagcaccaccatggagggcctggccaaactgaagcctgccttcaagaaagatggttctaccacagctgggctgacagtgagtgacgtggacatcttcgagatcaatgaggcctttgcaagccaggctgcctactgtgtggagaagctacgactcccccctgagaaggtgaaccccctggggggtgcagtggccttagggcacccactgggctgcactggggcacgacaggtcatcacgctgctcaatgagctgaagcgccgtgggaagagggcatacggagtggtgtccatgtgcatcgggactggaatgggagccgctgccgtctttgaataccctgggaactgagtgaggtcccaggctggaggcgctacgcagacagtcctgctgctctagcagcaaggcagtaacaccacaaaagcaaaaccacatgggaaaactcagcactggtggtggtggcagtggacagatcaaggcacttcaactcatttggaaaatgtgaacactgatgacatggtataggagtgggtggggtgttgagccacccatcagaccctctttagctgtgcaagataaaagcagcctgggtcacccaggccacaaggccatggttaattcttaaggcaaggcaaatccatggatgagaagtgcaatgggcatagtaaaagtgcatgaatttatctta

SEQ ID NO: 556 - DNA, 9360 bp, Homo sapiens
  source 1..9360: mol_type = unassigned DNA
cagctagcaggcttagattcaggccctcagcaaacaaggaacctggaaaatgtaaccctgaatgcacggtggggaggacatggcaagagaaaagcggcaggaataaagtgattttctgaatggtcttgcttctttgtctatcttgtctgattttctcctgtctgaccttttcctggttaaaaatctgggggaaaatgacggactccaagccgatcaccaagagtaaatcagaagcaaacctcatcccgagccaggagccctttccagcctctgataactcaggggagacaccgcagagaaatggggagggccacactctgcccaagacacccagccaggccgagccagcctcccacaaaggccccaaagatgccggtcggcggagaaactccctaccaccctcccaccagaagcccccaagaaaccccctttcttccagtgacgcagcaccctccccagagcttcaagccaacgggactgggacacaaggtctggaggccacagataccaatggcctgtcctcctcagccaggccccagggccagcaagctggctccccctccaaagaagacaagaagcaggcaaacatcaagaggcagctgatgaccaacttcatcctgggctcttttgatgactactcctccgacgaggactctgttgctggctcatctcgtgagtctacccggaagggcagccgggccagcttgggggccctgtccctggaggcttatctgaccacaggtgaagctgagacccgcgtccccactatgaggccgagcatgtcgggactccacctggtgaagaggggacgggaacacaagaagctggacctgcacagagactttaccgtggcttctcccgctgagtttgtcacacgctttgggggggatcgggtcatcgagaaggtgcttattgccaacaacgggattgccgccgtgaagtgcatgcgctccatccgcaggtgggcctatgagatgttccgcaacgagcgggccatccggtttgttgtgatggtgacccccgaggaccttaaggccaacgcagagtacatcaagatggcggatcattacgtccccgtcccaggagggcccaataacaacaactatgccaacgtggagctgattgtggacattgccaagagaatccccgtgcaggcggtgtgggctggctggggccatgcttcagaaaaccctaaacttccggagctgctgtgcaagaatggagttgctttcttaggccctcccagtgaggccatgtgggccttaggagataagatcgcctccaccgttgtcgcccagacgctacaggtcccaaccctgccctggagtggaagcggcctgacagtggagtggacagaagatgatctgcagcagggaaaaagaatcagtgtcccagaagatgtttatgacaagggttgcgtgaaagacgtagatgagggcttggaggcagcagaaagaattggttttccattgatgatcaaagcttctgaaggtggcggagggaagggaatccggaaggctgagagtgcggaggacttcccgatccttttcagacaagtacagagtgagatcccaggctcgcccatctttctcatgaagctggcccagcacgcccgtcacctggaagttcagatcctcgctgaccagtatgggaatgctgtgtctctgtttggtcgcgactgctccatccagcggcggcatcagaagatcgttgaggaagcaccggccaccatcgccccgctggccatattcgagttcatggagcagtgtgccatccgcctggccaagaccgtgggctatgtgagtgcagggacagtggaatacctctatagtcaggatggcagcttccacttcttggagctgaatcctcgcttgcaggtggaacatccctgcacagaaatgattgctgatgttaatctgccggccgcccagctacagatcgccatgggcgtgccactgcaccggctgaaggatatccggcttctgtatggagagtcaccatggggagtgactcccatttcttttgaaaccccctcaaaccctcccctcgcccgaggccacgtcattgccgccagaatcaccagcgaaaacccagacgagggttttaagccgagctccgggactgtccaggaactgaatttccggagcagcaagaacgtgtggggttacttcagcgtggccgctactggaggcctgcacgagtttgcggattcccaatttgggcactgcttctcctggggagagaaccgggaagaggccatttcgaacatggtggtggctttgaaggaactgtccatccgaggcgactttaggactaccgtggaatacctcattaacctcctggagaccgagagcttccagaacaacgacatcgacaccgggtggttggactacctcattgctgagaaagtgcaggcggagaaaccggatatcatgcttggggtggtatgcggggccttgaacgtggccgatgcgatgttcagaacgtgcatgacagatttcttacactccctggaaaggggccaggtcctcccagcggattcactactgaacctcgtagatgtggaattaatttacggaggtgttaagtacattctcaaggtggcccggcagtctctgaccatgttcgttctcatcatgaatggctgccacatcgagattgatgcccaccggctgaatgatggggggctcctgctctcctacaatgggaacagctacaccacctacatgaaggaagaggttgacagttaccgaattaccatcggcaataagacgtgtgtgtttgagaaggagaacgatcctacagtcctgagatccccctcggctgggaagctgacacagtacacagtggaggatgggggccacgttgaggctgggagcagctacgctgagatggaggtgatgaagatgatcatgaccctgaacgttcaggaaagaggccgggtgaagtacatcaagcgtccaggtgccgtgctggaagcaggctgcgtggtggccaggctggagctcgatgacccttctaaagtccacccggctgaaccgttcacaggagaactccctgcccagcagacactgcccatcctcggagagaaactgcaccaggtcttccacagcgtcctggaaaacctcaccaacgtcatgagtggcttttgtctgccagagcccgtttttagcataaagctgaaggagtgggtgcagaagctcatgatgaccctccggcacccgtcactgccgctgctggagctgcaggagatcatgaccagcgtggcaggccgcatccccgcccctgtggagaagtctgtccgcagggtgatggcccagtatgccagcaacatcacctcggtgctgtgccagttccccagccagcagatagccaccatcctggactgccatgcagccaccctgcagcggaaggctgatcgagaggtcttcttcatcaacacccagagcatcgtgcagttggtccagagataccgcagcgggatccgcggctatatgaaaacagtggtgttggatctcctgagaagatacttgcgtgttgagcaccattttcagcaagcccactacgacaagtgtgtgataaacctcagggagcagttcaagccagacatgtcccaggtgctggactgcatcttctcccacgcacaggtggccaagaagaaccagctggtgatcatgttgatcgatgagctgtgtggcccagacccttccctgtcggacgagctgatctccatcctcaacgagctcactcagctgagcaaaagcgagcactgcaaagtggccctcagagcccggcagatcctgattgcctcccacctcccctcctacgagctgcggcataaccaggtggagtccattttcctgtctgccattgacatgtacggccaccagttctgccccgagaacctcaagaaattaatactttcggaaacaaccatcttcgacgtcctgcctactttcttctatcacgcaaacaaagtcgtgtgcatggcgtccttggaggtttacgtgcggaggggctacatcgcctatgagttaaacagcctgcagcaccggcagctcccggacggcacctgcgtggtagaattccagttcatgctgccgtcctcccacccaaaccggatgaccgtgcccatcagcatcaccaaccctgacctgctgaggcacagcacagagctcttcatggacagcggcttctccccactgtgccagcgcatgggagccatggtagccttcaggagattcgaggacttcaccagaaattttgatgaagtcatctcttgcttcgccaacgtgcccaaagacacccccctcttcagcgaggcccgcacctccctatactccgaggatgactgcaagagcctcagagaagagcccatccacattctgaatgtgtccatccagtgtgcagaccacctggaggatgaggcactggtgccgattttacggacattcgtacagtccaagaaaaatatccttgtggattatggactccgacgaatcacattcttgattgcccaagagaaagaatttcccaagtttttcacattcagagcaagagatgagtttgcagaagatcgcatttaccgtcacttggaacctgccctggccttccagctggaacttaaccggatgcgtaacttcgatctgaccgccgtgccctgtgccaaccacaagatgcacctttacctgggtgctgccaaggtgaaggaaggtgtggaagtgacggaccataggttcttcatccgcgccatcatcaggcactctgacctgatcacaaaggaagcctccttcgaatacctgcagaacgagggtgagcggctgctcctggaggccatggacgagctggaggtggcgttcaataacaccagcgtgcgcaccgactgcaaccacatcttcctcaacttcgtgcccactgtcatcatggaccccttcaagatcgaggagtccgtgcgctacatggttatgcgctacggcagccggctgtggaaactccgtgtgctacaggctgaggtcaagatcaacatccgccagaccaccaccggcagtgccgttcccatccgcctgttcatcaccaatgagtcgggctactacctggacatcagcctctacaaagaagtgactgactccagatctggaaatatcatgtttcactccttcggcaacaagcaagggccccagcacgggatgctgatcaatactccctacgtcaccaaggatctgctccaggccaagcgattccaggcccagaccctgggaaccacctacatctatgacttcccggaaatgttcaggcaggctctctttaaactgtggggctccccagacaagtatcccaaagacatcctgacatacactgaattagtgttggactctcagggccagctggtggagatgaaccgacttcctggtggaaatgaggtgggcatggtggccttcaaaatgaggtttaagacccaggagtacccggaaggacgggatgtgatcgtcatcggcaatgacatcacctttcgcattggatcctttggccctggagaggaccttctgtacctgcgggcatccgagatggcccgggcagagggcattcccaaaatttacgtggcagccaacagtggcgcccgtattggcatggcagaggagatcaaacacatgttccacgtggcttgggtggacccagaagacccccacaaaggatttaaatacctgtacctgactccccaagactacaccagaatcagctccctgaactccgtccactgtaaacacatcgaggaaggaggagagtccagatacatgatcacggatatcatcgggaaggatgatggcttgggcgtggagaatctgaggggctcaggcatgattgctggggagtcctctctggcttacgaagagatcgtcaccattagcttggtgacctgccgagccattgggattggggcctacttggtgaggctgggccagcgagtgatccaggtggagaattcccacatcatcctcacaggagcaagtgctctcaacaaggtcctgggaagagaggtctacacatccaacaaccagctgggtggcgttcagatcatgcattacaatggtgtctcccacatcaccgtgccagatgactttgagggggtttataccatcctggagtggctgtcctatatgccaaaggataatcacagccctgtccctatcatcacacccactgaccccattgacagagaaattgaattcctcccatccagagctccctacgacccccggtggatgcttgcaggaaggcctcacccaactctgaagggaacgtggcagagcggattctttgaccacggcagtttcaaggaaatcatggcaccctgggcgcagaccgtggtgacaggacgagcaaggcttggggggattcccgtgggagtgattgctgtggagacacggactgtggaggtggcagtccctgcagaccctgccaacctggattctgaggccaagataattcagcaggcaggacaggtgtggttcccagactcagcctacaaaaccgcccaggccgtcaaggacttcaaccgggagaagttgcccctgatgatctttgccaactggagggggttctccggtggcatgaaagacatgtatgaccaggtgctgaagtttggagcctacatcgtggacggccttagacaatacaaacagcccatcctgatctatatcccgccctatgcggagctccggggaggctcctgggtggtcatagatgccaccatcaacccgctgtgcatagaaatgtatgcagacaaagagagcaggggtggtgttctggaaccagaggggacagtggagattaagttccgaaagaaagatctgataaagtccatgagaaggatcgatccagcttacaagaagctcatggaacagctaggggaacctgatctctccgacaaggaccgaaaggacctggagggccggctaaaggctcgcgaggacctgctgctccccatctaccaccaggtggcggtgcagttcgccgacttccatgacacacccggccggatgctggagaagggcgtcatatctgacatcctggagtggaagaccgcacgcaccttcctgtattggcgtctgcgccgcctcctcctggaggaccaggtcaagcaggagatcctgcaggccagcggggagctgagtcacgtgcatatccagtccatgctgcgtcgctggttcgtggagacggagggggctgtcaaggcctacttgtgggacaacaaccaggtggttgtgcagtggctggaacagcactggcaggcaggggatggcccgcgctccaccatccgtgagaacatcacgtacctgaagcacgactctgtcctcaagaccatccgaggcctggttgaagaaaaccccgaggtggccgtggactgtgtgatatacctgagccagcacatcagcccagctgagcgggcgcaggtcgttcacctgctgtctaccatggacagcccggcctccacctgaccgtggcccgcccagccactcccgggaccacggcaaaaggaaccacccagacccaccacccgtacaccctcagcagaccctgaagacttgcttttaaacaaagaaaatcctgggcacttctgcagggctgctggttccgagctgacacccgtcttaacaaaaggcccaggagtgcctcttccaaacaaaaacagcctcctctccatagctgggaagtttattttgttttgtctctgaagacagcagttttattgcatcactaaatctaatcaagctaaaacatccctgtttccttttgcaaaacagtgcctggcatgtgggatccaggcgttctttaggatccttggataccacatcgtgaaatcttttatttttttactctgagaccagcaccagatgtaagtaagcatctcatatatttcagccaaataaatgggccaagggaaaaaaatatatatatatagacaggactagagaaaacctatttttgtaatgatgtttctttggatactgtctagtcacccagaaaaatgtatggatgaatttttttttttttttttgagacaaagtctcactgtgtcatgcaggctggagtgcagtggcatgatctcactgcaacctccatctcctgtctcagcctcctagataactgggattacaggtgcccaccaccatgcccggctaatttttgtatttttggtagagacagagtttcaccaggttggtcaggctggtctcaaactcttgacttcaggtaatccacccaccttggcctcccaaagtgctgggattacaggcatgagccaccatcttcagccagatgatttttttattgagagagtgaaatgctattttgttccccaaatggcgctagtgaatcactaggagggtcccactgataggccatgtttagcactggttgccagggattctctttttgagagagggaaagcaaaatgaatggaagtacccagctggaggtttcagggcttctggaggatgctctcgcatagctcgaggtcctctgcccacctcttctctccaaggaaaatgaggactgccccttccccctgcaggattggcccccagcctgcgcatgcaccctcctcttgcccaagtggggagcacagaggcggagaggaatcccttaccacacccacggcccagcttgctcacgagtgtcacctctgtgacggtcaccactgctcccttggagggccacttgagttactgttgcttcctcgcctgctggcttgatgagcaccgatggtgggatctgaccccgaggggcagagctgtcggtgactgaggactggactgtggtgaccatgccgatttgctcagggagaacgttgcaatgcacccagcagctcctggctctgcaggcggcacagcctggggccctgtgatcctctggtttcttccattggggcggagtcggggatggagggagctggccacaacccactgctctgatgggtggtttgtccaaggatgctgaatgtaatgcctggtcaatgtggaagcccatgaggttgcccagggaagcctccaaaagctgggatgcttgagggtatccaagttgaaaaagacaaaatctgaccatcagccagtgacagtcctggcaaatgaaggtggggcggggcagtgaggggtgggagaaggtgaatgattcattattccaccccgaggtttgctggggtgaggggaagaatcgatgctgctttgggaactgaaggtttttctgttgggaaggccctcttggttttggagagaaagacaagttatgagtagctgctaccctggaacggtgggcagagagcctactaggaaatgtgcagaataaactattttttgaaggaaa

SEQ ID NO: 557 - DNA, 9247 bp, Homo sapiens
  source 1..9247: mol_type = unassigned DNA
attttctgaatggtcttgcttctttgtctatcttgtctgattttctcctgtctgaccttttcctggttaaaaatctgggggaaaatgacggactccaagccgatcaccaagagtaaatcagaagcaaacctcatcccgagccaggagccctttccagcctctgataactcaggggagacaccgcagagaaatggggagggccacactctgcccaagacacccagccaggccgagccagcctcccacaaaggccccaaagatgccggtcggcggagaaactccctaccaccctcccaccagaagcccccaagaaaccccctttcttccagtgacgcagcaccctccccagagcttcaagccaacgggactgggacacaaggtctggaggccacagataccaatggcctgtcctcctcagccaggccccagggccagcaagctggctccccctccaaagaagacaagaagcaggcaaacatcaagaggcagctgatgaccaacttcatcctgggctcttttgatgactactcctccgacgaggactctgttgctggctcatctcgtgagtctacccggaagggcagccgggccagcttgggggccctgtccctggaggcttatctgaccacaggtgaagctgagacccgcgtccccactatgaggccgagcatgtcgggactccacctggtgaagaggggacgggaacacaagaagctggacctgcacagagactttaccgtggcttctcccgctgagtttgtcacacgctttgggggggatcgggtcatcgagaaggtgcttattgccaacaacgggattgccgccgtgaagtgcatgcgctccatccgcaggtgggcctatgagatgttccgcaacgagcgggccatccggtttgttgtgatggtgacccccgaggaccttaaggccaacgcagagtacatcaagatggcggatcattacgtccccgtcccaggagggcccaataacaacaactatgccaacgtggagctgattgtggacattgccaagagaatccccgtgcaggcggtgtgggctggctggggccatgcttcagaaaaccctaaacttccggagctgctgtgcaagaatggagttgctttcttaggccctcccagtgaggccatgtgggccttaggagataagatcgcctccaccgttgtcgcccagacgctacaggtcccaaccctgccctggagtggaagcggcctgacagtggagtggacagaagatgatctgcagcagggaaaaagaatcagtgtcccagaagatgtttatgacaagggttgcgtgaaagacgtagatgagggcttggaggcagcagaaagaattggttttccattgatgatcaaagcttctgaaggtggcggagggaagggaatccggaaggctgagagtgcggaggacttcccgatccttttcagacaagtacagagtgagatcccaggctcgcccatctttctcatgaagctggcccagcacgcccgtcacctggaagttcagatcctcgctgaccagtatgggaatgctgtgtctctgtttggtcgcgactgctccatccagcggcggcatcagaagatcgttgaggaagcaccggccaccatcgccccgctggccatattcgagttcatggagcagtgtgccatccgcctggccaagaccgtgggctatgtgagtgcagggacagtggaatacctctatagtcaggatggcagcttccacttcttggagctgaatcctcgcttgcaggtggaacatccctgcacagaaatgattgctgatgttaatctgccggccgcccagctacagatcgccatgggcgtgccactgcaccggctgaaggatatccggcttctgtatggagagtcaccatggggagtgactcccatttcttttgaaaccccctcaaaccctcccctcgcccgaggccacgtcattgccgccagaatcaccagcgaaaacccagacgagggttttaagccgagctccgggactgtccaggaactgaatttccggagcagcaagaacgtgtggggttacttcagcgtggccgctactggaggcctgcacgagtttgcggattcccaatttgggcactgcttctcctggggagagaaccgggaagaggccatttcgaacatggtggtggctttgaaggaactgtccatccgaggcgactttaggactaccgtggaatacctcattaacctcctggagaccgagagcttccagaacaacgacatcgacaccgggtggttggactacctcattgctgagaaagtgcaggcggagaaaccggatatcatgcttggggtggtatgcggggccttgaacgtggccgatgcgatgttcagaacgtgcatgacagatttcttacactccctggaaaggggccaggtcctcccagcggattcactactgaacctcgtagatgtggaattaatttacggaggtgttaagtacattctcaaggtggcccggcagtctctgaccatgttcgttctcatcatgaatggctgccacatcgagattgatgcccaccggctgaatgatggggggctcctgctctcctacaatgggaacagctacaccacctacatgaaggaagaggttgacagttaccgaattaccatcggcaataagacgtgtgtgtttgagaaggagaacgatcctacagtcctgagatccccctcggctgggaagctgacacagtacacagtggaggatgggggccacgttgaggctgggagcagctacgctgagatggaggtgatgaagatgatcatgaccctgaacgttcaggaaagaggccgggtgaagtacatcaagcgtccaggtgccgtgctggaagcaggctgcgtggtggccaggctggagctcgatgacccttctaaagtccacccggctgaaccgttcacaggagaactccctgcccagcagacactgcccatcctcggagagaaactgcaccaggtcttccacagcgtcctggaaaacctcaccaacgtcatgagtggcttttgtctgccagagcccgtttttagcataaagctgaaggagtgggtgcagaagctcatgatgaccctccggcacccgtcactgccgctgctggagctgcaggagatcatgaccagcgtggcaggccgcatccccgcccctgtggagaagtctgtccgcagggtgatggcccagtatgccagcaacatcacctcggtgctgtgccagttccccagccagcagatagccaccatcctggactgccatgcagccaccctgcagcggaaggctgatcgagaggtcttcttcatcaacacccagagcatcgtgcagttggtccagagataccgcagcgggatccgcggctatatgaaaacagtggtgttggatctcctgagaagatacttgcgtgttgagcaccattttcagcaagcccactacgacaagtgtgtgataaacctcagggagcagttcaagccagacatgtcccaggtgctggactgcatcttctcccacgcacaggtggccaagaagaaccagctggtgatcatgttgatcgatgagctgtgtggcccagacccttccctgtcggacgagctgatctccatcctcaacgagctcactcagctgagcaaaagcgagcactgcaaagtggccctcagagcccggcagatcctgattgcctcccacctcccctcctacgagctgcggcataaccaggtggagtccattttcctgtctgccattgacatgtacggccaccagttctgccccgagaacctcaagaaattaatactttcggaaacaaccatcttcgacgtcctgcctactttcttctatcacgcaaacaaagtcgtgtgcatggcgtccttggaggtttacgtgcggaggggctacatcgcctatgagttaaacagcctgcagcaccggcagctcccggacggcacctgcgtggtagaattccagttcatgctgccgtcctcccacccaaaccggatgaccgtgcccatcagcatcaccaaccctgacctgctgaggcacagcacagagctcttcatggacagcggcttctccccactgtgccagcgcatgggagccatggtagccttcaggagattcgaggacttcaccagaaattttgatgaagtcatctcttgcttcgccaacgtgcccaaagacacccccctcttcagcgaggcccgcacctccctatactccgaggatgactgcaagagcctcagagaagagcccatccacattctgaatgtgtccatccagtgtgcagaccacctggaggatgaggcactggtgccgattttacggacattcgtacagtccaagaaaaatatccttgtggattatggactccgacgaatcacattcttgattgcccaagagaaagaatttcccaagtttttcacattcagagcaagagatgagtttgcagaagatcgcatttaccgtcacttggaacctgccctggccttccagctggaacttaaccggatgcgtaacttcgatctgaccgccgtgccctgtgccaaccacaagatgcacctttacctgggtgctgccaaggtgaaggaaggtgtggaagtgacggaccataggttcttcatccgcgccatcatcaggcactctgacctgatcacaaaggaagcctccttcgaatacctgcagaacgagggtgagcggctgctcctggaggccatggacgagctggaggtggcgttcaataacaccagcgtgcgcaccgactgcaaccacatcttcctcaacttcgtgcccactgtcatcatggaccccttcaagatcgaggagtccgtgcgctacatggttatgcgctacggcagccggctgtggaaactccgtgtgctacaggctgaggtcaagatcaacatccgccagaccaccaccggcagtgccgttcccatccgcctgttcatcaccaatgagtcgggctactacctggacatcagcctctacaaagaagtgactgactccagatctggaaatatcatgtttcactccttcggcaacaagcaagggccccagcacgggatgctgatcaatactccctacgtcaccaaggatctgctccaggccaagcgattccaggcccagaccctgggaaccacctacatctatgacttcccggaaatgttcaggcaggctctctttaaactgtggggctccccagacaagtatcccaaagacatcctgacatacactgaattagtgttggactctcagggccagctggtggagatgaaccgacttcctggtggaaatgaggtgggcatggtggccttcaaaatgaggtttaagacccaggagtacccggaaggacgggatgtgatcgtcatcggcaatgacatcacctttcgcattggatcctttggccctggagaggaccttctgtacctgcgggcatccgagatggcccgggcagagggcattcccaaaatttacgtggcagccaacagtggcgcccgtattggcatggcagaggagatcaaacacatgttccacgtggcttgggtggacccagaagacccccacaaaggatttaaatacctgtacctgactccccaagactacaccagaatcagctccctgaactccgtccactgtaaacacatcgaggaaggaggagagtccagatacatgatcacggatatcatcgggaaggatgatggcttgggcgtggagaatctgaggggctcaggcatgattgctggggagtcctctctggcttacgaagagatcgtcaccattagcttggtgacctgccgagccattgggattggggcctacttggtgaggctgggccagcgagtgatccaggtggagaattcccacatcatcctcacaggagcaagtgctctcaacaaggtcctgggaagagaggtctacacatccaacaaccagctgggtggcgttcagatcatgcattacaatggtgtctcccacatcaccgtgccagatgactttgagggggtttataccatcctggagtggctgtcctatatgccaaaggataatcacagccctgtccctatcatcacacccactgaccccattgacagagaaattgaattcctcccatccagagctccctacgacccccggtggatgcttgcaggaaggcctcacccaactctgaagggaacgtggcagagcggattctttgaccacggcagtttcaaggaaatcatggcaccctgggcgcagaccgtggtgacaggacgagcaaggcttggggggattcccgtgggagtgattgctgtggagacacggactgtggaggtggcagtccctgcagaccctgccaacctggattctgaggccaagataattcagcaggcaggacaggtgtggttcccagactcagcctacaaaaccgcccaggccgtcaaggacttcaaccgggagaagttgcccctgatgatctttgccaactggagggggttctccggtggcatgaaagacatgtatgaccaggtgctgaagtttggagcctacatcgtggacggccttagacaatacaaacagcccatcctgatctatatcccgccctatgcggagctccggggaggctcctgggtggtcatagatgccaccatcaacccgctgtgcatagaaatgtatgcagacaaagagagcaggggtggtgttctggaaccagaggggacagtggagattaagttccgaaagaaagatctgataaagtccatgagaaggatcgatccagcttacaagaagctcatggaacagctaggggaacctgatctctccgacaaggaccgaaaggacctggagggccggctaaaggctcgcgaggacctgctgctccccatctaccaccaggtggcggtgcagttcgccgacttccatgacacacccggccggatgctggagaagggcgtcatatctgacatcctggagtggaagaccgcacgcaccttcctgtattggcgtctgcgccgcctcctcctggaggaccaggtcaagcaggagatcctgcaggccagcggggagctgagtcacgtgcatatccagtccatgctgcgtcgctggttcgtggagacggagggggctgtcaaggcctacttgtgggacaacaaccaggtggttgtgcagtggctggaacagcactggcaggcaggggatggcccgcgctccaccatccgtgagaacatcacgtacctgaagcacgactctgtcctcaagaccatccgaggcctggttgaagaaaaccccgaggtggccgtggactgtgtgatatacctgagccagcacatcagcccagctgagcgggcgcaggtcgttcacctgctgtctaccatggacagcccggcctccacctgaccgtggcccgcccagccactcccgggaccacggcaaaaggaaccacccagacccaccacccgtacaccctcagcagaccctgaagacttgcttttaaacaaagaaaatcctgggcacttctgcagggctgctggttccgagctgacacccgtcttaacaaaaggcccaggagtgcctcttccaaacaaaaacagcctcctctccatagctgggaagtttattttgttttgtctctgaagacagcagttttattgcatcactaaatctaatcaagctaaaacatccctgtttccttttgcaaaacagtgcctggcatgtgggatccaggcgttctttaggatccttggataccacatcgtgaaatcttttatttttttactctgagaccagcaccagatgtaagtaagcatctcatatatttcagccaaataaatgggccaagggaaaaaaatatatatatatagacaggactagagaaaacctatttttgtaatgatgtttctttggatactgtctagtcacccagaaaaatgtatggatgaatttttttttttttttttgagacaaagtctcactgtgtcatgcaggctggagtgcagtggcatgatctcactgcaacctccatctcctgtctcagcctcctagataactgggattacaggtgcccaccaccatgcccggctaatttttgtatttttggtagagacagagtttcaccaggttggtcaggctggtctcaaactcttgacttcaggtaatccacccaccttggcctcccaaagtgctgggattacaggcatgagccaccatcttcagccagatgatttttttattgagagagtgaaatgctattttgttccccaaatggcgctagtgaatcactaggagggtcccactgataggccatgtttagcactggttgccagggattctctttttgagagagggaaagcaaaatgaatggaagtacccagctggaggtttcagggcttctggaggatgctctcgcatagctcgaggtcctctgcccacctcttctctccaaggaaaatgaggactgccccttccccctgcaggattggcccccagcctgcgcatgcaccctcctcttgcccaagtggggagcacagaggcggagaggaatcccttaccacacccacggcccagcttgctcacgagtgtcacctctgtgacggtcaccactgctcccttggagggccacttgagttactgttgcttcctcgcctgctggcttgatgagcaccgatggtgggatctgaccccgaggggcagagctgtcggtgactgaggactggactgtggtgaccatgccgatttgctcagggagaacgttgcaatgcacccagcagctcctggctctgcaggcggcacagcctggggccctgtgatcctctggtttcttccattggggcggagtcggggatggagggagctggccacaacccactgctctgatgggtggtttgtccaaggatgctgaatgtaatgcctggtcaatgtggaagcccatgaggttgcccagggaagcctccaaaagctgggatgcttgagggtatccaagttgaaaaagacaaaatctgaccatcagccagtgacagtcctggcaaatgaaggtggggcggggcagtgaggggtgggagaaggtgaatgattcattattccaccccgaggtttgctggggtgaggggaagaatcgatgctgctttgggaactgaaggtttttctgttgggaaggccctcttggttttggagagaaagacaagttatgagtagctgctaccctggaacggtgggcagagagcctactaggaaatgtgcagaataaactattttttgaagg

SEQ ID NO: 558 - DNA, 9037 bp, Homo sapiens
  source 1..9037: mol_type = unassigned DNA
attttctgaatggtcttgcttctttgtctatcttgtctgattttctcctgtctgaccttttcctggttaaaaatctgggggaaaatgacggactccaagccgatcaccaagagtaaatcagaagcaaacctcatcccgagccaggagccctttccagcctctgataactcaggggagacaccgcagagaaatggggagggccacactctgcccaagacacccagccaggccgagccagcctcccacaaaggccccaaagatgccggtcggcggagaaactccctaccaccctcccaccagaagcccccaagaaaccccctttcttccagtgacgcagcaccctccccagagcttcaagccaacgggactgggacacaaggtctggaggccacagataccaatggcctgtcctcctcagccaggccccagggccagcaagctggctccccctccaaagaagacaagaagcaggcaaacatcaagaggcagctgatgaccaacttcatcctgggctcttttgatgactactcctccgacgaggactctgttgctggctcatctcgtgagtctacccggaagggcagccgggccagcttgggggccctgtccctggaggcttatctgaccacaggtgaagctgagacccgcgtccccactatgaggccgagcatgtcgggactccacctggtgaagaggggacgggaacacaagaagctggacctgcacagagactttaccgtggcttctcccgctgagtttgtcacacgctttgggggggatcgggtcatcgagaaggtgcttattgccaacaacgggattgccgccgtgaagtgcatgcgctccatccgcaggtgggcctatgagatgttccgcaacgagcgggccatccggtttgttgtgatggtgacccccgaggaccttaaggccaacgcagagtacatcaagatggcggatcattacgtccccgtcccaggagggcccaataacaacaactatgccaacgtggagctgattgtggacattgccaagagaatccccgtgcaggcggtgtgggctggctggggccatgcttcagaaaaccctaaacttccggagctgctgtgcaagaatggagttgctttcttaggccctcccagtgaggccatgtgggccttaggagataagatcgcctccaccgttgtcgcccagacgctacaggtcccaaccctgccctggagtggaagcggcctgacagtggagtggacagaagatgatctgcagcagggaaaaagaatcagtgtcccagaagatgtttatgacaagggttgcgtgaaagacgtagatgagggcttggaggcagcagaaagaattggttttccattgatgatcaaagcttctgaaggtggcggagggaagggaatccggaaggctgagagtgcggaggacttcccgatccttttcagacaagtacagagtgagatcccaggctcgcccatctttctcatgaagctggcccagcacgcccgtcacctggaagttcagatcctcgctgaccagtatgggaatgctgtgtctctgtttggtcgcgactgctccatccagcggcggcatcagaagatcgttgaggaagcaccggccaccatcgccccgctggccatattcgagttcatggagcagtgtgccatccgcctggccaagaccgtgggctatgtgagtgcagggacagtggaatacctctatagtcaggatggcagcttccacttcttggagctgaatcctcgcttgcaggtggaacatccctgcacagaaatgattgctgatgttaatctgccggccgcccagctacagatcgccatgggcgtgccactgcaccggctgaaggatatccggcttctgtatggagagtcaccatggggagtgactcccatttcttttgaaaccccctcaaaccctcccctcgcccgaggccacgtcattgccgccagaatcaccagcgaaaacccagacgagggttttaagccgagctccgggactgtccaggaactgaatttccggagcagcaagaacgtgtggggttacttcagcgtggccgctactggaggcctgcacgagtttgcggattcccaatttgggcactgcttctcctggggagagaaccgggaagaggccatttcgaacatggtggtggctttgaaggaactgtccatccgaggcgactttaggactaccgtggaatacctcattaacctcctggagaccgagagcttccagaacaacgacatcgacaccgggtggttggactacctcattgctgagaaagtgcaggcggagaaaccggatatcatgcttggggtggtatgcggggccttgaacgtggccgatgcgatgttcagaacgtgcatgacagatttcttacactccctggaaaggggccaggtcctcccagcggattcactactgaacctcgtagatgtggaattaatttacggaggtgttaagtacattctcaaggtggcccggcagtctctgaccatgttcgttctcatcatgaatggctgccacatcgagattgatgcccaccggctgaatgatggggggctcctgctctcctacaatgggaacagctacaccacctacatgaaggaagaggttgacagttaccgaattaccatcggcaataagacgtgtgtgtttgagaaggagaacgatcctacagtcctgagatccccctcggctgggaagctgacacagtacacagtggaggatgggggccacgttgaggctgggagcagctacgctgagatggaggtgatgaagatgatcatgaccctgaacgttcaggaaagaggccgggtgaagtacatcaagcgtccaggtgccgtgctggaagcaggctgcgtggtggccaggctggagctcgatgacccttctaaagtccacccggctgaaccgttcacaggagaactccctgcccagcagacactgcccatcctcggagagaaactgcaccaggtcttccacagcgtcctggaaaacctcaccaacgtcatgagtggcttttgtctgccagagcccgtttttagcataaagctgaaggagtgggtgcagaagctcatgatgaccctccggcacccgtcactgccgctgctggagctgcaggagatcatgaccagcgtggcaggccgcatccccgcccctgtggagaagtctgtccgcagggtgatggcccagtatgccagcaacatcacctcggtgctgtgccagttccccagccagcagatagccaccatcctggactgccatgcagccaccctgcagcggaaggctgatcgagaggtcttcttcatcaacacccagagcatcgtgcagttggtccagagcaaggatgagctgtgtggcccagacccttccctgtcggacgagctgatctccatcctcaacgagctcactcagctgagcaaaagcgagcactgcaaagtggccctcagagcccggcagatcctgattgcctcccacctcccctcctacgagctgcggcataaccaggtggagtccattttcctgtctgccattgacatgtacggccaccagttctgccccgagaacctcaagaaattaatactttcggaaacaaccatcttcgacgtcctgcctactttcttctatcacgcaaacaaagtcgtgtgcatggcgtccttggaggtttacgtgcggaggggctacatcgcctatgagttaaacagcctgcagcaccggcagctcccggacggcacctgcgtggtagaattccagttcatgctgccgtcctcccacccaaaccggatgaccgtgcccatcagcatcaccaaccctgacctgctgaggcacagcacagagctcttcatggacagcggcttctccccactgtgccagcgcatgggagccatggtagccttcaggagattcgaggacttcaccagaaattttgatgaagtcatctcttgcttcgccaacgtgcccaaagacacccccctcttcagcgaggcccgcacctccctatactccgaggatgactgcaagagcctcagagaagagcccatccacattctgaatgtgtccatccagtgtgcagaccacctggaggatgaggcactggtgccgattttacggacattcgtacagtccaagaaaaatatccttgtggattatggactccgacgaatcacattcttgattgcccaagagaaagaatttcccaagtttttcacattcagagcaagagatgagtttgcagaagatcgcatttaccgtcacttggaacctgccctggccttccagctggaacttaaccggatgcgtaacttcgatctgaccgccgtgccctgtgccaaccacaagatgcacctttacctgggtgctgccaaggtgaaggaaggtgtggaagtgacggaccataggttcttcatccgcgccatcatcaggcactctgacctgatcacaaaggaagcctccttcgaatacctgcagaacgagggtgagcggctgctcctggaggccatggacgagctggaggtggcgttcaataacaccagcgtgcgcaccgactgcaaccacatcttcctcaacttcgtgcccactgtcatcatggaccccttcaagatcgaggagtccgtgcgctacatggttatgcgctacggcagccggctgtggaaactccgtgtgctacaggctgaggtcaagatcaacatccgccagaccaccaccggcagtgccgttcccatccgcctgttcatcaccaatgagtcgggctactacctggacatcagcctctacaaagaagtgactgactccagatctggaaatatcatgtttcactccttcggcaacaagcaagggccccagcacgggatgctgatcaatactccctacgtcaccaaggatctgctccaggccaagcgattccaggcccagaccctgggaaccacctacatctatgacttcccggaaatgttcaggcaggctctctttaaactgtggggctccccagacaagtatcccaaagacatcctgacatacactgaattagtgttggactctcagggccagctggtggagatgaaccgacttcctggtggaaatgaggtgggcatggtggccttcaaaatgaggtttaagacccaggagtacccggaaggacgggatgtgatcgtcatcggcaatgacatcacctttcgcattggatcctttggccctggagaggaccttctgtacctgcgggcatccgagatggcccgggcagagggcattcccaaaatttacgtggcagccaacagtggcgcccgtattggcatggcagaggagatcaaacacatgttccacgtggcttgggtggacccagaagacccccacaaaggatttaaatacctgtacctgactccccaagactacaccagaatcagctccctgaactccgtccactgtaaacacatcgaggaaggaggagagtccagatacatgatcacggatatcatcgggaaggatgatggcttgggcgtggagaatctgaggggctcaggcatgattgctggggagtcctctctggcttacgaagagatcgtcaccattagcttggtgacctgccgagccattgggattggggcctacttggtgaggctgggccagcgagtgatccaggtggagaattcccacatcatcctcacaggagcaagtgctctcaacaaggtcctgggaagagaggtctacacatccaacaaccagctgggtggcgttcagatcatgcattacaatggtgtctcccacatcaccgtgccagatgactttgagggggtttataccatcctggagtggctgtcctatatgccaaaggataatcacagccctgtccctatcatcacacccactgaccccattgacagagaaattgaattcctcccatccagagctccctacgacccccggtggatgcttgcaggaaggcctcacccaactctgaagggaacgtggcagagcggattctttgaccacggcagtttcaaggaaatcatggcaccctgggcgcagaccgtggtgacaggacgagcaaggcttggggggattcccgtgggagtgattgctgtggagacacggactgtggaggtggcagtccctgcagaccctgccaacctggattctgaggccaagataattcagcaggcaggacaggtgtggttcccagactcagcctacaaaaccgcccaggccgtcaaggacttcaaccgggagaagttgcccctgatgatctttgccaactggagggggttctccggtggcatgaaagacatgtatgaccaggtgctgaagtttggagcctacatcgtggacggccttagacaatacaaacagcccatcctgatctatatcccgccctatgcggagctccggggaggctcctgggtggtcatagatgccaccatcaacccgctgtgcatagaaatgtatgcagacaaagagagcaggggtggtgttctggaaccagaggggacagtggagattaagttccgaaagaaagatctgataaagtccatgagaaggatcgatccagcttacaagaagctcatggaacagctaggggaacctgatctctccgacaaggaccgaaaggacctggagggccggctaaaggctcgcgaggacctgctgctccccatctaccaccaggtggcggtgcagttcgccgacttccatgacacacccggccggatgctggagaagggcgtcatatctgacatcctggagtggaagaccgcacgcaccttcctgtattggcgtctgcgccgcctcctcctggaggaccaggtcaagcaggagatcctgcaggccagcggggagctgagtcacgtgcatatccagtccatgctgcgtcgctggttcgtggagacggagggggctgtcaaggcctacttgtgggacaacaaccaggtggttgtgcagtggctggaacagcactggcaggcaggggatggcccgcgctccaccatccgtgagaacatcacgtacctgaagcacgactctgtcctcaagaccatccgaggcctggttgaagaaaaccccgaggtggccgtggactgtgtgatatacctgagccagcacatcagcccagctgagcgggcgcaggtcgttcacctgctgtctaccatggacagcccggcctccacctgaccgtggcccgcccagccactcccgggaccacggcaaaaggaaccacccagacccaccacccgtacaccctcagcagaccctgaagacttgcttttaaacaaagaaaatcctgggcacttctgcagggctgctggttccgagctgacacccgtcttaacaaaaggcccaggagtgcctcttccaaacaaaaacagcctcctctccatagctgggaagtttattttgttttgtctctgaagacagcagttttattgcatcactaaatctaatcaagctaaaacatccctgtttccttttgcaaaacagtgcctggcatgtgggatccaggcgttctttaggatccttggataccacatcgtgaaatcttttatttttttactctgagaccagcaccagatgtaagtaagcatctcatatatttcagccaaataaatgggccaagggaaaaaaatatatatatatagacaggactagagaaaacctatttttgtaatgatgtttctttggatactgtctagtcacccagaaaaatgtatggatgaatttttttttttttttttgagacaaagtctcactgtgtcatgcaggctggagtgcagtggcatgatctcactgcaacctccatctcctgtctcagcctcctagataactgggattacaggtgcccaccaccatgcccggctaatttttgtatttttggtagagacagagtttcaccaggttggtcaggctggtctcaaactcttgacttcaggtaatccacccaccttggcctcccaaagtgctgggattacaggcatgagccaccatcttcagccagatgatttttttattgagagagtgaaatgctattttgttccccaaatggcgctagtgaatcactaggagggtcccactgataggccatgtttagcactggttgccagggattctctttttgagagagggaaagcaaaatgaatggaagtacccagctggaggtttcagggcttctggaggatgctctcgcatagctcgaggtcctctgcccacctcttctctccaaggaaaatgaggactgccccttccccctgcaggattggcccccagcctgcgcatgcaccctcctcttgcccaagtggggagcacagaggcggagaggaatcccttaccacacccacggcccagcttgctcacgagtgtcacctctgtgacggtcaccactgctcccttggagggccacttgagttactgttgcttcctcgcctgctggcttgatgagcaccgatggtgggatctgaccccgaggggcagagctgtcggtgactgaggactggactgtggtgaccatgccgatttgctcagggagaacgttgcaatgcacccagcagctcctggctctgcaggcggcacagcctggggccctgtgatcctctggtttcttccattggggcggagtcggggatggagggagctggccacaacccactgctctgatgggtggtttgtccaaggatgctgaatgtaatgcctggtcaatgtggaagcccatgaggttgcccagggaagcctccaaaagctgggatgcttgagggtatccaagttgaaaaagacaaaatctgaccatcagccagtgacagtcctggcaaatgaaggtggggcggggcagtgaggggtgggagaaggtgaatgattcattattccaccccgaggtttgctggggtgaggggaagaatcgatgctgctttgggaactgaaggtttttctgttgggaaggccctcttggttttggagagaaagacaagttatgagtagctgctaccctggaacggtgggcagagagcctactaggaaatgtgcagaataaactattttttgaagg

SEQ ID NO: 559 - DNA, 6931 bp, Homo sapiens
  source 1..6931: mol_type = unassigned DNA
ctcccatttcttttgaaaccccctcaaaccctcccctcgcccgatgcgatgttcagaacgtgcatgacagatttcttacactccctggaaaggggccaggtcctcccagcggattcactactgaacctcgtagatgtggaattaatttacggaggtgttaagtacattctcaaggtggcccggcagtctctgaccatgttcgttctcatcatgaatggctgccacatcgagattgatgcccaccggctgaatgatggggggctcctgctctcctacaatgggaacagctacaccacctacatgaaggaagaggttgacagttaccgaattaccatcggcaataagacgtgtgtgtttgagaaggagaacgatcctacagtcctgagatccccctcggctgggaagctgacacagtacacagtggaggatgggggccacgttgaggctgggagcagctacgctgagatggaggtgatgaagatgatcatgaccctgaacgttcaggaaagaggccgggtgaagtacatcaagcgtccaggtgccgtgctggaagcaggctgcgtggtggccaggctggagctcgatgacccttctaaagtccacccggctgaaccgttcacaggagaactccctgcccagcagacactgcccatcctcggagagaaactgcaccaggtcttccacagcgtcctggaaaacctcaccaacgtcatgagtggcttttgtctgccagagcccgtttttagcataaagctgaaggagtgggtgcagaagctcatgatgaccctccggcacccgtcactgccgctgctggagctgcaggagatcatgaccagcgtggcaggccgcatccccgcccctgtggagaagtctgtccgcagggtgatggcccagtatgccagcaacatcacctcggtgctgtgccagttccccagccagcagatagccaccatcctggactgccatgcagccaccctgcagcggaaggctgatcgagaggtcttcttcatcaacacccagagcatcgtgcagttggtccagagataccgcagcgggatccgcggctatatgaaaacagtggtgttggatctcctgagaagatacttgcgtgttgagcaccattttcagcaagcccactacgacaagtgtgtgataaacctcagggagcagttcaagccagacatgtcccaggtgctggactgcatcttctcccacgcacaggtggccaagaagaaccagctggtgatcatgttgatcgatgagctgtgtggcccagacccttccctgtcggacgagctgatctccatcctcaacgagctcactcagctgagcaaaagcgagcactgcaaagtggccctcagagcccggcagatcctgattgcctcccacctcccctcctacgagctgcggcataaccaggtggagtccattttcctgtctgccattgacatgtacggccaccagttctgccccgagaacctcaagaaattaatactttcggaaacaaccatcttcgacgtcctgcctactttcttctatcacgcaaacaaagtcgtgtgcatggcgtccttggaggtttacgtgcggaggggctacatcgcctatgagttaaacagcctgcagcaccggcagctcccggacggcacctgcgtggtagaattccagttcatgctgccgtcctcccacccaaaccggatgaccgtgcccatcagcatcaccaaccctgacctgctgaggcacagcacagagctcttcatggacagcggcttctccccactgtgccagcgcatgggagccatggtagccttcaggagattcgaggacttcaccagaaattttgatgaagtcatctcttgcttcgccaacgtgcccaaagacacccccctcttcagcgaggcccgcacctccctatactccgaggatgactgcaagagcctcagagaagagcccatccacattctgaatgtgtccatccagtgtgcagaccacctggaggatgaggcactggtgccgattttacggacattcgtacagtccaagaaaaatatccttgtggattatggactccgacgaatcacattcttgattgcccaagagaaagaatttcccaagtttttcacattcagagcaagagatgagtttgcagaagatcgcatttaccgtcacttggaacctgccctggccttccagctggaacttaaccggatgcgtaacttcgatctgaccgccgtgccctgtgccaaccacaagatgcacctttacctgggtgctgccaaggtgaaggaaggtgtggaagtgacggaccataggttcttcatccgcgccatcatcaggcactctgacctgatcacaaaggaagcctccttcgaatacctgcagaacgagggtgagcggctgctcctggaggccatggacgagctggaggtggcgttcaataacaccagcgtgcgcaccgactgcaaccacatcttcctcaacttcgtgcccactgtcatcatggaccccttcaagatcgaggagtccgtgcgctacatggttatgcgctacggcagccggctgtggaaactccgtgtgctacaggctgaggtcaagatcaacatccgccagaccaccaccggcagtgccgttcccatccgcctgttcatcaccaatgagtcgggctactacctggacatcagcctctacaaagaagtgactgactccagatctggaaatatcatgtttcactccttcggcaacaagcaagggccccagcacgggatgctgatcaatactccctacgtcaccaaggatctgctccaggccaagcgattccaggcccagaccctgggaaccacctacatctatgacttcccggaaatgttcaggcaggctctctttaaactgtggggctccccagacaagtatcccaaagacatcctgacatacactgaattagtgttggactctcagggccagctggtggagatgaaccgacttcctggtggaaatgaggtgggcatggtggccttcaaaatgaggtttaagacccaggagtacccggaaggacgggatgtgatcgtcatcggcaatgacatcacctttcgcattggatcctttggccctggagaggaccttctgtacctgcgggcatccgagatggcccgggcagagggcattcccaaaatttacgtggcagccaacagtggcgcccgtattggcatggcagaggagatcaaacacatgttccacgtggcttgggtggacccagaagacccccacaaaggatttaaatacctgtacctgactccccaagactacaccagaatcagctccctgaactccgtccactgtaaacacatcgaggaaggaggagagtccagatacatgatcacggatatcatcgggaaggatgatggcttgggcgtggagaatctgaggggctcaggcatgattgctggggagtcctctctggcttacgaagagatcgtcaccattagcttggtgacctgccgagccattgggattggggcctacttggtgaggctgggccagcgagtgatccaggtggagaattcccacatcatcctcacaggagcaagtgctctcaacaaggtcctgggaagagaggtctacacatccaacaaccagctgggtggcgttcagatcatgcattacaatggtgtctcccacatcaccgtgccagatgactttgagggggtttataccatcctggagtggctgtcctatatgccaaaggataatcacagccctgtccctatcatcacacccactgaccccattgacagagaaattgaattcctcccatccagagctccctacgacccccggtggatgcttgcaggaaggcctcacccaactctgaagggaacgtggcagagcggattctttgaccacggcagtttcaaggaaatcatggcaccctgggcgcagaccgtggtgacaggacgagcaaggcttggggggattcccgtgggagtgattgctgtggagacacggactgtggaggtggcagtccctgcagaccctgccaacctggattctgaggccaagataattcagcaggcaggacaggtgtggttcccagactcagcctacaaaaccgcccaggccgtcaaggacttcaaccgggagaagttgcccctgatgatctttgccaactggagggggttctccggtggcatgaaagacatgtatgaccaggtgctgaagtttggagcctacatcgtggacggccttagacaatacaaacagcccatcctgatctatatcccgccctatgcggagctccggggaggctcctgggtggtcatagatgccaccatcaacccgctgtgcatagaaatgtatgcagacaaagagagcaggggtggtgttctggaaccagaggggacagtggagattaagttccgaaagaaagatctgataaagtccatgagaaggatcgatccagcttacaagaagctcatggaacagctaggggaacctgatctctccgacaaggaccgaaaggacctggagggccggctaaaggctcgcgaggacctgctgctccccatctaccaccaggtggcggtgcagttcgccgacttccatgacacacccggccggatgctggagaagggcgtcatatctgacatcctggagtggaagaccgcacgcaccttcctgtattggcgtctgcgccgcctcctcctggaggaccaggtcaagcaggagatcctgcaggccagcggggagctgagtcacgtgcatatccagtccatgctgcgtcgctggttcgtggagacggagggggctgtcaaggcctacttgtgggacaacaaccaggtggttgtgcagtggctggaacagcactggcaggcaggggatggcccgcgctccaccatccgtgagaacatcacgtacctgaagcacgactctgtcctcaagaccatccgaggcctggttgaagaaaaccccgaggtggccgtggactgtgtgatatacctgagccagcacatcagcccagctgagcgggcgcaggtcgttcacctgctgtctaccatggacagcccggcctccacctgaccgtggcccgcccagccactcccgggaccacggcaaaaggaaccacccagacccaccacccgtacaccctcagcagaccctgaagacttgcttttaaacaaagaaaatcctgggcacttctgcagggctgctggttccgagctgacacccgtcttaacaaaaggcccaggagtgcctcttccaaacaaaaacagcctcctctccatagctgggaagtttattttgttttgtctctgaagacagcagttttattgcatcactaaatctaatcaagctaaaacatccctgtttccttttgcaaaacagtgcctggcatgtgggatccaggcgttctttaggatccttggataccacatcgtgaaatcttttatttttttactctgagaccagcaccagatgtaagtaagcatctcatatatttcagccaaataaatgggccaagggaaaaaaatatatatatatagacaggactagagaaaacctatttttgtaatgatgtttctttggatactgtctagtcacccagaaaaatgtatggatgaatttttttttttttttttgagacaaagtctcactgtgtcatgcaggctggagtgcagtggcatgatctcactgcaacctccatctcctgtctcagcctcctagataactgggattacaggtgcccaccaccatgcccggctaatttttgtatttttggtagagacagagtttcaccaggttggtcaggctggtctcaaactcttgacttcaggtaatccacccaccttggcctcccaaagtgctgggattacaggcatgagccaccatcttcagccagatgatttttttattgagagagtgaaatgctattttgttccccaaatggcgctagtgaatcactaggagggtcccactgataggccatgtttagcactggttgccagggattctctttttgagagagggaaagcaaaatgaatggaagtacccagctggaggtttcagggcttctggaggatgctctcgcatagctcgaggtcctctgcccacctcttctctccaaggaaaatgaggactgccccttccccctgcaggattggcccccagcctgcgcatgcaccctcctcttgcccaagtggggagcacagaggcggagaggaatcccttaccacacccacggcccagcttgctcacgagtgtcacctctgtgacggtcaccactgctcccttggagggccacttgagttactgttgcttcctcgcctgctggcttgatgagcaccgatggtgggatctgaccccgaggggcagagctgtcggtgactgaggactggactgtggtgaccatgccgatttgctcagggagaacgttgcaatgcacccagcagctcctggctctgcaggcggcacagcctggggccctgtgatcctctggtttcttccattggggcggagtcggggatggagggagctggccacaacccactgctctgatgggtggtttgtccaaggatgctgaatgtaatgcctggtcaatgtggaagcccatgaggttgcccagggaagcctccaaaagctgggatgcttgagggtatccaagttgaaaaagacaaaatctgaccatcagccagtgacagtcctggcaaatgaaggtggggcggggcagtgaggggtgggagaaggtgaatgattcattattccaccccgaggtttgctggggtgaggggaagaatcgatgctgctttgggaactgaaggtttttctgttgggaaggccctcttggttttggagagaaagacaagttatgagtagctgctaccctggaacggtgggcagagagcctactaggaaatgtgcagaataaactattttttgaagg

SEQ ID NO: 560 - DNA, 583 bp, Homo sapiens
  source 1..583: mol_type = unassigned DNA
cttagtcaccctgtgggcgcctgtcagcctcactcaagaatggagctggtggctgcatccccagtgacgattttctgaatggtcttgcttctttgtctatcttgtctgattttctcctgtctgaccttttcctggttaaaaatctgggggaaaatgacggactccaagccgatcaccaagagtaaatcagaagcaaacctcatcccgagccaggagccctttccagcctctgataactcaggggagacaccgcagagaaatggggagggccacactctgcccaagacacccagccaggccgagccagcctcccacaaaggccccaaagatgccggtcggcggagaaactccctaccaccctcccaccagaagcccccaagaaaccccctttcttccagtgacgcagcaccctccccagagcttcaagccaacgggactgggacacaaggtctggaggccacagataccaatggcctgtcctcctcagccaggccccagggccagcaagctggctccccctccaaagaagacaagaagcaggcaaacatcaagaggcagctgatgaccaacttcatcctgggct

SEQ ID NO: 561 - DNA, 3643 bp, Homo sapiens
  source 1..3643: mol_type = unassigned DNA
gatgaccgtgcccatcagcatcaccaaccctgacctgctgaggcacagcacagagctcttcatggacagcggcttctccccactgtgccagcgcatgggagccatggtagccttcaggagattcgaggacttcaccagaaattttgatgaagtcatctcttgcttcgccaacgtgcccaaagacacccccctcttcagcgaggcccgcacctccctatactccgaggatgactgcaagagcctcagagaagagcccatccacattctgaatgtgtccatccagtgtgcagaccacctggaggatgaggcactggtgccgattttacggacattcgtacagtccaagaaaaatatccttgtggattatggactccgacgaatcacattcttgattgcccaagagaaagaatttcccaagtttttcacattcagagcaagagatgagtttgcagaagatcgcatttaccgtcacttggaacctgccctggccttccagctggaacttaaccggatgcgtaacttcgatctgaccgccgtgccctgtgccaaccacaagatgcacctttacctgggtgctgccaaggtgaaggaaggtgtggaagtgacggaccataggttcttcatccgcgccatcatcaggcactctgacctgatcacaaaggaagcctccttcgaatacctgcagaacgagggtgagcggctgctcctggaggccatggacgagctggaggtggcgttcaataacaccagcgtgcgcaccgactgcaaccacatcttcctcaacttcgtgcccactgtcatcatggaccccttcaagatcgaggagtccgtgcgctacatggttatgcgctacggcagccggctgtggaaactccgtgtgctacaggctgaggtcaagatcaacatccgccagaccaccaccggcagtgccgttcccatccgcctgttcatcaccaatgagtcgggctactacctggacatcagcctctacaaagaagtgactgactccagatctggaaatatcatgtttcactccttcggcaacaagcaagggccccagcacgggatgctgatcaatactccctacgtcaccaaggatctgctccaggccaagcgattccaggcccagaccctgggaaccacctacatctatgacttcccggaaatgttcaggcaggctctctttaaactgtggggctccccagacaagtatcccaaagacatcctgacatacactgaattagtgttggactctcagggccagctggtggagatgaaccgacttcctggtggaaatgaggtgggcatggtggccttcaaaatgaggtttaagacccaggagtacccggaaggacgggatgtgatcgtcatcggcaatgacatcacctttcgcattggatcctttggccctggagaggaccttctgtacctgcgggcatccgagatggcccgggcagagggcattcccaaaatttacgtggcagccaacagtggcgcccgtattggcatggcagaggagatcaaacacatgttccacgtggcttgggtggacccagaagacccccacaaaggatttaaatacctgtacctgactccccaagactacaccagaatcagctccctgaactccgtccactgtaaacacatcgaggaaggaggagagtccagatacatgatcacggatatcatcgggaaggatgatggcttgggcgtggagaatctgaggggctcaggcatgattgctggggagtcctctctggcttacgaagagatcgtcaccattagcttggtgacctgccgagccattgggattggggcctacttggtgaggctgggccagcgagtgatccaggtggagaattcccacatcatcctcacaggagcaagtgctctcaacaaggtcctgggaagagaggtctacacatccaacaaccagctgggtggcgttcagatcatgcattacaatggtgtctcccacatcaccgtgccagatgactttgagggggtttataccatcctggagtggctgtcctatatgccaaaggataatcacagccctgtccctatcatcacacccactgaccccattgacagagaaattgaattcctcccatccagagctccctacgacccccggtggatgcttgcaggaaggcctcacccaactctgaagggaacgtggcagagcggattctttgaccacggcagtttcaaggaaatcatggcaccctgggcgcagaccgtggtgacaggacgagcaaggcttggggggattcccgtgggagtgattgctgtggagacacggactgtggaggtggcagtccctgcagaccctgccaacctggattctgaggccaagataattcagcaggcaggacaggtgtggttcccagactcagcctacaaaaccgcccaggccgtcaaggacttcaaccgggagaagttgcccctgatgatctttgccaactggagggggttctccggtggcatgaaagggtgcctggggacctggagagatgtgtcttggtggaagataagggccatgttgcccatgcacattggggaaggatcagtgtgactacatgtatgaccaggtgctgaagtttggagcctacatcgtggacggccttagacaatacaaacagcccatcctgatctatatcccgccctatgcggagctccggggaggctcctgggtggtcatagatgccaccatcaacccgctgtgcatagaaatgtatgcagacaaagagagcaggggtggtgttctggaaccagaggggacagtggagattaagttccgaaagaaagatctgataaagtccatgagaaggatcgatccagcttacaagaagctcatggaacagctaggggaacctgatctctccgacaaggaccgaaaggacctggagggccggctaaaggctcgcgaggacctgctgctccccatctaccaccaggtggcggtgcagttcgccgacttccatgacacacccggccggatgctggagaagggcgtcatatctgacatcctggagtggaagaccgcacgcaccttcctgtattggcgtctgcgccgcctcctcctggaggaccaggtcaagcaggagatcctgcaggccagcggggagctgagtcacgtgcatatccagtccatgctgcgtcgctggttcgtggagacggagggggctgtcaaggcctacttgtgggacaacaaccaggtggttgtgcagtggctggaacagcactggcaggcaggggatggcccgcgctccaccatccgtgagaacatcacgtacctgaagcacgactctgtcctcaagaccatccgaggcctggttgaagaaaaccccgaggtggccgtggactgtgtgatatacctgagccagcacatcagcccagctgagcgggcgcaggtcgttcacctgctgtctaccatggacagcccggcctccacctgaccgtggcccgcccagccactcccgggaccacggcaaaaggaaccacccagacccaccacccgtacaccctcagcagaccctgaagacttgcttttaaacaaagaaaatcctgggcacttctgcagggctgctggttccgagctgacacccgtcttaacaaaaggcccaggagtgcctcttcc

SEQ ID NO: 562 - DNA, 1087 bp, Homo sapiens
  source 1..1087: mol_type = unassigned DNA
agaggctccggaagccacggctggattggagacaagatgggatcctcagaggaccaggcctatcgcctccttaatgactacgccaacggcttcatggtgtcccaggttctcttcgccgcctgcgagctgggcgtgtttgaccttctcgccgaggccccagggcccctggacgtggcggcagtggctgcaggtgtgagggccagcgcccatgggacagagctcctgctggacatctgtgtgtccctgaagctgctgaaagtggagacgaggggaggaaaagctttctatcgaaacacagagctgtccagcgactacctgaccacggtcagcccgacgtcacaatgcagcatgctgaagtacatgggcaggaccagctaccggtgctggggccacctggcagacgccgtgagagaaggaaggaaccagtacctggagacgtttggcgttcccgctgaagagctttttacggccatctacaggtccgagggcgagcggctacagttcatgcaagctctgcaggaggtctggagcgtcaacgggagaagcgtgctgaccgcctttgacctgtcagtgttcccacttatgtgtgaccttggtggtggggctggagctctggctaaggaatgcatgtctctgtaccctggatgtaagatcaccgtttttgacatcccagaagtggtgtggacggcaaagcagcacttctcattccaggaggaagaacagattgacttccaggaaggggatttcttcaaagaccctcttccggaagctgatctgtacatcctggccagggtcctccatgactgggcagacggaaagtgctcacacctgctggagaggatctaccacacttgcaagccaggtggtggcattctggtaattgaaagcctcctggatgaagacaggcgaggtcctctgctcacgcagctctactctctgaacatgcttgtgcagacggaagggcaggagaggacccccacccactaccacatgctcctctcttctgctggcttcagagacttccagtttaagaaaacaggagccatttatgatgccattttagccaggaaataactgtttcttgtga

SEQ ID NO: 563 - DNA, 989 bp, Homo sapiens
  source 1..989: mol_type = unassigned DNA
aagccacggctggattggagacaagatgggatcctcagaggaccaggcctatcgcctccttaatgactacgccaacggcttcatggtgtcccaggttctcttcgccgcctgcgagctgggcgtgtttgaccttctcgccgaggccccagggcccctggacgtggcggcagtggctgcaggtgtgagggccagcgcccatgggacagagctcctgctggacatctgtgtgtccctgaagctgctgaaagtggagacgaggggaggaaaagctttctatcgaaacacagagctgtccagcgactacctgaccacggtcagcccgacgtcacaatgcagcatgctgaagtacatgggcaggaccagctaccggtgctggggccacctggcagacgccgtgagagaaggaaggaaccagtacctggagacgtttggcgttcccgctgaagagctttttacggccatctacaggtccgagggcgagcggctacagttcatgcaagctctgcaggaggtctggagcgtcaacgggagaagcgtgctgaccgcctttgacctgtcagtgttcccacttatgtgtgaccttggtggggatttcttcaaagaccctcttccggaagctgatctgtacatcctggccagggtcctccatgactgggcagacggaaagtgctcacacctgctggagaggatctaccacacttgcaagccaggtggtggcattctggtaattgaaagcctcctggatgaagacaggcgaggtcctctgctcacgcagctctactctctgaacatgcttgtgcagacggaagggcaggagaggacccccacccactaccacatgctcctctcttctgctggcttcagagacttccagtttaagaaaacaggagccatttatgatgccattttagccaggaaataactgtttcttgtgacctggaactaacgtcaaagcacacaagacataataataaagacatgtacctcca

SEQ ID NO: 564 - DNA, 1388 bp, Homo sapiens
  source 1..1388: mol_type = unassigned DNA
cacacgctttgtgatcccctaatacggttaatgcaaatttctagagtgatccgtctttgtttgagtactgggcaggcagcagggagagtcaggcagcagctgtgagcgggtggctcttccccaccttgccagcaggctctgtgctccttgaagcaagcgctccagaggctccggaagccacggctggattggagacaagatgggatcctcagaggaccaggcctatcgcctccttaatgactacgccaacggcttcatggtgtcccaggttctcttcgccgcctgcgagctgggcgtgtttgaccttctcgccgaggccccagggcccctggacgtggcggcagtggctgcaggtgtgagggccagcgcccatgggacagagctcctgctggacatctgtgtgtccctgaagctgctgaaagtggagacgaggggaggaaaagctttctatcgaaacacagagctgtccagcgactacctgaccacggtcagcccgacgtcacaatgcagcatgctgaagtacatgggcaggaccagctaccggtgctggggccacctggcagacgccgtgagagaaggaaggaaccagtacctggagacgtttggcgttcccgctgaagagctttttacggccatctacaggtccgagggcgagcggctacagttcatgcaagctctgcaggaggtctggagcgtcaacgggagaagcgtgctgaccgcctttgacctgtcagtgttcccacttatgtgtgaccttggtgggacatggataaagctggaaaccatcattctcagcaaactatcgcaaggacagaaaaccaaacaccgcgtgttctcactcataggtggggctggagctctggctaaggaatgcatgtctctgtaccctggatgtaagatcaccgtttttgacatcccagaagtggtgtggacggcaaagcagcacttctcattccaggaggaagaacagattgacttccaggaaggggatttcttcaaagaccctcttccggaagctgatctgtacatcctggccagggtcctccatgactgggcagacggaaagtgctcacacctgctggagaggatctaccacacttgcaagccaggtggtggcattctggtaattgaaagcctcctggatgaagacaggcgaggtcctctgctcacgcagctctactctctgaacatgcttgtgcagacggaagggcaggagaggacccccacccactaccacatgctcctctcttctgctggcttcagagacttccagtttaagaaaacaggagccatttatgatgccattttagccaggaaataactgtttcttgtgacctggaactaacgtcaaagcacacaagacataataataaagacatgtacctcca

SEQ ID NO: 565 - DNA, 442 bp, Homo sapiens
  source 1..442: mol_type = unassigned DNA
gattgcaggctgacctcggtgtgcctgccctgtgttccaggggatttcttcaaagaccctcttccggaagctgatctgtacatcctggccagggtcctccatgactgggcagacggaaagtgctcacacctgctggagaggatctaccacacttgcaagccaggtggtggcattctggtaattgaaagcctcctggatgaagacaggcgaggtcctctgctcacgcagctctactctctgaacatgcttgtgcagacggaagggcaggagaggacccccacccactaccacatgctcctctcttctgctggcttcagagacttccagtttaagaaaacaggagccatttatgatgccattttagccaggaaataactgtttcttgtgacctggaactaacgtcaaagcacacaagacataataataaagacatgtacctcca

SEQ ID NO: 566 - DNA, 2472 bp, Homo sapiens
  source 1..2472: mol_type = unassigned DNA
cttctggccagggaacgtggaaggcgcaccgacagggatccggccagggagggcgagtgaaagaaggaaatcagaaaggaagggagttaacaaaataataaaaacagcctgagccacggctggagagaccgagacccggcgcaagagagcgcagccttagtaggagaggaacgcgagacgcggcagagcgcgttcagcactgacttttgctgctgcttctgcttttttttttcttagaaacaagaaggcgccagcggcagcctcacacgcgagcgccacgcgaggctcccgaagccaacccgcgaagggaggaggggagggaggaggaggcggcgtgcagggaggagaaaaagcattttcactttttttgctcccactctaagaagtctcccggggattttgtatatattttttaacttccgtcagggctcccgcttcatatttccttttctttccctctctgttcctgcacccaagttctctctgtgtccccctcgcgggccccgcacctcgcgtcccggatcgctctgattccgcgactccttggccgccgctgcgcatggaaagctctgccaagatggagagcggcggcgccggccagcagccccagccgcagccccagcagcccttcctgccgcccgcagcctgtttctttgccacggccgcagccgcggcggccgcagccgccgcagcggcagcgcagagcgcgcagcagcagcagcagcagcagcagcagcagcagcaggcgccgcagctgagaccggcggccgacggccagccctcagggggcggtcacaagtcagcgcccaagcaagtcaagcgacagcgctcgtcttcgcccgaactgatgcgctgcaaacgccggctcaacttcagcggctttggctacagcctgccgcagcagcagccggccgccgtggcgcgccgcaacgagcgcgagcgcaaccgcgtcaagttggtcaacctgggctttgccacccttcgggagcacgtccccaacggcgcggccaacaagaagatgagtaaggtggagacactgcgctcggcggtcgagtacatccgcgcgctgcagcagctgctggacgagcatgacgcggtgagcgccgccttccaggcaggcgtcctgtcgcccaccatctcccccaactactccaacgacttgaactccatggccggctcgccggtctcatcctactcgtcggacgagggctcttacgacccgctcagccccgaggagcaggagcttctcgacttcaccaactggttctgaggggctcggcctggtcaggccctggtgcgaatggactttggaagcagggtgatcgcacaacctgcatctttagtgctttcttgtcagtggcgttgggagggggagaaaaggaaaagaaaaaaaaaagaagaagaagaagaaaagagaagaagaaaaaaacgaaaacagtcaaccaaccccatcgccaactaagcgaggcatgcctgagagacatggctttcagaaaacgggaagcgctcagaacagtatctttgcactccaatcattcacggagatatgaagagcaactgggacctgagtcaatgcgcaaaatgcagcttgtgtgcaaaagcagtgggctcctggcagaagggagcagcacacgcgttatagtaactcccatcacctctaacacgcacagctgaaagttcttgctcgggtcccttcacctcctcgccctttcttaaagtgcagttcttagccctctagaaacgagttggtgtctttcgtctcagtagcccccaccccaataagctgtagacattggtttacagtgaaactatgctattctcagccctttgaaactctgcttctcctccagggcccgattcccaaaccccatggcttccctcacactgtcttttctaccattttcattatagaatgcttccaatcttttgtgaattttttattataaaaaatctatttgtatctatcctaaccagttcggggatatattaagatatttttgtacataagagagaaagagagagaaaaatttatagaagttttgtacaaatggtttaaaatgtgtatatcttgatactttaacatgtaatgctattacctctgcatattttagatgtgtagttcaccttacaactgcaattttccctatgtggttttgtaaagaactctcctcataggtgagatcaagaggccaccagttgtacttcagcaccaatgtgtcttactttatagaaatgttgttaatgtattaatgatgttattaaatactgttcaagaagaacaaagtttatgcagctactgtccaaactcaaagtggcagccagttggttttgataggttgccttttggagatttctattactgcctttttttttcttactgttttattacaaacttacaaaaatatgtataaccctgttttatacaaactagtttcgtaataaaactttttcctttttttaaaatgaaaataa

SEQ ID NO: 567 - DNA, 1852 bp, Homo sapiens
  source 1..1852: mol_type = unassigned DNA
ctggcggctcttgggactggcggggctgcgcgcggggttagggtgggggtacgggaaggctcaacccaggacctgcgtaccttgctttgggggcgcactaagcacctgccgggagcagggggcgcaccgggaactcgcagatttcgccagttgggcgcactggggatctgtggactgcgtccgggggatgggctagggggacatgcgcacgctttgggccttacagaatgtgatcgcgcgagggggagggcgaagcgtggcgggagggcgaggcgaaggaaggagggcgtgagaaaggcgacggcggcggcgcggaggagggttatctatacatttaaaaaccagccgcctgcgccgcgcctgcggagacctgggagagtccggccgcacgcgcgggacacgagcgtcccacgctccctggcgcgtacggcctgccaccactaggcctcctatccccgggctccagacgacctaggacgcgtgccctggggagttgcctggcggcgccgtgccagaagcccccttggggcgccacagttttccccgtcgcctccggttcctctgcctgcaccttcctgcggcgcgccgggacctggagcgggcgggtggatgcaggcgcgatggacggcggcacactgcccaggtccgcgccccctgcgccccccgtccctgtcggctgcgctgcccggcggagacccgcgtccccggaactgttgcgctgcagccggcggcggcgaccggccaccgcagagaccggaggcggcgcagcggccgtagcgcggcgcaatgagcgcgagcgcaaccgcgtgaagctggtgaacttgggcttccaggcgctgcggcagcacgtgccgcacggcggcgccagcaagaagctgagcaaggtggagacgctgcgctcagccgtggagtacatccgcgcgctgcagcgcctgctggccgagcacgacgccgtgcgcaacgcgctggcgggagggctgaggccgcaggccgtgcggccgtctgcgccccgcgggccgccagggaccaccccggtcgccgcctcgccctcccgcgcttcttcgtccccgggccgcgggggcagctcggagcccggctccccgcgttccgcctactcgtcggacgacagcggctgcgaaggcgcgctgagtcctgcggagcgcgagctactcgacttctccagctggttagggggctactgagcgccctcgacctatgagcctcagccccggaagccgagcgagcggccggcgcgctcatcgccggggagcccgccaggtggaccggcccgcgctccgcccccagcgagccggggacccacccaccaccccccgcaccgccgacgccgcctcgttcgtccggcccagcctgaccaatgccgcggtggaaacgggcttggagctggccccataagggctggcggcttcctccgacgccgcccctccccacagcttctcgactgcagtggggcggggggcaccaacacttggagatttttccggaggggagaggattttctaagggcacagagaatccattttctacacattaacttgagctgctggagggacactgctggcaaacggagacctatttttgtacaaagaacccttgacctggggcgtaataaagatgacctggacccctgcccccactatctggagttttccatgctggccaagatctggacacgagcagtccctgaggggcggggtccctggcgtgaggcccccgtgacagcccaccctggggtgggtttgtgggcactgctgctctgctagggagaagcctgtgtggggcacacctcttcaagggagcgtgaactttataaataaatcagttctgtttacca

SEQ ID NO: 568 - DNA, 1703 bp, Homo sapiens
  source 1..1703: mol_type = unassigned DNA
ccgcctcgccgtttgtcccttgcggtacccgtccgcatacgaatctagcccgggaaccgagttgcgggagtgcggtctgtgccgttccggccaggagtttgccgactgcagacgtcctgcgaaccggcaagatgtgctctctggggttgttccctcctccaccgcctcggggtcaagtcaccctatatgagcacaataacgagctggtgacgggcagtagctatgagagcccgccccccgacttccggggccagtggatcaatcttcctgtcctacaactgacaaaggatcccctaaagacccctggaaggctggaccatggcacaagaactgccttcatccatcaccgggagcaagtgtggaagagatgcatcaacatttggcgtgatgtgggcctttttggggtgctaaatgaaattgcaaactcagaagaagaggtgtttgagtgggtgaagacggcatccggctgggccctggcactctgtcgatgggcctcttccctccatgggtccctgttcccccatctgtctctcaggagcgaagatctgatcgctgaatttgcccaagtcacaaattgcaccatagtcccctccctgaagcaccggctgcagcgaaatgtggcgtctctggcctggaagccccttagtgcctctgtcttggctgtggcctgccagagctgcattcttatctggaccctggaccctacctccttgtctacccgaccctcttctggctgtgcccaagtgctgtctcaccctgggcatacacctgttaccagcttggcctgggcccccagtggggggcggctgctctcagcttcacccgtggatgctgctatccgggtatgggatgtctcaacagagacctgtgtcccccttccctggttccgaggaggtggggtgaccaacctgctctggtccccagacggcagcaaaatcctggctaccactccttcagctgtctttcgagtctgggaggcccagatgtggacttgtgagaggtggcctactctatcagggcgctgtcagactggctgctggagcccagatggcagccgactgctgttcactgtattgggagagccactgatttactccctgtcttttccagaacgttgtggtgagggaaaggggtgcgttggaggtgcaaagtcagcaacgattgtggcagatctgtctgagacaacaatacagacaccagatggtgaggagaggcttgggggagaggctcactccatggtctgggaccccagtggggaacgtctggctgtgcttatgaaaggaaagccaagggtacaggatggtaaaccagtcatcctcctttttcgcactcgaaacagccctgtgtttgagctccttccctgtggcattatccagggggagccaggagcccagccccagctcatcactttccatccttccttcaacaaaggggccctgctcagtgtgggctggtccacaggccgaattgcccacatcccgctgtactttgtcaatgcccagtttccacgttttagcccagtgcttgggcgggcccaggaaccccctgctgggggtggaggctctattcatgacctgcccctctttactgagacatccccaacctctgccccttgggaccctctcccagggccaccacctgttctgccccactccccacattcccacctctaagaataaataagttttccttttgttttccac

SEQ ID NO: 569 - DNA, 1840 bp, Homo sapiens
  source 1..1840: mol_type = unassigned DNA
tttcccgttagtcttttcttcacttccgttgagttccgcctcgccgtttgtcccttgcggtacccgtccgcatacgaatctagcccgggaaccgagttgcgggagtgcggtctgtgccgttccggccaggagtttgccgactgcagacgtcctgcgaaccggcaagatgtgctctctggggttgttccctcctccaccgcctcggggtcaagtcaccctatatgagcacaataacgagctggtgacgggcagtagctatgagagcccgccccccgacttccggggccagtggatcaatcttcctgtcctacaactgacaaaggatcccctaaagacccctggaaggctggaccatggcacaagaactgccttcatccatcaccgggagcaagtgtggaagagatgcatcaacatttggcgtgatgtgggcctttttggggtgctaaatgaaattgcaaactcagaagaagaggtgtttgagtgggtgaagacggcatccggctgggccctggcactctgtcgatgggcctcttccctccatgggtccctgttcccccatctgtctctcaggagcgaagatctgatcgctgaatttgcccaagtcacaaattggtccagctgctgcttgcgtgtctttgcatggcacccccacaccaacaagtttgcagtggccctgctagatgactcagtccgtgtgtataatgccagcagcaccatagtcccctccctgaagcaccggctgcagcgaaatgtggcgtctctggcctggaagccccttagtgcctctgtcttggctgtggcctgccagagctgcattcttatctggaccctggaccctacctccttgtctacccgaccctcttctggctgtgcccaagtgctgtctcaccctgggcatacacctgttaccagcttggcctgggcccccagtggggggcggctgctctcagcttcacccgtggatgctgctatccgggtatgggatgtctcaacagagacctgtgtcccccttccctggttccgaggaggtggggtgaccaacctgctctggtccccagacggcagcaaaatcctggctaccactccttcagctgtctttcgagtctgggaggcccagatgtggacttgtgagaggtggcctactctatcagggcgctgtcagactggctgctggagcccagatggcagccgactgctgttcactgtattgggagagccactgatttactccctgtcttttccagaacgttgtggtgagggaaaggggtgcgttggaggtgcaaagtcagcaacgattgtggcagatctgtctgagacaacaatacagacaccagatggtgaggagaggcttgggggagaggctcactccatggtctgggaccccagtggggaacgtctggctgtgcttatgaaaggaaagccaagggtacaggatggtaaaccagtcatcctcctttttcgcactcgaaacagccctgtgtttgagctccttccctgtggcattatccagggggagccaggagcccagccccagctcatcactttccatccttccttcaacaaaggggccctgctcagtgtgggctggtccacaggccgaattgcccacatcccgctgtactttgtcaatgcccagtttccacgttttagcccagtgcttgggcgggcccaggaaccccctgctgggggtggaggctctattcatgacctgcccctctttactgagacatccccaacctctgccccttgggaccctctcccagggccaccacctgttctgccccactccccacattcccacctctaagaataaataagttttccttttgttttccactca

SEQ ID NO: 570 - DNA, 703 bp, Homo sapiens
  source 1..703: mol_type = unassigned DNA
agtgcgcctgcgccgcgtcggcgtgcggaacgccgcggtgtctcggcgcctctgcgcgcgggaagatggcggaacaggctaccaagtccgtgctgtttgtgtgtctgggtaacatttgtcgatcacccattgcagaagcagttttcaggaaacttgtaaccgatcaaaacatctcagagaattggagggtagacagcgcggcaacttccgggtatgagatagggaacccccctgactaccgagggcagagctgcatgaagaggcacggcattcccatgagccacgttgcccggcaggtaccgtccttggacttgaagttgtgtgttttgtgtttcagtgggtcattgacagcggtgctgtttctgactggaacgtgggccggtccccagacccaagagctgtgagctgcctaagaaatcatggcattcacacagcccataaagcaagacaggtagacaagctcttgttcaatttctaatatatagagtccagtaacttgagaagtagcgaaaggattaaccagacttgtatattaatgaatgtgtttatttagggtgagcttaaccagctatggtgtgtccattttgtttcacttctggttgcacggtgttgaaagacttgcctgactttggaatttacttattaaaatgcacataaaagctaggtaatttataatgagagagcctgactgtgagctggggct

SEQ ID NO: 571 - DNA, 1549 bp, Homo sapiens
  source 1..1549: mol_type = unassigned DNA
gcgcaggcgcgcggggcaagagggtggcagtgcgcctgcgccgcgtcggcgtgcggaacgccgcggtgtctcggcgcctctgcgcgcgggaagatggcggaacaggctaccaagtccgtgctgtttgtgtgtctgggtaacatttgtcgatcacccattgcagaagcagttttcaggaaacttgtaaccgatcaaaacatctcagagaattggagggtagacagcgcggcaacttccgggtatgagatagggaacccccctgactaccgagggcagagctgcatgaagaggcacggcattcccatgagccacgttgcccggcagattaccaaagaagattttgccacatttgattatatactatgtatggatgaaagcaatctgagagatttgaatagaaaaagtaatcaagttaaaacctgcaaagctaaaattgaactacttgggagctatgatccacaaaaacaacttattattgaagatccctattatgggaatgactctgactttgagacggtgtaccagcagtgtgtcaggtgctgcagagcgttcttggagaaggcccactgaggcaggttcgtgccctgctgcggccagcctgactagaccccaccctgaggtcctgcatttctcagtcggtgtgtaatcacgttccagggcccaaagcccagctctttgttcagttgacttactgtttcttaccttaaaaagtaattgtagatggaaatcagttgtgtttggcaggagaatcaataaaaatctttgattcagacagcttatggggtattttaagcattcttagactagttgaacatctcactttgccccagttacaaaaatagtagaacaagcaacataaaacaatgaaggaaaacctcacttgaaggcccaggtcaacatctaagcctgttgagacttagataatcgagtctacctcttcagtaggtttgtgtggatggcctggagggcaggtgccctctgctccccagtgctacctctctcttccctagggccttttgtggattgacagtagtcccctccgtaggagctcacagtctagattagaagtgttttaatttctacacacccatagtgcacacttgtatattgaaaagatagggaagagagaaacatttatggaatcagtcgttggcaccttcaatacttcatgatttttgtcgagtttacttcatgaggaggtcagcccattggctcccatctgaaccactttgcctctgaaacttaattacatccagaaagaaggacacttgtatgctagtctatggtcagttgaggaatatgactgtttttatatgcacatgtaacccaaatgtccaatataaattggcttattttttaaaataattttaaaagttgggaaaagtgttattatttggcatgcttaaatattgaataagtattcttcatcagcatttaataaatgtataggcagatgtaaggtaatttctgtgtattttgagataatgtcaaaatcatgaatatttcaaaataaactggggagttataaaaatacaactagagatataaa

SEQ ID NO: 572 - DNA, 1552 bp, Homo sapiens
  source 1..1552: mol_type = unassigned DNA
actgcgcaggcgcgcggggcaagagggtggcagtgcgcctgcgccgcgtcggcgtgcggaacgccgcggtgtctcggcgcctctgcgcgcgggaagatggcggaacaggctaccaagtccgtgctgtttgtgtgtctgggtaacatttgtcgatcacccattgcagaagcagttttcaggaaacttgtaaccgatcaaaacatctcagagaattgggtcattgacagcggtgctgtttctgactggaacgtgggccggtccccagacccaagagctgtgagctgcctaagaaatcatggcattcacacagcccataaagcaagacagattaccaaagaagattttgccacatttgattatatactatgtatggatgaaagcaatctgagagatttgaatagaaaaagtaatcaagttaaaacctgcaaagctaaaattgaactacttgggagctatgatccacaaaaacaacttattattgaagatccctattatgggaatgactctgactttgagacggtgtaccagcagtgtgtcaggtgctgcagagcgttcttggagaaggcccactgaggcaggttcgtgccctgctgcggccagcctgactagaccccaccctgaggtcctgcatttctcagtcggtgtgtaatcacgttccagggcccaaagcccagctctttgttcagttgacttactgtttcttaccttaaaaagtaattgtagatggaaatcagttgtgtttggcaggagaatcaataaaaatctttgattcagacagcttatggggtattttaagcattcttagactagttgaacatctcactttgccccagttacaaaaatagtagaacaagcaacataaaacaatgaaggaaaacctcacttgaaggcccaggtcaacatctaagcctgttgagacttagataatcgagtctacctcttcagtaggtttgtgtggatggcctggagggcaggtgccctctgctccccagtgctacctctctcttccctagggccttttgtggattgacagtagtcccctccgtaggagctcacagtctagattagaagtgttttaatttctacacacccatagtgcacacttgtatattgaaaagatagggaagagagaaacatttatggaatcagtcgttggcaccttcaatacttcatgatttttgtcgagtttacttcatgaggaggtcagcccattggctcccatctgaaccactttgcctctgaaacttaattacatccagaaagaaggacacttgtatgctagtctatggtcagttgaggaatatgactgtttttatatgcacatgtaacccaaatgtccaatataaattggcttattttttaaaataattttaaaagttgggaaaagtgttattatttggcatgcttaaatattgaataagtattcttcatcagcatttaataaatgtataggcagatgtaaggtaatttctgtgtattttgagataatgtcaaaatcatgaatatttcaaaataaactggggagttataaaaatacaactagagatataaa

SEQ ID NO: 573 - DNA, 574 bp, Homo sapiens
  source 1..574: mol_type = unassigned DNA
atggcggaacaggctaccaagtccgtgctgtttgtgtgtctgggtaacatttgtcgatcacccattgcagaagcagttttcaggaaacttgtaaccgatcaaaacatctcagagaattggagggtagacagcgcggcaacttccggtgggtcattgacagcggtgctgtttctgactggaacgtgggccggtccccagaccaagagctgtgctgcctaagaaatcatggcattcacacagcccataaagcaagacagattaccaaagaagattttgccacatttgattatatactatgtatggatgaaagcaatctgagagatttgaatagaaaaagtaatcaagttaaaacctgcaaagctaaaattgaactacttgggagctatgatccacaaaaacaacttattattgaagatccctattatgggaatgactctgactttgagacggtgtaccagcagtgtgtcaggtgctgcagagcgttcttggagaaggcccactgaggcaggttcgtgccctgctgcggccagcctgactagaccccaccctgaggtcctgcatttctcagtcggtg

SEQ ID NO: 574 - DNA, 593 bp, Homo sapiens
  source 1..593: mol_type = unassigned DNA
ttgtttgctgcatagattacaacggtgatggcgggcaagcggtccggctggagccgggcggctctcctccagctccttctcggcgtgaacctggtggtgatgccgcccacccgggcccggagtctgcgcttcgttaccttgctgtaccgccatggagaccgttcaccagtgaagacatatcccaaggacccctatcaggaagaagaatggccccaggggtttggtcagttaaccaaggaggggatgctacagcactgggaactgggccaggccctgcggcagcgctatcacggcttcctaaacacctcttatcaccggcaagaggtttatgtgcgaagcacagactttgaccggactctcatgagtgctgaggccaacctggctggactcttccctcccaacgggatgcagcgcttcaacccgaacatctcgtggcagcctattcctgtgcacactgtgcccatcactgaggacagggtaagagtggccagcccttccctggggtggtgaggggacagctctggccgtaggcctgctgatgccaggctccttttcccgctgcctgtttccccgcttcgctctacagctgctga

SEQ ID NO: 575 - DNA, 2203 bp, Homo sapiens
  source 1..2203: mol_type = unassigned DNA
aagtaagatggcggcgaacgcacttccggcgtgtgtccttacgggtgcgtccgggcggctgcttgcaggtgccacccagcgggttccagcttgtttgctgcatagattacaacggtgatggcgggcaagcggtccggctggagccgggcggctctcctccagctccttctcggcgtgaacctggtggtgatgccgcccacccgggcccggagtctgcgcttcgttaccttgctgtaccgccatggagaccgttcaccagtgaagacatatcccaaggacccctatcaggaagaagaatggccccaggggtttggtcagttaaccaaggaggggatgctacagcactgggaactgggccaggccctgcggcagcgctatcacggcttcctaaacacctcttatcaccggcaagaggtttatgtgcgaagcacagactttgaccggactctcatgagtgctgaggccaacctggctggactcttccctcccaacgggatgcagcgcttcaacccgaacatctcgtggcagcctattcctgtgcacactgtgcccatcactgaggacaggctgctgaagttcccgttgggcccatgtccccgttatgagcagctgcagaacgagacccggcagacaccagagtatcagaatgagagttctcggaatgcacaatttctggacatggtggccaacgagacagggcttacagacctgacactggagaccgtctggaatgtctatgacacactcttctgtgagcaaacgcacgggctgcgcctgccgccctgggcctcaccccaaaccatgcagcgtctcagccggctaaaggacttcagcttccgcttcctcttcggaatctaccagcaggcggagaaggcccggcttcaggggggagtcctgctggctcagataaggaagaacctgaccctaatggcgaccacctcccagctccccaagctgctggtttactctgcgcacgacactaccctggttgccctgcaaatggcactggatgtctacaatggtgaacaagccccctacgcctcctgccacatatttgaactgtaccaggaagattctgggaatttctcagtggagatgtactttcggaacgagagtgacaaggccccctggccgctcagcctgcctggctgccctcaccgctgcccactgcaggacttccttcgcctcacagagcccgtcgtgcccaaggattggcagcaggagtgccagctggcaagcggtcctgcagacacagaggtgattgtggccttggctgtatgtggctccatcctcttcctcctcatagtgctgctcctcaccgtcctcttccggatgcaggcccagcctcctggctaccgccacgtcgcagatggggaggaccacgcctgacaaccactcagcccccttccctccacctcctaggggaggtgggctgggccctcgctcctgactgttgctgctccccagcccatggacaggagatcctgggttgggcctccctctgatgaccccagccagatgagcgagtggggctcagcgtggcccatggtgcctgtcactcagcattcccatgcctgatgtttaccaagtgctgtgttggacactggctttctccaaacaggatttgcctcctccacgctccctacacacctgagatgtaaactggcagtcagtgttcactcaggacctaggattagaaaatggcagagttggtgctggatccaccttgcacttctatcaagccctgttctttttcctccagcctgaagtcttcggcaaatagctcagagggacacggtcttgcctctcagtgcttattttagtgggaaaaacagctaataccaggggtacaaacattggctcccaaggaactggatcacccaacagccagccagccacatttccctgtgtctggctagagccaccattagactcagacagaatgcttcaggaatcgttgtcaccccttcaactggagcaggacggaaggttgtctgtacttgggagggagtagggagtggtgggaagggagttgcttgtcacacgaatcaggaaactgctctccctcagctgggctggggtctccagggacctgagctacatgcaggttgtgagctggaaaagaaagttctagactgtggcccagaatagggctggggcagctcccagagaatgaatagtgctgtttcctattggactgata

SEQ ID NO: 576 - DNA, 1499 bp, Homo sapiens
  source 1..1499: mol_type = unassigned DNA
agcttgtttgctgcatagattacaacggtgatggcgggcaagcggtccggctggagccgggcggctctcctccagctccttctcggcgtgaacctggtggtgatgccgcccacccgggcccggagtctgcgcttcgttaccttggaggggatgctacagcactgggaactgggccaggccctgcggcagcgctatcacggcttcctaaacacctcttatcaccggcaagaggtttatgtgcgaagcacagactttgaccggactctcatgagtgctgaggccaacctggctggactcttccctcccaacgggatgcagcgcttcaacccgaacatctcgtggcagcctattcctgtgcacactgtgcccatcactgaggacaggctgctgaagttcccgttgggcccatgtccccgttatgagcagctgcagaacgagacccggcagacaccagagtatcagaatgagagttctcggaatgcacaatttctggacatggtggccaacgagacagggcttacagacctgacactggagaccgtctggaatgtctatgacacactcttctgtgagcaaacgcacgggctgcgcctgccgccctgggcctcaccccaaaccatgcagcgtctcagccggctaaaggacttcagcttccgcttcctcttcggaatctaccagcaggcggagaaggcccggcttcaggggggagtcctgctggctcagataaggaagaacctgaccctaatggcgaccacctcccagctccccaagctgctggtttactctgcgcacgacactaccctggttgccctgcaaatggcactggatgtctacaatggtgaacaagccccctacgcctcctgccacatatttgaactgtaccaggaagattctgggaatttctcagtggagatgtactttcggaacgagagtgacaaggccccctggccgctcagcctgcctggctgccctcaccgctgcccactgcaggacttccttcgcctcacagagcccgtcgtgcccaaggattggcagcaggagtgccagctggcaagcggtcctgcagacacagaggtgattgtggccttggctgtatgtggctccatcctcttcctcctcatagtgctgctcctcaccgtcctcttccggatgcaggcccagcctcctggctaccgccacgtcgcagatggggaggaccacgcctgacaaccactcagcccccttccctccacctcctaggggaggtgggctgggccctcgctcctgactgttgctgctccccagcccatggacaggagatcctgggttgggcctccctctgatgaccccagccagatgagcgagtggggctcagcgtggcccatggtgcctgtcactcagcattcccatgcctgatgtttaccaagtgctgtgttggacactggctttctccaaacaggatttgcctcctccacgctccctacacacctgagatgtaaactggcagtcagtgttcactc

SEQ ID NO: 577 - DNA, 1457 bp, Homo sapiens
  source 1..1457: mol_type = unassigned DNA
gtttgctgcatagattacaacggtgatggcgggcaagcggtccggctggagccgggcggctctcctccagctccttctcggcgtgaacctggtggtgatgccgcccacccgggcccggagtctgcgcttcgttaccttgctgtaccgccatggagaccgttcaccagtgaagacatatcccaaggacccctatcaggaagaagaatggccccaggggtttggtcagttaaccaaggaggggatgctacagcactgggaactgggccaggccctgcggcagcgctatcacggcttcctaaacacctcttatcaccggcaagaggtttatgtgcgaagcacagactttgaccggactctcatgagtgctgaggccaacctggctggactcttccctcccaacgggatgcagcgcttcaacccgaacatctcgtggcagcctattcctgtgcacactgtgcccatcactgaggacagggactgagaccctgatccatttttcatagcaatttctggacatggtggccaacgagacagggcttacagacctgacactggagaccgtctggaatgtctatgacacactcttctgtgagcaaacgcacgggctgcgcctgccgccctgggcctcaccccaaaccatgcagcgtctcagccggctaaaggacttcagcttccgcttcctcttcggaatctaccagcaggcggagaaggcccggcttcaggggggagtcctgctggctcagataaggaagaacctgaccctaatggcgaccacctcccagctccccaagctgctggtttactctgcgcacgacactaccctggttgccctgcaaatggcactggatgtctacaatggtgaacaagccccctacgcctcctgccacatatttgaactgtaccaggaagattctgggaatttctcagtggagatgtactttcggaacgagagtgacaaggccccctggccgctcagcctgcctggctgccctcaccgctgcccactgcaggacttccttcgcctcacagagcccgtcgtgcccaaggattggcagcaggagtgccagctggcaagcggtcctgcagacacagaggtgattgtggccttggctgtatgtggctccatcctcttcctcctcatagtgctgctcctcaccgtcctcttccggatgcaggcccagcctcctggctaccgccacgtcgcagatggggaggaccacgcctgacaaccactcagcccccttccctccacctcctaggggaggtgggctgggccctcgctcctgactgttgctgctccccagcccatggacaggagatcctgggttgggcctccctctgatgaccccagccagatgagcgagtggggctcagcgtggcccatggtgcctgtcactcagcattcccatgcctgatgtttaccaagtgctgtgttggacactggctttctccaaaca

SEQ ID NO: 578 - DNA, 1340 bp, Homo sapiens
  source 1..1340: mol_type = unassigned DNA
atagattacaacggtgatggcgggcaagcggtccggctggagccgggcggctctcctccagctccttctcggcgtgaacctggtggtgatgccgcccacccgggcccggagtctgcgcttcgttaccttgctgtaccgccatggagaccgttcaccagtgaagacatatcccaaggacccctatcaggaagaagaatggccccaggggtttggtcagttaaccaaggaggggatgctacagcgctatcacggcttcctaaacacctcttatcaccggcaagaggtttatgtgcgaagcacagactttgaccggactctcatgagtgctgaggccaacctggctggactcttccctcccaacgggatgcagcgcttcaacccgaacatctcgtggcagcctattcctgtgcacactgtgcccatcactgaggacaggctgctgaagttcccgttgggcccatgtccccgttatgagcagctgcagaacgagacccggcagacaccagagtatcagaatgagagttctcggaatgcacaatttctggacatggtggccaacgagacagggcttacagacctgacactggagaccgtctggaatgtctatgacacactcttctgtgagcaaacgcacgggctgcgcctgccgccctgggcctcaccccaaaccatgcagcgtctcagccggctaaaggacttcagcttccgcttcctcttcggaatctaccagcaggcggagaaggcccggcttcaggggggagtcctgctggctcagataaggaagaacctgaccctaatggcgaccacctcccagctccccaagctgctggtttactctgcgcacgacactaccctggttgccctgcaaatggcactggatgtctacaatggtgaacaagccccctacgcctcctgccacatatttgaactgtaccaggaagattctgggaatttctcagtggagatgtactttcggaacgagagtgacaaggccccctggccgctcagcctgcctggctgccctcaccgctgcccactgcaggacttccttcgcctcacagagcccgtcgtgcccaaggattggcagcaggagtgccagctggcaagcggtcctgcagacacagaggtgattgtggccttggctgtatgtggctccatcctcttcctcctcatagtgctgctcctcaccgtcctcttccggatgcaggcccagcctcctggctaccgccacgtcgcagatggggaggaccacgcctgacaaccactcagcccccttccctccacctcctaggggaggtgggctgggccctcgctcctgactgttgctgctccccagccca

SEQ ID NO: 579 - DNA, 1699 bp, Homo sapiens
  source 1..1699: mol_type = unassigned DNA
gctcacctgggtcagccctgagccctcgagcagggcggatcggccgctgcctgcttaaagctggggccgccaggagtgcgatcgcctgcggatctgcagctgggcaccggccgcaacgcccgccccgcgacggcagggctgggaatgggggggaccaagcacttcgcagggtgacccggggagatctgtgagccagtggcctcagcgttgaatgagagctctctcccgggtccgcgctcgcagggactgaagggactcctgaatgtccgcgggacgtgtcgcggcggcgcccagcacggaggaggcaggcagggagggaataaaggctcagggaccggcagttctactctagagcccaccagcctctcagagcctccggtgactggcctgtgtctccccctggatggacatgtggacggcgctgctcatcctgcaagccttgttgctaccctccctggctgatggtgccacccctgccctgcgctttgtagccgtgggtgactggggaggggtccccaatgccccattccacacggcccgggaaatggccaatgccaaggagatcgctcggactgtgcagatcctgggtgcagacttcatcctgtctctaggggacaatttttacttcactggtgtgcaagacatcaatgacaagaggttccaggagacctttgaggacgtattctctgaccgctcccttcgcaaagtgccctggtacgtgctagccggaaaccatgaccaccttggcaatgtctctgcccagattgcatactctaagatctccaagcgctggaacttccccagccctttctaccgcctgcacttcaagatcccacagaccaatgtgtctgtggccatttttatgctggacacagtgacactatgtggcaactcagatgacttcctcagccagcagcctgagaggccccgagacgtgaagctggcccgcacacagctgtcctggctcaagaaacagctggcggcggccagggaggactacgtgctggtggctggccactaccccgtgtggtccatagccgagcacgggcctacccactgcctggtcaagcagctacggccactgctggccacatacggggtcactgcctacctgtgcggccacgatcacaatctgcagtacctgcaagatgagaatggcgtgggctacgtgctgagtggggctgggaatttcatggacccctcaaagcggcaccagcgcaaggtccccaacggctatctgcgcttccactatgggactgaagactcactgggtggctttgcctatgtggagatcagctccaaagagatgactgtcacttacatcgaggcctcgggcaagtccctctttaagaccaggctgccgaggcgagccaggccctgaactcccatgactgcccagctctgaggcccgatctccactgttgggtgggtgggccctgccgggaccctgctcacaggcaggcttttcctccaacctgtggcgctgcagcagggcaggaaggggaaacacagctgatgaactgtggtgccacatgacccttgtggcacagatgcccacgtatgtgaaacacacatggacatgtgtcccagccacagtgttatgctctgtggctggctcacctttgctgagttccggggtgcaatgggggagggagggagggaaagcttcctcctaaatcaagcatctttctgttactga

SEQ ID NO: 580 - DNA, 1629 bp, Homo sapiens
  source 1..1629: mol_type = unassigned DNA
cgccggggctcacctgggtcagccctgagccctcgagcagggcggatcggccgctgcctgcttaaagctggggccgccaggagtgcgatcgcctgcggatctgcagctgggcaccggccgcaacgcccgccccgcgacggcagggactgaagggactcctgaatgtccgcgggacgtgtcgcggcggcgcccagcacggaggaggcaggcagggagggaataaaggctcagggaccggcagttctactctagagcccaccagcctctcagagcctccggtgactggcctgtgtctccccctggatggacatgtggacggcgctgctcatcctgcaagccttgttgctaccctccctggctgatggtgccacccctgccctgcgctttgtagccgtgggtgactggggaggggtccccaatgccccattccacacggcccgggaaatggccaatgccaaggagatcgctcggactgtgcagatcctgggtgcagacttcatcctgtctctaggggacaatttttacttcactggtgtgcaagacatcaatgacaagaggttccaggagacctttgaggacgtattctctgaccgctcccttcgcaaagtgccctggtacgtgctagccggaaaccatgaccaccttggcaatgtctctgcccagattgcatactctaagatctccaagcgctggaacttccccagccctttctaccgcctgcacttcaagatcccacagaccaatgtgtctgtggccatttttatgctggacacagtgacactatgtggcaactcagatgacttcctcagccagcagcctgagaggccccgagacgtgaagctggcccgcacacagctgtcctggctcaagaaacagctggcggcggccagggaggactacgtgctggtggctggccactaccccgtgtggtccatagccgagcacgggcctacccactgcctggtcaagcagctacggccactgctggccacatacggggtcactgcctacctgtgcggccacgatcacaatctgcagtacctgcaagatgagaatggcgtgggctacgtgctgagtggggctgggaatttcatggacccctcaaagcggcaccagcgcaaggtccccaacggctatctgcgcttccactatgggactgaagactcactgggtggctttgcctatgtggagatcagctccaaagagatgactgtcacttacatcgaggcctcgggcaagtccctctttaagaccaggctgccgaggcgagccaggccctgaactcccatgactgcccagctctgaggcccgatctccactgttgggtgggtgggccctgccgggaccctgctcacaggcaggcttttcctccaacctgtggcgctgcagcagggcaggaaggggaaacacagctgatgaactgtggtgccacatgacccttgtggcacagatgcccacgtatgtgaaacacacatggacatgtgtcccagccacagtgttatgctctgtggctggctcacctttgctgagttccggggtgcaatgggggagggagggagggaaagcttcctcctaaatcaagcatctttctgttactgatgttcaataaaagaatagttgccaaggctg

SEQ ID NO: 581 - DNA, 1556 bp, Homo sapiens
  source 1..1556: mol_type = unassigned DNA
cgccggggctcacctgggtcagccctgagccctcgagcagggcggatcggccgctgcctgcttaaagctggggccgccaggagtgcgatcgcctgcggatctgcagctgggcaccggccgcaacgcccgccccgcgacggcagggaataaaggctcagggaccggcagttctactctagagcccaccagcctctcagagcctccggtgactggcctgtgtctccccctggatggacatgtggacggcgctgctcatcctgcaagccttgttgctaccctccctggctgatggtgccacccctgccctgcgctttgtagccgtgggtgactggggaggggtccccaatgccccattccacacggcccgggaaatggccaatgccaaggagatcgctcggactgtgcagatcctgggtgcagacttcatcctgtctctaggggacaatttttacttcactggtgtgcaagacatcaatgacaagaggttccaggagacctttgaggacgtattctctgaccgctcccttcgcaaagtgccctggtacgtgctagccggaaaccatgaccaccttggcaatgtctctgcccagattgcatactctaagatctccaagcgctggaacttccccagccctttctaccgcctgcacttcaagatcccacagaccaatgtgtctgtggccatttttatgctggacacagtgacactatgtggcaactcagatgacttcctcagccagcagcctgagaggccccgagacgtgaagctggcccgcacacagctgtcctggctcaagaaacagctggcggcggccagggaggactacgtgctggtggctggccactaccccgtgtggtccatagccgagcacgggcctacccactgcctggtcaagcagctacggccactgctggccacatacggggtcactgcctacctgtgcggccacgatcacaatctgcagtacctgcaagatgagaatggcgtgggctacgtgctgagtggggctgggaatttcatggacccctcaaagcggcaccagcgcaaggtccccaacggctatctgcgcttccactatgggactgaagactcactgggtggctttgcctatgtggagatcagctccaaagagatgactgtcacttacatcgaggcctcgggcaagtccctctttaagaccaggctgccgaggcgagccaggccctgaactcccatgactgcccagctctgaggcccgatctccactgttgggtgggtgggccctgccgggaccctgctcacaggcaggcttttcctccaacctgtggcgctgcagcagggcaggaaggggaaacacagctgatgaactgtggtgccacatgacccttgtggcacagatgcccacgtatgtgaaacacacatggacatgtgtcccagccacagtgttatgctctgtggctggctcacctttgctgagttccggggtgcaatgggggagggagggagggaaagcttcctcctaaatcaagcatctttctgttactgatgttcaataaaagaatagttgccaaggctg

SEQ ID NO: 582 - DNA, 1472 bp, Homo sapiens
  source 1..1472: mol_type = unassigned DNA
cccgggacagccctcggagaaactgcatcatcctcactaatgatccacttcctcctcagggaataaaggctcagggaccggcagttctactctagagcccaccagcctctcagagcctccggtgactggcctgtgtctccccctggatggacatgtggacggcgctgctcatcctgcaagccttgttgctaccctccctggctgatggtgccacccctgccctgcgctttgtagccgtgggtgactggggaggggtccccaatgccccattccacacggcccgggaaatggccaatgccaaggagatcgctcggactgtgcagatcctgggtgcagacttcatcctgtctctaggggacaatttttacttcactggtgtgcaagacatcaatgacaagaggttccaggagacctttgaggacgtattctctgaccgctcccttcgcaaagtgccctggtacgtgctagccggaaaccatgaccaccttggcaatgtctctgcccagattgcatactctaagatctccaagcgctggaacttccccagccctttctaccgcctgcacttcaagatcccacagaccaatgtgtctgtggccatttttatgctggacacagtgacactatgtggcaactcagatgacttcctcagccagcagcctgagaggccccgagacgtgaagctggcccgcacacagctgtcctggctcaagaaacagctggcggcggccagggaggactacgtgctggtggctggccactaccccgtgtggtccatagccgagcacgggcctacccactgcctggtcaagcagctacggccactgctggccacatacggggtcactgcctacctgtgcggccacgatcacaatctgcagtacctgcaagatgagaatggcgtgggctacgtgctgagtggggctgggaatttcatggacccctcaaagcggcaccagcgcaaggtccccaacggctatctgcgcttccactatgggactgaagactcactgggtggctttgcctatgtggagatcagctccaaagagatgactgtcacttacatcgaggcctcgggcaagtccctctttaagaccaggctgccgaggcgagccaggccctgaactcccatgactgcccagctctgaggcccgatctccactgttgggtgggtgggccctgccgggaccctgctcacaggcaggcttttcctccaacctgtggcgctgcagcagggcaggaaggggaaacacagctgatgaactgtggtgccacatgacccttgtggcacagatgcccacgtatgtgaaacacacatggacatgtgtcccagccacagtgttatgctctgtggctggctcacctttgctgagttccggggtgcaatgggggagggagggagggaaagcttcctcctaaatcaagcatctttctgttactgatgttcaataaaagaatagttgccaaggctg

SEQ ID NO: 583 - DNA, 3125 bp, Homo sapiens
  source 1..3125: mol_type = unassigned DNA
tcaatcccttaattaaatagcttcccctctacaggcttttgaagtggtagcagttcctcctaactcctgccagaaacagctctcctcaacatgagagctgcacccctcctcctggccagggcagcaagccttagccttggcttcttgtttctgctttttttctggctagaccgaagtgtactagccaaggagttgaagtttgtgactttggtgtttcggcatggagaccgaagtcccattgacacctttcccactgaccccataaaggaatcctcatggccacaaggatttggccaactcacccagctgggcatggagcagcattatgaacttggagagtatataagaaagagatatagaaaattcttgaatgagtcctataaacatgaacaggtttatattcgaagcacagacgttgaccggactttgatgagtgctatgacaaacctggcagccctgtttcccccagaaggtgtcagcatctggaatcctatcctactctggcagcccatcccggtgcacacagttcctctttctgaagatcagttgctatacctgcctttcaggaactgccctcgttttcaagaacttgagagtgagactttgaaatcagaggaattccagaagaggctgcacccttataaggattttatagctaccttgggaaaactttcaggattacatggccaggacctttttggaatttggagtaaagtctacgaccctttatattgtgagagtgttcacaatttcactttaccctcctgggccactgaggacaccatgactaagttgagagaattgtcagaattgtccctcctgtccctctatggaattcacaagcagaaagagaaatctaggctccaagggggtgtcctggtcaatgaaatcctcaatcacatgaagagagcaactcagataccaagctacaaaaaactcatcatgtattctgcgcatgacactactgtgagtggcctacagatggcgctagatgtttacaacggactccttcctccctatgcttcttgccacttgacggaattgtactttgagaagggggagtactttgtggagatgtactatcggaatgagacgcagcacgagccgtatcccctcatgctacctggctgcagccccagctgtcctctggagaggtttgctgagctggttggccctgtgatccctcaagactggtccacggagtgtatgaccacaaacagccatcaaggtactgaagacagtacagattagtgtgcacagagatctctgtagaaggagtagctgccctttctcagggcagatgatgctttgagaacatactttggccattacccccagctttgaggaaaatgggctttggatgattattttatgttttagggacccccaacctcaggcaattcctacctcttcacctgaccctgcccccacttgccataaaacttagctaagttttgttttgtttttcagcgttaatgtaaaggggcagcagtgccaaaatataatcagagataaagcttaggtcaaagttcatagagttcccatgaactatatgactggccacacaggatcttttgtatttaaggattctgagattttgcttgagcaggattagataaggctgttctttaaatgtctgaaatggaacagatttcaaaaaaaaaccccacaatctaggatgggaacaaggaaggaaagatgtgaataggctgatgggcaaaaaaccaatttacccatcagttccagccttctctcaaggagaggcaaagaaaggagatacagtggagacatctggaaagttttctccactggaaaactgctactatctgtttttatatttctgttaaaatatatgaggctacagaactaaaaattaaaacctctttgtgtcccttggtcctggaacatttatgttccttttaaagaaacaaaaatcaaactttacagaaagatttgatgtatgtaatacatatagcagctcttgaagtatatatatcatagcaaataagtcatctgatgagaacaagctatttgggcacaacacatcaggaaagagagcaccacgtgatggagtttctctagaagctccagtgataagagatgttgactctaaagttgatttaaggccaggcatggtggtttacgcctataatcccagcattttgggagtccgaggtgggcagatcacttgagctcaggaggtcaagatcagcctgggcaacatggtgaaacctggtctctacataaaatacaaaaacttagatgggcatggtggtgtgtgcctatagtcccactacttgtggggctaaggcaggaggatcacttgagccccggaggtcgaggctacagtgagccaagagtgcactactgtactccagccagggcaagagagcgagaccctgtctcaataaataaataaataaataaataaataaataaataaataaataaaaacaaagttgattaagaaaggaagtataggccaggcacagtggctcacacctgtaatccttgcattttggaaggctgaggcaggaggatcactttaggcctggtgtgttcaagaccagcctggtcaacatagtgagacactgtctctaccaaaaaaaggaaggaagggacacatatcaaactgaaacaaaattagaaatgtaattatgttctaagtgcctccaagttcaaaacttattggaatgttgagagtgtggttacgaaatacgttaggaggacaaaaggaatgtgtaagtctttaatgccgatatcttcagaaaacctaagcaaacttacaggtcctgctgaaactgcccactctgcaagaagaaatcatgatatagctttgccatgtggcagatctacatgtctagagaacactgtgctctattaccattatggataaagatgagatggtttctagagatggtttctactggctgccagaatctagagcaaagccatccccgctcctggttggtcacagaatgactgacaaagacatcgattgatatgcttctttgtgttatttccctcccaagtaaatgtttgtccttgggtccattttctatgcttgtaactgtcttctagcagtgagccaaatgtaaaatagtgaataaagtcattattaggaa

SEQ ID NO: 584 - DNA, 1783 bp, Homo sapiens
  source 1..1783: mol_type = unassigned DNA
gaagtggtagcagttcctcctaactcctgccagaaacagctctcctcaacatgagagctgcacccctcctcctggccagggcagcaagccttagccttggcttcttgtttctgctttttttctggctagaccgaagtgtactagccaaggagttgaagtttgtgactttggtgtttcggcatggagaccgaagtcccattgacacctttcccactgaccccataaaggaatcctcatggccacaaggatttggccaactcacccagctgggcatggagcagcattatgaacttggagagtatataagaaagagatatagaaaattcttgaatgagtcctataaacatgaacaggtttatattcgaagcacagacgttgaccggactttgatgagtgctatgacaaacctggcagccctgtttcccccagaaggtgtcagcatctggaatcctatcctactctggcagcccatcccggtgcacacagttcctctttctgaagatcagttgctatacctgcctttcaggaactgccctcgttttcaagaacttgagagtgagactttgaaatcagaggaattccagaagaggctgcacccttataaggattttatagctaccttgggaaaactttcaggattacatggccaggacctttttggaatttggagtaaagtctacgaccctttatattgtgagagtgttcacaatttcactttaccctcctgggccactgaggacaccatgactaagttgagagaattgtcagaattgtccctcctgtccctctatggaattcacaagcagaaagagaaatctaggctccaagggggtgtcctggtcaatgaaatcctcaatcacatgaagagagcaactcagataccaagctacaaaaaactcatcatgtattctgcgcatgacactactgtgagtggcctacagatggcgctagatgtttacaacggactccttcctccctatgcttcttgccacttgacggaattgtactttgagaagggggagtactttgtggagatgtactatcggaatgagacgcagcacgagccgtatcccctcatgctacctggctgcagccccagctgtcctctggagaggtttgctgagctggttggccctgtgatccctcaagactggtccacggagtgtatgaccacaaacagccatcaagttctaaaggtcatctttgctgttgccttttgcctgatatctgctgtcctaatggtactactgtttatccacattcgccgtggactctgctggcagagagaatcctatgggaacatctgaacagacagctggataagccaggccaacctcctgtgacacagcatctctcagtggtgccgcatctaaaggacaggcttttgccatgtgggcattgccatcctcacaccctgccttttgaatctgcccagagcagggtctgaactcacagtgacccacaggctgctgctggatgaacactcaggctacctaggtcttctcataatggagtggtagtgcaggctgcttgttcagctagaaagaggctgttatgcataggatggttgtattctctgccacagttgtccggagagaaataagaagccaaactccaatcagccttttacctgcaaagagtgaagggtgagaaggtggacaaagacatagattagaaaaatactggatattgggggaagttagactagaagtattattatacagggtgattcttacgaaagaagacccaatcataaattataaataaactttttatttagcta

SEQ ID NO: 585 - DNA, 1347 bp, Homo sapiens
  source 1..1347: mol_type = unassigned DNA
atggccggcctggggttttggggccaccctgctggacctctcctgctgctgctgctgctggtgctgccaccccgggccctgccagaaggacccctggtgttcgtggctctggtattccgccatggcgaccgggccccgctggcctcctaccccatggacccacacaaggaggtggcctccaccctgtggccacgaggcctgggccagctgaccacggagggggtccgccagcagctggagctgggccgcttcctgaggagccgctacgaggccttcctgagtccggagtaccggcgggaggaggtgtacatccgcagcacggactttgaccgcacgctggagagtgcccaggccaaccttgccgggctgtttcccgaggctgctccagggagccccgaggcccgctggaggccgatcccggtgcacacggtgcccgtggctgaggataagctgctgaggttccccatgcgcagctgtccccgataccacgagctgctgcgggaggccaccgaggccgccgagtaccaggaggccctggagggctggacgggcttcctgagtcgcctggagaacttcacgggactgtcgctggttggagagccactgcgcagggcatggaaggttctggacaccctcatgtgccagcaagcccacggtcttccactaccagcctgggcctccccagatgtcctgcggactcttgcccagatctcggctttggatattggagcccacgtgggcccaccccgggcagcagagaaggcccagctgacaggggggatcctgctgaatgctatccttgcaaacttctcccgggtccagcgcctggggctgcccctcaagatggtcatgtactcagctcatgacagcaccctgctggccctccagggggccctgggcctctatgatggacacaccccgccatatgctgcctgcctcggctttgagttccggaagcacctggggaatcccgccaaagatggagggaatgtcaccgtctccctcttctaccgcaatgactccgcccacctgcccctgcctctcagcctccccgggtgcccggccccctgtccactaggccgcttctaccagctgactgccccggcccggcctcccgcccatggggtctcctgccatggcccctatgaggctgccatccccccagctccagtggtgcccctgctggccggagctgtagctgtgctggtggcactcagcttggggctgggcctgctggcctggagaccagggtgcctgcgggccttggggggccccgtgtgagccagaaaccagggcttccctacccccagctgacactggaccccaacatgtatgctcagtagctgc

SEQ ID NO: 586 - DNA, 1068 bp, Homo sapiens
  source 1..1068: mol_type = unassigned DNA
atggccggcctggggttttggggccaccctgctggacctctcctgctgctgctgctgctggtgctgccaccccgggccctgccagaaggacccctggtgttcgtggctctggtattccgccatggcgaccgggccccgctggcctcctaccccatggacccacacaaggaggtggcctccaccctgtggccacgaggcctgggccagctgaccacggagggggtccgccagcagctggagctgggccgcttcctgaggagccgctacgagggcttcctgagtcgcctggagaacttcacgggactgtcgctggttggagagccactgcgcagggcatggaaggttctggacaccctcatgtgccagcaagcccacggtcttccactaccagcctgggcctccccagatgtcctgcggactcttgcccagatctcggctttggatattggagcccacgtgggcccaccccgggcagcagagaaggcccagctgacaggggggatcctgctgaatgctatccttgcaaacttctcccgggtccagcgcctggggctgcccctcaagatggtcatgtactcagctcatgacagcaccctgctggccctccagggggccctgggcctctatgatggacacaccccgccatatgctgcctgcctcggctttgagttccggaagcacctggggaatcccgccaaagatggagggaatgtcaccgtctccctcttctaccgcaatgactccgcccacctgcccctgcctctcagcctccccgggtgcccggccccctgtccactaggccgcttctaccagctgactgccccggcccggcctcccgcccatggggtctcctgccatggcccctatgaggctgccatccccccagctccagtggtgcccctgctggccggagctgtagctgtgctggtggcactcagcttggggctgggcctgctggcctggagaccagggtgcctgcgggccttggggggccccgtgtgagccagaaaccagggcttccctacccccagctgacactggaccccaacatgtatgctcagtagctgc

SEQ ID NO: 587 - DNA, 753 bp, Homo sapiens
  source 1..753: mol_type = unassigned DNA
gggctcgagaaccgagcggagctggttgagccttcaaagtcctaaaacgcgcggccgtgggttcggggtttattgattgaattccgccggcgcgggagcctctgcagagagagagcgcgagagatggagatgggcagacggattcatttagagctgcggaacaggacgccctctgatgtgaaagaacttgtcctggacaacagtcggtcgaatgaaggcaaactcgaaggcctcacagatgaatttgaagaactggaattcttaagtacaatcaacgtaggcctcacctcaatcgcaaacttaccaaagttaaacaaacttaagaagcttgaactaagcgataacagagtctcagggggcctggaagtattggcagaaaagtgtccgaacctcacgcatctaaatttaagtggcaacaaaattaaagacctcagcacaatagagccactgaaaaagttagaaaacctcaagagcttagaccttttcaattgcgaggtaaccaacctgaacgactaccgagaaaatgtgttcaagctcctcccgcaactcacatatctcgacggctatgaccgggacgacaaggaggcccctgactcggatgctgagggctacgtggagggcctggatgatgaggaggaggatgaggatgaggaggagtatgatgatgaagaaggttataacgatggagaggtagatgacgaggaagataaaaagaaaaagaaaaaaaaaaaaaaaaaaaaaaaaaaaaaaaaa

SEQ ID NO: 588 - DNA, 2440 bp, Homo sapiens
  source 1..2440: mol_type = unassigned DNA
agtgtgcgccgcgggtgctgggggctcgagaaccgagcggagctggttgagccttcaaagtcctaaaacgcgcggccgtgggttcggggtttattgattgaattccgccggcgcgggagcctctgcagagagagagcgcgagagatggagatgggcagacggattcatttagagctgcggaacaggacgccctctgatgtgaaagaacttgtcctggacaacagtcggtcgaatgaaggcaaactcgaaggcctcacagatgaatttgaagaactggaattcttaagtacaatcaacgtaggcctcacctcaatcgcaaacttaccaaagttaaacaaacttaagaagcttgaactaagcgataacagagtctcagggggcctggaagtattggcagaaaagtgtccgaacctcacgcatctaaatttaagtggcaacaaaattaaagacctcagcacaatagagccactgaaaaagttagaaaacctcaagagcttagaccttttcaattgcgaggtaaccaacctgaacgactaccgagaaaatgtgttcaagctcctcccgcaactcacatatctcgacggctatgaccgggacgacaaggaggcccctgactcggatgctgagggctacgtggagggcctggatgatgaggaggaggatgaggatgaggaggagtatgatgaagatgctcaggtagtggaagacgaggaggacgaggatgaggaggaggaaggtgaagaggaggacgtgagtggagaggaggaggaggatgaagaaggttataacgatggagaggtagatgacgaggaagatgaagaagagcttggtgaagaagaaaggggtcagaagcgaaaacgagaacctgaagatgagggagaagatgatgactaagtggaataacctattttgaaaaattcctattgtgatttgactgtttttacccatatcccctctcccccccccctccaatcctgccccctgaaacttatttttttctgattgtaacgttgctgtgggaacgagaggggaagagtgtactgggggttgcggggggagggatggcgggtgggggtggaataaaatactatttttactgccactctttatttttttcccctactttttctttgtgtccggtttttgtccctgtaaatgcgatagctaagtacacactaagtgagcatttgttcctgactctcaaagaggatggtttggagttctcttacgtttcctggtatttcccaagtctcttgggttggttggaaggctgtggctggtctcagtttggttactcaatgcccaggaggggctgagcaccagccatatcttttgctttggttcacatgatgatacctgcttttctcaggcctgctagaggcatccaacgccctggtttgtaaatagcaacctaaaggcgtattttggcactggtctggggacattccccatctctcatcccttttcccccttcacagatggtggtgggcttcgctctacaaagaggactctgatgttactcttgagcttatgagccagagagctgaaaaccgcaggcttgttgtgttaagttacaaggaaaatggatttggtaattaaaattagaagaaacacaccttcaaacttcaacttctttaaaagaaaaaaaaaactgtcctatcttgttctgtaaaatattagaacgctttgttttacaaaaaatgatgagagaattcttccacatgtacttctgtgcttagaacatttttacggacctaagcgctggagacgttgctgcatgtcggctgggttttttttttcatacacccgagcacggaaaaactaacgcaaaattgtattttcttacctagtggaaatctgaaatgactgcaaattcctagtgaatgtacaggtttgctttcgtgtccctcttctggttgctttagaagtgacgtgtaatttctgaacccatgtttcatctgtataaaagaacatctgcaccagtttttctcctgcccctcagaagagccaaactttgagttttatgtctgtttgtcattgataaatttcaataaatctttttatacaatttttttggggatggcttctttgagtccaacaggccattgatcttttcaagatgcattccagatgaactgctaggtgagggggaagcttcatttttgttacctgatagaatagcttttcttatgagatatatataatgtgatactatgtttggatatttttggtcttaaagcaagactcagtggtgtatcttcattaaaagcttcctttaaaaaagttacagagttactaaaaaaacaagtacccaaacaatcaagttgggccaaccttggaaccttgttttgaatatctttcattgttttgtttgtcgtattgtaaaaagaatgtatggttgaaaactcaggaatgtttataaaacaaattatttcacaaa

SEQ ID NO: 589 - DNA, 396 bp, Homo sapiens
  source 1..396: mol_type = unassigned DNA
atggagatgggcaaatggattcatttagagctgcggaacaggacgccctccgatgtgaaagaacttttcctggacaacagtcagtcaaatgaaggcaaattggaaggcctcacagatgaatttgaagaactggaattattaaatacaatcaacataggcctcacctcaattgcaaacttgccaaagttaaacaaacttaagaagcttgaactaagcagtaacagagcctcagtgggcctagaagtattggcagaaaagtgtccaaacctcatacatctaaatttaagtggcaacaaaattaaagacctcagcacaatagagcccctgaaaaagttagaaaacctcgagagcttagaccttttcacttgcgaggtaaccaacctgaacaactactga

SEQ ID NO: 590 - DNA, 3453 bp, Homo sapiens
  source 1..3453: mol_type = unassigned DNA
ggagtgtaggccagggggttggcggtgccgtgtcatggaggctcagtctctgagcagccattgaaggggaaggaactgcgggtgtgtgtgtgtatgtgtgtgtgtatgtgtgtgcgcgcgtgcgtgcgtgtgtgtgcgcgcgctagtgtgtggacaaggaggtgggggcagctgagttagagtcccaactcttggactccatttgctattctcttctttctcccccacacctatctggtggtggtagtgggcgtttatatttgcgttccttttcattcatttctaaatctcttaaaaattttgggttgggggtattggggaaggcaggaaagggaaaaggagagtagtagctgaagagcaagaggaggacatggagatgaagaagaagattaacctggagttaaggaacagatccccggaggaggtgacagagttagtccttgataattgcctgtgtgtcaatggggaaattgaaggcctgaatgatactttcaaagaactagaatttctgagtatggctaatgtggaactaagttcgctggcccggcttcccagcttaaataaacttcgaaaattggagcttagtgataatataatttctggaggcttggaagtcctggcagagaaatgtccaaatcttacctacctcaatctgagtggaaacaaaataaaagatctcagtacagtagaagctctgcaaaatcttaaaaatttgaaaagtcttgacctgtttaactgtgagatcacaaacctggaagattatagagaaagtatttttgaactactgcagcaaatcacatacttagatggatttgatcaggaggataatgaagcgccggactctgaagaggaggatgatgaggatggcgatgaagatgatgaagaggaagaggaaaatgaagctggtccaccggaaggatatgaggaagaggaggaggaagaggaagaggaggatgaggatgaggatgaagatgaagatgaagcaggttcagagttgggagagggagaagaggaagtgggcctctcatacttaatgaaagaagaaattcaggatgaagaagatgatgatgactatgttgaagaaggggaagaagaggaagaagaggaagaaggaggtcttcgaggggagaagaggaaacgagatgctgaagacgatggagaggaagaagatgactagatcattctaagaccagattctctaatgtttctgggtgtgcaatagagtgatcacatctttgtttcttcatgtacgatagctatccctacagaagataatgtgtaactttttataggaaaagtgtggttttactatttttgccttatcattccaaataagaactagtctgttaatgatcatattgtatgtagagaaaaattttcattgactcccattgtggaattccctagcaatttatttagacttaattttttaaattcaagcttactgtattagtcatttttagcccataattaaaacatgatcacttttacacaggtgtagtatggtgcatttcattccttatttataaattaactgaaattacagtttgctataatataaaatgacaatagtctcttgagtggtaagttggttatttttttagaggtgatccaggaatctttagtttgaaggcagttaccttttttttttttttttttttttgactaagagtgtttggttgcttttttgtcacaagtaacttggaaaatagaagcagaatagtaaaggttctattcagcaacatagttcatggattttgtggaggttctattcagtaatatggttcatggatttagtggtgactgataagattttatttttgaaggaaaaattgcttatactaagtccagagacatgcaggtgagcccttttgtcaggctgcaaatcatgacatgccgatggttgtttattttgtttttaggtgtgcattctttttcttcttagcaattcctttatgatcaccttcccttcttgtttcactccctcccgctctctcaaaaggaacttgggaaacttgtgaaacccaggaaaacctttagtcttatacctcaactacctttcagtcctgtctgggttttaaataagtgaagtagaagaaattgagtattttctgacataagaatatattatcaatacagttttatgcagtaagctctccttaccataaatgtttcttggttgacaacatctaagacaatattagtgggatgaagaaagaaaagcaggggtgcttttggaagcagtgttagtgttcctcaaaagtcggaacaattgcctgttgatatattaataagacattaaagtcaaattttaatgttggcctctcaaatgatttggataccactctgcaaagtatttctaacctttaattcccagttttaaaacagatataataatagcatttaattggaatatactaggcagctggaaaagtatttgaaactaaattgacattaaaattaagatttgttttcaagtggatgtccattaaaagtagaaaaatatttgggataagtgagtgtgtgtttccttacatggctactaaataaaatataatgagtatacaagtatatctcctcttttgctatggaggctccatgttcaaggcaatggctttttaaatcttggctatctaaaattttttccctttgttttgaatatttgtaagtttttaagaagttagtgtcagcaaattaattgaagttatgcttctatactgggacatatttaaatactgagtatagtactgctgctactgcttctacaatgtaaaatgtatgacttggtgttttaaagtaaaaattatgatgttacttgtggagaaactaaaaatgttgtacaactgaccgaaagaaaacccttggggataagtttagtgaggggattggaatccccaaaaagataacatttttcttctgcttttaaaaactgaaattccctgttctagttcctaacaattctcattacatactatgccagattacaaaatacttatttttaaaatgaaatctatatattgactttcttatcaatcatcttactgtgcaatcaaaattagagtactttggtttgaaaacaacacttagagcctccagataacttttaagacttatttagctttgtgggtggtattttcatgcaaataagtaagggtgggttttatattttgtagaagttttcggtcctattttaatgctctttgtatggcagtatgtatatattgtgttaagttcctcaagaatctccttaaaaactttgaagttaatacttttgtgcaactgtgttttgaataaagccatgacagtgttaaaaacaaacaaaaaaatttgcagtactcctgattattcttttattgtttttgactgttccctgtttttttctgtgactgctgtaacttaaagtttttgaaactgaattgcttcaaataaattgaagatttgttataatgatta

SEQ ID NO: 591 - DNA, 2869 bp, Homo sapiens
  source 1..2869: mol_type = unassigned DNA
agtctctgagcagccattgaaggggaaggaactgcgggtgtgtgtgtgtatgtgtgtgtgtatgtgtgtgcgcgcgtgcgtgcgtgtgtgtgcgcgcgctagtgtgtggacaaggaggtgggggcagctgagttagagtcccaactcttggactccatttgctattctcttctttctcccccacacctatctggtggtggtagtgggcgtttatatttgcgttccttttcattcatttctaaatctcttaaaaattttgggttgggggtattggggaaggcaggaaagggaaaaggagagtagtagctgaagagcaagaggaggacatggagatgaagaagaagattaacctggagttaaggaacagatccccggaggaggaggataatgaagcgccggactctgaagaggaggatgatgaggatggcgatgaagatgatgaagaggaagaggaaaatgaagctggtccaccggaaggatatgaggaagaggaggaggaagaggaagaggaggatgaggatgaggatgaagatgaagatgaagcaggttcagagttgggagagggagaagaggaagtgggcctctcatacttaatgaaagaagaaattcaggatgaagaagatgatgatgactatgttgaagaaggggaagaagaggaagaagaggaagaaggaggtcttcgaggggagaagaggaaacgagatgctgaagacgatggagaggaagaagatgactagatcattctaagaccagattctctaatgtttctgggtgtgcaatagagtgatcacatctttgtttcttcatgtacgatagctatccctacagaagataatgtgtaactttttataggaaaagtgtggttttactatttttgccttatcattccaaataagaactagtctgttaatgatcatattgtatgtagagaaaaattttcattgactcccattgtggaattccctagcaatttatttagacttaattttttaaattcaagcttactgtattagtcatttttagcccataattaaaacatgatcacttttacacaggtgtagtatggtgcatttcattccttatttataaattaactgaaattacagtttgctataatataaaatgacaatagtctcttgagtggtaagttggttatttttttagaggtgatccaggaatctttagtttgaaggcagttaccttttttttttttttttttttttgactaagagtgtttggttgcttttttgtcacaagtaacttggaaaatagaagcagaatagtaaaggttctattcagcaacatagttcatggattttgtggaggttctattcagtaatatggttcatggatttagtggtgactgataagattttatttttgaaggaaaaattgcttatactaagtccagagacatgcaggtgagcccttttgtcaggctgcaaatcatgacatgccgatggttgtttattttgtttttaggtgtgcattctttttcttcttagcaattcctttatgatcaccttcccttcttgtttcactccctcccgctctctcaaaaggaacttgggaaacttgtgaaacccaggaaaacctttagtcttatacctcaactacctttcagtcctgtctgggttttaaataagtgaagtagaagaaattgagtattttctgacataagaatatattatcaatacagttttatgcagtaagctctccttaccataaatgtttcttggttgacaacatctaagacaatattagtgggatgaagaaagaaaagcaggggtgcttttggaagcagtgttagtgttcctcaaaagtcggaacaattgcctgttgatatattaataagacattaaagtcaaattttaatgttggcctctcaaatgatttggataccactctgcaaagtatttctaacctttaattcccagttttaaaacagatataataatagcatttaattggaatatactaggcagctggaaaagtatttgaaactaaattgacattaaaattaagatttgttttcaagtggatgtccattaaaagtagaaaaatatttgggataagtgagtgtgtgtttccttacatggctactaaataaaatataatgagtatacaagtatatctcctcttttgctatggaggctccatgttcaaggcaatggctttttaaatcttggctatctaaaattttttccctttgttttgaatatttgtaagtttttaagaagttagtgtcagcaaattaattgaagttatgcttctatactgggacatatttaaatactgagtatagtactgctgctactgcttctacaatgtaaaatgtatgacttggtgttttaaagtaaaaattatgatgttacttgtggagaaactaaaaatgttgtacaactgaccgaaagaaaacccttggggataagtttagtgaggggattggaatccccaaaaagataacatttttcttctgcttttaaaaactgaaattccctgttctagttcctaacaattctcattacatactatgccagattacaaaatacttatttttaaaatgaaatctatatattgactttcttatcaatcatcttactgtgcaatcaaaattagagtactttggtttgaaaacaacacttagagcctccagataacttttaagacttatttagctttgtgggtggtattttcatgcaaataagtaagggtgggttttatattttgtagaagttttcggtcctattttaatgctctttgtatggcagtatgtatatattgtgttaagttcctcaagaatctccttaaaaactttgaagttaatacttttgtgcaactgtgttttgaataaagccatgacagtgtt

SEQ ID NO: 592 - DNA, 2991 bp, Homo sapiens
  source 1..2991: mol_type = unassigned DNA
gtcagtcggagcggcaggtcgcgagagcagggctggtggccagcggggagcctcgcagaggaaagcatcagtcttgctgaaataagcctagaattggaacgtgacagagttagtccttgataattgcctgtgtgtcaatggggaaattgaaggcctgaatgatactttcaaagaactagaatttctgagtatggctaatgtggaactaagttcgctggcccggcttcccagcttaaataaacttcgaaaattggagcttagtgataatataatttctggaggcttggaagtcctggcagagaaatgtccaaatcttacctacctcaatctgagtggaaacaaaataaaagatctcagtacagtagaagctctgcaaaatcttaaaaatttgaaaagtcttgacctgtttaactgtgagatcacaaacctggaagattatagagaaagtatttttgaactactgcagcaaatcacatacttagatggatttgatcaggaggataatgaagcgccggactctgaagaggaggatgatgaggatggcgatgaagatgatgaagaggaagaggaaaatgaagctggtccaccggaaggatatgaggaagaggaggaggaagaggaagaggaggatgaggatgaggatgaagatgaagatgaagcaggttcagagttgggagagggagaagaggaagtgggcctctcatacttaatgaaagaagaaattcaggatgaagaagatgatgatgactatgttgaagaaggggaagaagaggaagaagaggaagaaggaggtcttcgaggggagaagaggaaacgagatgctgaagacgatggagaggaagaagatgactagatcattctaagaccagattctctaatgtttctgggtgtgcaatagagtgatcacatctttgtttcttcatgtacgatagctatccctacagaagataatgtgtaactttttataggaaaagtgtggttttactatttttgccttatcattccaaataagaactagtctgttaatgatcatattgtatgtagagaaaaattttcattgactcccattgtggaattccctagcaatttatttagacttaattttttaaattcaagcttactgtattagtcatttttagcccataattaaaacatgatcacttttacacaggtgtagtatggtgcatttcattccttatttataaattaactgaaattacagtttgctataatataaaatgacaatagtctcttgagtggtaagttggttatttttttagaggtgatccaggaatctttagtttgaaggcagttaccttttttttttttttttttttttgactaagagtgtttggttgcttttttgtcacaagtaacttggaaaatagaagcagaatagtaaaggttctattcagcaacatagttcatggattttgtggaggttctattcagtaatatggttcatggatttagtggtgactgataagattttatttttgaaggaaaaattgcttatactaagtccagagacatgcaggtgagcccttttgtcaggctgcaaatcatgacatgccgatggttgtttattttgtttttaggtgtgcattctttttcttcttagcaattcctttatgatcaccttcccttcttgtttcactccctcccgctctctcaaaaggaacttgggaaacttgtgaaacccaggaaaacctttagtcttatacctcaactacctttcagtcctgtctgggttttaaataagtgaagtagaagaaattgagtattttctgacataagaatatattatcaatacagttttatgcagtaagctctccttaccataaatgtttcttggttgacaacatctaagacaatattagtgggatgaagaaagaaaagcaggggtgcttttggaagcagtgttagtgttcctcaaaagtcggaacaattgcctgttgatatattaataagacattaaagtcaaattttaatgttggcctctcaaatgatttggataccactctgcaaagtatttctaacctttaattcccagttttaaaacagatataataatagcatttaattggaatatactaggcagctggaaaagtatttgaaactaaattgacattaaaattaagatttgttttcaagtggatgtccattaaaagtagaaaaatatttgggataagtgagtgtgtgtttccttacatggctactaaataaaatataatgagtatacaagtatatctcctcttttgctatggaggctccatgttcaaggcaatggctttttaaatcttggctatctaaaattttttccctttgttttgaatatttgtaagtttttaagaagttagtgtcagcaaattaattgaagttatgcttctatactgggacatatttaaatactgagtatagtactgctgctactgcttctacaatgtaaaatgtatgacttggtgttttaaagtaaaaattatgatgttacttgtggagaaactaaaaatgttgtacaactgaccgaaagaaaacccttggggataagtttagtgaggggattggaatccccaaaaagataacatttttcttctgcttttaaaaactgaaattccctgttctagttcctaacaattctcattacatactatgccagattacaaaatacttatttttaaaatgaaatctatatattgactttcttatcaatcatcttactgtgcaatcaaaattagagtactttggtttgaaaacaacacttagagcctccagataacttttaagacttatttagctttgtgggtggtattttcatgcaaataagtaagggtgggttttatattttgtagaagttttcggtcctattttaatgctctttgtatggcagtatgtatatattgtgttaagttcctcaagaatctccttaaaaactttgaagttaatacttttgtgcaactgtgttttgaataaagccatgacagtgttaaaaac

SEQ ID NO: 593 - DNA, 1339 bp, Homo sapiens
  source 1..1339: mol_type = unassigned DNA
tgcgcgcgctagtgtgtggacaaggaggtgggggcagctgagttagagtcccaactcttggactccatttgctattctcttctttctcccccacacctatctggtggtggtagtgggcgtttatatttgcgttccttttcattcatttctaaatctcttaaaaattttgggttgggggtattggggaaggcaggaaagggaaaaggagagtagtagctgaagagcaagaggaggacatggagatgaagaagaagattaacctggagttaaggaacagatccccggaggaggtgacagagttagtccttgataattgcctgtgtgtcaatggggaaattgaaggcctgaatgatactttcaaagaactagaatttctgagtatggctaatgtggaactaagttcgctggcccggcttcccagcttaaataaacttcgaaaacaaaatcttaaaaatttgaaaagtcttgacctgtttaactgtgagatcacaaacctggaagattatagagaaagtatttttgaactactgcagcaaatcacatacttagatggatttgatcaggaggataatgaagcgccggactctgaagaggaggatgatgaggatggcgatgaagatgatgaagaggaagaggaaaatgaagctggtccaccggaaggatatgaggaagaggaggaggaagaggaagaggaggatgaggatgaggatgaagatgaagatgaagcaggttcagagttgggagagggagaagaggaagtgggcctctcatacttaatgaaagaagaaattcaggatgaagaagatgatgatgactatgttgaagaaggggaagaagaggaagaagaggaagaaggaggtcttcgaggggagaagaggaaacgagatgctgaagacgatggagaggaagaagatgactagatcattctaagaccagattctctaatgtttctgggtgtgcaatagagtgatcacatctttgtttcttcatgtacgatagctatccctacagaagataatgtgtaactttttataggaaaagtgtggttttactatttttgccttatcattccaaataagaactagtctgttaatgatcatattgtatgtagagaaaaattttcattgactcccattgtggaattccctagcaatttatttagacttaattttttaaattcaagcttactgtattagtcatttttagcccataattaaaacatgatcacttttacacaggtgtagtatggtgcatttcattccttatttataaattaactgaaattacagtttgctataatataaaatgacaatagtctcttgagtggtaagttggttat

SEQ ID NO: 594 - DNA, 3213 bp, Homo sapiens
  source 1..3213: mol_type = unassigned DNA
gattggggtggtagaggcctgagtgggaaaagtttgcaacaaaacaaatttaaatccttttcattttgcagagcaaagtttcggctttaaggtggggaagatacccaaagataaatgcagaatgtaaatgtagagatgtctctgcttttgagttctggctttcttttttttttctttttattttattttctttttctttttcttttttgagatggagtctagctctgtggcccaggctggagtgcagtggcacaatctcggctcactgcaagctctgcctcccgggttcacgccattttcctgcctcagcctctcgagtagctgggactacaggcgcccgccaccacgcctggctaattttttgtatttttaatagagatagggtttcaccgtgttagccaggatggtctcgatctcatgacattgtgatctgcccgcctcggcctcccaaagtgctgggattataggcgtgagccactgcgcccggccgagttctggctttcttaagaaagtgtatctttgtctttcactacagacatggatgggtgcaaaaaagagctgccccgcttgcaagagccggaggaggacgaggattgttacatccttaatgttcagtcaagcagtgatgacaccagtgggtcttctgtggccagaagagctccgaagagacaggcgagttgcatccttaatgtccagtcaaggagtggtgacaccagtgggtcttctgtggccagaagagctccgaagagacaggcgagctccgtggtagtgattgactctgattctgatgaggaatgtcacacccatgaagagaagaaagctaagttattggaaataaacagcgacgatgagagtccggagtgttgtcatgtgaagcctgccatccaggaacctccaatagttattagtgatgatgacaatgacgatgacaacggtaatgatttggaagttcccgacgacaacagtgatgattcagaagctcccgacgacaacagtgatgattcggaagctcctgacgacaacagtgatgattcggaagctcccgacgacaacagtgatgattcggaagctcccgacgacaatagtgatgattcggatgttcccgacgacaacagtgatgattcatccgacgacaacagtgatgattcatccgacgacaacagtgatgattcggatgttcccgacgacaagagtgatgattcggatgttcccgacgacagcagtgatgattcggatgttcccgacgacagcagtgatgattcggaagctcccgacgacagcagtgatgattcggaagctcccgacgacagcagtgatgattcggaagctcccgacgacagcagtgatgattcggaagctcccgacgacagcagtgatgattcggaagcttccgacgacagcagtgatgattcggaagcttccgacgacagcagtgatgattcggaagctcccgacgacaagagtgatgattcggatgttcccgaagacaagagtgatgattcggatgttcccgatgacaatagtgatgatttggaagttcctgtgccagcagaagatttgtgtaatgaaggccaaattgcttcagatgaagaagagctggttgaggctgctgctgctgtctcccagcatgattcatctgatgatgctggtgagcaggatcttggtgagaatctcagcaaaccaccaagtgatcctgaggctaaccctgaagtttcagagagaaagctgccaactgaggaagagcctgcacctgtggtggaacaatcagggaaaaggaagtcaaaaaccaaaactattgtggagccaccgaggaaaaggcagacaaagaccaaaaatatagtggagccaccaaggaaaaggcagacaaagaccaaaaatatagtggagccactgaggaagaggaaggcgaaaaccaaaaatgtatctgtgacacctggacataagaagcgtgggccttcaaagaagaaacccggtgcagcaaaagttgaaaaacgcaagactaggactcctaaatgcaaagtccctggatgtttcttgcaagaccttgaaaagtcaaagaaatactctggaaaaaatttaaagcgaaataaggatgaattggttcagagaatctacgacctgtttaacagatccgtctgtgataaaaagctgccagagaaactacgcataggctggaataacaagatggtgaaaactgctggcttatgcagcactggtgagatgtggtacccaaagtggcggcgctttgccaagatccagattggcttgaaagtctgcgactctgcagaccgaatccgggataccttgatccatgaaatgtgccatgctgcctcctggctgattgatggtatccatgattctcatggtgacgcatggaagtattatgccaggaaatccaacaggatacacccggagctgcccagggtcacccgttgccataactataagattaactacaaggtccattatgaatgtactggatgcaaaacgaggattggctgctacaccaaatcgttggacaccagccgcttcatctgtgccaaatgcaaggggtctctggtcatggtgccattaactcagaaagatgggacccgtattgtgccccacgtgtgaccatttgctgtgtatgtgcagaagtattatagaaaaattatgcaggagatggctaggattagccttggggatgtgatgaaaacacttggcaggaattacaaggcaatgaagaattcttaaggttatcttagagtatattaatgtgagctatatcctttactggtaagaagttttagaaaagtttgttttgtgaagttaggaatattagaatttaggtactgttaagtaagtaatgttagaatttaagattcatgttattaacgatgattgaccttaaatagggactctattgctaaccattctgtgcccttgacagggtatttctgaagcccttgggatctaccttgggtcttacttgagttccatatttttcacatgtagaacaaaatgcaaaagaaaagtgagttttcaagagtggcaggttgagagaggagaatgctggaaagaggacaagtttgagaggcaacacttaaacactagggctactgtggcatctatgtagacaggaaagacaaacgtgtttcataaaattcgttgttgatggtattgattgaaactatctgagccatgtaatcaaaaaataaaagttttctgcatctt

SEQ ID NO: 595 - DNA, 2791 bp, Homo sapiens
  source 1..2791: mol_type = unassigned DNA
aaaggggcctgcgcctggcgttgttcatcgcagttgctccggatctttgcacacactccacgggcagttggaggtgagctgctgccggccacgccagaggctgcaacaccagacatggatgggtgcaaaaaagagctgccccgcttgcaagagccggaggaggacgaggattgttacatccttaatgttcagtcaagcagtgatgacaccagtgggtcttctgtggccagaagagctccgaagagacaggcgagttgcatccttaatgtccagtcaaggagtggtgacaccagtgggtcttctgtggccagaagagctccgaagagacaggcgagctccgtggtagtgattgactctgattctgatgaggaatgtcacacccatgaagagaagaaagctaagttattggaaataaacagcgacgatgagagtccggagtgttgtcatgtgaagcctgccatccaggaacctccaatagttattagtgatgatgacaatgacgatgacaacggtaatgatttggaagttcccgacgacaacagtgatgattcagaagctcccgacgacaacagtgatgattcggaagctcctgacgacaacagtgatgattcggaagctcccgacgacaacagtgatgattcggaagctcccgacgacaatagtgatgattcggatgttcccgacgacaacagtgatgattcatccgacgacaacagtgatgattcatccgacgacaacagtgatgattcggatgttcccgacgacaagagtgatgattcggatgttcccgacgacagcagtgatgattcggatgttcccgacgacagcagtgatgattcggaagctcccgacgacagcagtgatgattcggaagctcccgacgacagcagtgatgattcggaagctcccgacgacagcagtgatgattcggaagctcccgacgacagcagtgatgattcggaagcttccgacgacagcagtgatgattcggaagcttccgacgacagcagtgatgattcggaagctcccgacgacaagagtgatgattcggatgttcccgaagacaagagtgatgattcggatgttcccgatgacaatagtgatgatttggaagttcctgtgccagcagaagatttgtgtaatgaaggccaaattgcttcagatgaagaagagctggttgaggctgctgctgctgtctcccagcatgattcatctgatgatgctggtgagcaggatcttggtgagaatctcagcaaaccaccaagtgatcctgaggctaaccctgaagtttcagagagaaagctgccaactgaggaagagcctgcacctgtggtggaacaatcagggaaaaggaagtcaaaaaccaaaactattgtggagccaccgaggaaaaggcagacaaagaccaaaaatatagtggagccaccaaggaaaaggcagacaaagaccaaaaatatagtggagccactgaggaagaggaaggcgaaaaccaaaaatgtatctgtgacacctggacataagaagcgtgggccttcaaagaagaaacccggtgcagcaaaagttgaaaaacgcaagactaggactcctaaatgcaaagtccctggatgtttcttgcaagaccttgaaaagtcaaagaaatactctggaaaaaatttaaagcgaaataaggatgaattggttcagagaatctacgacctgtttaacagatccgtctgtgataaaaagctgccagagaaactacgcataggctggaataacaagatggtgaaaactgctggcttatgcagcactggtgagatgtggtacccaaagtggcggcgctttgccaagatccagattggcttgaaagtctgcgactctgcagaccgaatccgggataccttgatccatgaaatgtgccatgctgcctcctggctgattgatggtatccatgattctcatggtgacgcatggaagtattatgccaggaaatccaacaggatacacccggagctgcccagggtcacccgttgccataactataagattaactacaaggtccattatgaatgtactggatgcaaaacgaggattggctgctacaccaaatcgttggacaccagccgcttcatctgtgccaaatgcaaggggtctctggtcatggtgccattaactcagaaagatgggacccgtattgtgccccacgtgtgaccatttgctgtgtatgtgcagaagtattatagaaaaattatgcaggagatggctaggattagccttggggatgtgatgaaaacacttggcaggaattacaaggcaatgaagaattcttaaggttatcttagagtatattaatgtgagctatatcctttactggtaagaagttttagaaaagtttgttttgtgaagttaggaatattagaatttaggtactgttaagtaagtaatgttagaatttaagattcatgttattaacgatgattgaccttaaatagggactctattgctaaccattctgtgcccttgacagggtatttctgaagcccttgggatctaccttgggtcttacttgagttccatatttttcacatgtagaacaaaatgcaaaagaaaagtgagttttcaagagtggcaggttgagagaggagaatgctggaaagaggacaagtttgagaggcaacacttaaacactagggctactgtggcatctatgtagacaggaaagacaaacgtgtttcataaaattcgttgttgatggtattgattgaaactatctgagccatgtaatcaaaaaataaaagttttctgcatcttg

SEQ ID NO: 596 - DNA, 1830 bp, Homo sapiens
  source 1..1830: mol_type = unassigned DNA
tggcgaacggctggccccgggccgcgggcctcaggcaggtccgagggtgcccaggacagggtcggggcttgaatgcctttgcttccgaaaacagcggagccgtggggcctcccccgcgccggccctgcctccaaccagccgcccaatcccggctcccatgcgcgtccacgcctccctataagataaagcgcggccgacgggctccgagcgcggcccctgggttcgaacacggcacccgcactgcgcgtcatggtgcaggcctggtatatggacgacgccccgggcgacccgcggcaaccccaccgccccgaccccggccgcccagtgggcctggagcagctgcggcggctcggggtgctctactggaagctggatgctgacaaatatgagaatgatccagaattagaaaagatccgaagagagaggaactactcctggatggacatcataaccatatgcaaagataaactaccaaattatgaagaaaagattaagatgttctacgaggagcatttgcacttggacgatgagatccgctacatcctggatggcagtgggtacttcgatgtgagggacaaggaggaccagtggatccggatcttcatggagaagggagacatggtgacgctccccgcggggatctatcaccgcttcacggtggacgagaagaactacacgaaggccatgcggctgtttgtgggagaaccggtgtggacagcgtacaaccggcccgctgaccattttgaagcccgcgggcagtacgtgaaatttctggcacagaccgcctagcagtgctgcctgggaactaacacgtgcctcgtaaaggtccccaatgtaatgactgagcagaaaatcaatcactttctctttgcttttagaggatagccttgaggctagattatctttcctttgtaagattatttgatcagaatattttgtaatgaaaggatctagaaagcaacttggaagtgtaaagagtcaccttcattttctgtaactcaatcaagactggtgggtccatggccctgtgttagttcatgcattcagttgagtcccaaatgaaagtttcatctcccgaaatgcagttccttagatgcccatctggacgtgatgccgcgcctgccgtgtaagaaggtgcaatcctagataacacagctagccagatagaagacacttttttctccaaaatgatgccttggggtggggagtggtagggggaagagctcccaccctaaggggcacacactgagttgcttatgccacttccttgttcaaaataaagtaactgccttaatcttatactcatggcttggagttaccttatattcaggtatatgtgatattttgcctggtttgttaaaattgccccatttagattccttctataattgttcttatagataagtaatttatatatgagctgtgttagtattttttcagtgtgagatctctggattctttcacaataaagctgttgaattttaacaggagtattagtacataaattttctactcaacaattccgagataggattatgcctagtttgtcatatcacagaaaaactccaagttaacttcatgttttggaagggcaggtcgtttttaaagtatttctttttttaactggatgaaaaatcttcatgttaggattaattttcttaatcacctccacactgtacagaggaaactcaagccttaaatgtttaagtaaactctgtctcagttttaggattaaaatacccaccggtggtgtgatgatgccatataccgcagggcttgcttctgtcaagtgtgactctatctcagtaattaaaataagtgctgatctac

SEQ ID NO: 597 - DNA, 3533 bp, Homo sapiens
  source 1..3533: mol_type = unassigned DNA
ggggcgagagggggcggagcgtggaggcggcagctggaaccgcgcagcgcacgggaacgcgtcccgctgcttgggtcaggttcgccggtcgcgggagccccgccgtgcagtcggaggaacacgtggccatcagtaatcatgagcaacccattcgcacaccttgctgagccattggatcctgtacaaccaggaaagaaattcttcaatttgaataaattggaggattcaagatatgggcgcttaccattttcgatcagagttcttctggaagcagccattcggaattgtgatgagtttttggtgaagaaacaggatattgaaaatattctacattggaatgtcacgcagcacaagaacatagaagtgccatttaagcctgctcgtgtcatcctgcaggactttacgggtgtgcccgctgtggttgactttgctgcaatgcgtgatgctgtgaaaaagttaggaggagatccagagaaaataaaccctgtctgccctgctgatcttgtaatagatcattccatccaggttgatttcaacagaagggcagacagtttacagaagaatcaagacctggaatttgaaagaaatagagagcgatttgaatttttaaagtggggttcccaggcttttcacaacatgcggattattccccctggctcaggaatcatccaccaggtgaatttggaatatttggcaagagtggtatttgatcaggatggatattattacccagacagcctcgtgggcacagactcgcacactaccatgattgatggcttgggcattcttggttggggtgtcggtggtattgaagcagaagctgtcatgctgggtcagccaatcagtatggtgcttcctcaggtgattggctacaggctgatggggaagccccaccctctggtaacatccactgacatcgtgctcaccattaccaagcacctccgccaggttggggtagtgggcaaatttgtcgagttcttcgggcctggagtagcccagttgtccattgctgaccgagctacgattgctaacatgtgtccagagtacggagcaactgctgcctttttcccagttgatgaagttagtatcacgtacctggtgcaaacaggtcgtgatgaagaaaaattaaagtatattaaaaaatatcttcaggctgtaggaatgtttcgagatttcaatgacccttctcaagacccagacttcacccaggttgtggaattagatttgaaaacagtagtgccttgctgtagtggacccaaaaggcctcaggacaaagttgctgtgtccgacatgaaaaaggactttgagagctgccttggagccaagcaaggatttaaaggattccaagttgctcctgaacatcataatgaccataagacctttatctatgataacactgaattcacccttgctcatggttctgtggtcattgctgccattactagctgcacaaacaccagtaatccgtctgtgatgttaggggcaggattgttagcaaagaaagctgtggatgctggcctgaacgtgatgccttacatcaaaactagcctgtctcctgggagtggcgtggtcacctactacctacaagaaagcggagtcatgccttatctgtctcagcttgggtttgacgtggtgggctatggctgcatgacctgcattggcaacagtgggcctttacctgaacctgtggtagaagccatcacacagggagaccttgtagctgttggagtactatctggaaacaggaattttgaaggtcgagttcaccccaacacccgggccaactatttagcctctccccccttagtaatagcatatgcaattgctggaaccatcagaatcgactttgagaaagagccattgggagtaaatgcaaagggacagcaggtatttctgaaagatatctggccgactagagacgagatccaggcagtggagcgtcagtatgtcatcccggggatgtttaaggaagtctatcagaaaatagagactgtgaatgaaagctggaatgccttagcaaccccatcagataagctgtttttctggaattccaaatctacgtatatcaaatcaccaccattctttgaaaacctgactttggatcttcagccccctaaatctatagtggatgcctatgtgctgctaaatttgggagattcggtaacaactgaccacatctccccagctggaaatattgcaagaaacagtcctgctgctcgctacttaactaacagaggcctaactccacgagaattcaactcctatggctcccgccgaggtaatgacgccgtcatggcacggggaacatttgccaacattcgcttgttaaacagatttttgaacaagcaggcaccacagactatccatctgccttctggggaaatccttgatgtgtttgatgctgctgagcggtaccagcaggcaggccttcccctgatcgttctggctggcaaagagtacggtgcaggcagctcccgagactgggcagctaagggccctttcctgctgggaatcaaagccgtcctggccgagagctacgagcgcattcaccgcagtaacctggttgggatgggtgtgatcccacttgaatatctccctggtgagaatgcagatgccctggggctcacagggcaagaacgatacactatcattattccagaaaacctcaaaccacaaatgaaagtccaggtcaagctggatactggcaagaccttccaggctgtcatgaggtttgacactgatgtggagctcacttatttcctcaacgggggcatcctcaactacatgatccgcaagatggccaagtaggagacgtgcacttggtgctgcgcccagggaggaagccgcaccaccagccagcgcaggccctggtggagaggcctccctggctgcctctgggaggggtgctgccttgtagatggagcaagtgagcactgagggtctggtgccaatcctgtaggcacaaaaccagaagtttctacattctctatttttgttaatcatcttctctttttccagaatttggaagctagaatggtgggaatgtcagtagtgccagaaagagagaaccaagcttgtctttaaagttactgatcacaggacgttgctttttcactgtttcctattaatcttcagctgaacacaagcaaaccttctcaggaggtgtctcctaccctcttattgttcctcttacgctctgctcaatgaaaccttcctcttgagggtcattttcctttctgtattaattataccagtgttaagtgacatagataagaactttgcacacttcaaatcagagcagtgattctctcttctctccccttttccttcagagtgaatcatccagactcctcatggataggtcgggtgttaaagttgttttgattatgtaccttttgatagatccacataaaaagaaatgtgaagttttcttttactatcttttcatttatcaagcagagacctttgttgggaggcggtttgggagaacacatttctaatttgaatgaaatgaaatctattttcagtgaaaa

SEQ ID NO: 598 - DNA, 1956 bp, Homo sapiens
  source 1..1956: mol_type = unassigned DNA
ggggcgagagggggcggagcgtggaggcggcagctggaaccgcgcagcgcacgggaacgcgtcccgctgcttgggtcaggttcgccggtcgcgggagccccgccgtgcagtcggaggaacacgtggccatcagtaatcatgagcaacccattcgcacaccttgctgagccattggatcctgtacaaccaggaaagaaattcttcaatttgaataaattggaggattcaagatatgggcgcttaccattttcgatcagagttcttctggaagcagccattcggaattgtgatgagtttttggtgaagaaacaggatattgaaaatattctacattggaatgtcacgcagcacaagaacatagaagtgccatttaagcctgctcgtgtcatcctgcaggactttacgggtgtgcccgctgtggttgactttgctgcaatgcgtgatgctgtgaaaaagttaggaggagatccagagaaaataaaccctgtctgccctgctgatcttgtaatagatcattccatccaggttgatttcaacagaagggcagacagtttacagaagaatcaagacctggaatttgaaagaaatagagagcgatttgaatttttaaagtggggttcccaggcttttcacaacatgcggattattccccctggctcaggaatcatccaccaggtgaatttggaatatttggcaagagtggtatttgatcaggatggatattattacccagacagcctcgtgggcacagactcgcacactaccatgattgatggcttgggcattcttggttggggtgtcggtggtattgaagcagaagctgtcatgctgggtcagccaatcagtatggtgcttcctcaggtgattggctacaggctgatggggaagccccaccctctggtaacatccactgacatcgtgctcaccattaccaagcacctccgccaggttggggtagtgggcaaatttgtcgagttcttcgggcctggagtagcccagttgtccattgctgaccgagctacgattgctaacatgtgtccagagtacggagcaactgctgcctttttcccagttgatgaagttagtatcacgtacctggtgcaaacaggtcgtgatgaagaaaaattaaagtatattaaaaaatatcttcaggctgtaggaatgtttcgagatttcaatgacccttctcaagacccagacttcacccaggttgtggaattagatttgaaaacagtagtgccttgctgtagtggacccaaaaggcctcaggacaaagttgctgtgtccgacatgaaaaaggactttgagagctgccttggagccaagcaaggatttaaaggattccaagttgctcctgaacatcataatgaccataagacctttatctatgataacactgaattcacccttgctcatggttctgtggtcattgctgccttgtagatggagcaagtgagcactgagggtctggtgccaatcctgtaggcacaaaaccagaagtttctacattctctatttttgttaatcatcttctctttttccagaatttggaagctagaatggtgggaatgtcagtagtgccagaaagagagaaccaagcttgtctttaaagttactgatcacaggacgttgctttttcactgtttcctattaatcttcagctgaacacaagcaaaccttctcaggaggtgtctcctaccctcttattgttcctcttacgctctgctcaatgaaaccttcctcttgagggtcattttcctttctgtattaattataccagtgttaagtgacatagataagaactttgcacacttcaaatcagagcagtgattctctcttctctccccttttccttcagagtgaatcatccagactcctcatggataggtcgggtgttaaagttgttttgattatgtaccttttgatagatccacataaaaagaaatgtgaagtttt

SEQ ID NO: 599 - DNA, 3601 bp, Homo sapiens
  source 1..3601: mol_type = unassigned DNA
ggggcgagagggggcggagcgtggaggcggcagctggaaccgcgcagcgcacgggaacgcgtcccgctgcttgggtcaggttcgccggtcgcgggagccccgccgtgcagtcggagagggtgtcactctgagtggtgcttcctcagcccctgtcaaaaagcagtttccaccatcctggagtgtggaacacgtggccatcagtaatcatgagcaacccattcgcacaccttgctgagccattggatcctgtacaaccaggaaagaaattcttcaatttgaataaattggaggattcaagatatgggcgcttaccattttcgatcagagttcttctggaagcagccattcggaattgtgatgagtttttggtgaagaaacaggatattgaaaatattctacattggaatgtcacgcagcacaagaacatagaagtgccatttaagcctgctcgtgtcatcctgcaggactttacgggtgtgcccgctgtggttgactttgctgcaatgcgtgatgctgtgaaaaagttaggaggagatccagagaaaataaaccctgtctgccctgctgatcttgtaatagatcattccatccaggttgatttcaacagaagggcagacagtttacagaagaatcaagacctggaatttgaaagaaatagagagcgatttgaatttttaaagtggggttcccaggcttttcacaacatgcggattattccccctggctcaggaatcatccaccaggtgaatttggaatatttggcaagagtggtatttgatcaggatggatattattacccagacagcctcgtgggcacagactcgcacactaccatgattgatggcttgggcattcttggttggggtgtcggtggtattgaagcagaagctgtcatgctgggtcagccaatcagtatggtgcttcctcaggtgattggctacaggctgatggggaagccccaccctctggtaacatccactgacatcgtgctcaccattaccaagcacctccgccaggttggggtagtgggcaaatttgtcgagttcttcgggcctggagtagcccagttgtccattgctgaccgagctacgattgctaacatgtgtccagagtacggagcaactgctgcctttttcccagttgatgaagttagtatcacgtacctggtgcaaacaggtcgtgatgaagaaaaattaaagtatattaaaaaatatcttcaggctgtaggaatgtttcgagatttcaatgacccttctcaagacccagacttcacccaggttgtggaattagatttgaaaacagtagtgccttgctgtagtggacccaaaaggcctcaggacaaagttgctgtgtccgacatgaaaaaggactttgagagctgccttggagccaagcaaggatttaaaggattccaagttgctcctgaacatcataatgaccataagacctttatctatgataacactgaattcacccttgctcatggttctgtggtcattgctgccattactagctgcacaaacaccagtaatccgtctgtgatgttaggggcaggattgttagcaaagaaagctgtggatgctggcctgaacgtgatgccttacatcaaaactagcctgtctcctgggagtggcgtggtcacctactacctacaagaaagcggagtcatgccttatctgtctcagcttgggtttgacgtggtgggctatggctgcatgacctgcattggcaacagtgggcctttacctgaacctgtggtagaagccatcacacagggagaccttgtagctgttggagtactatctggaaacaggaattttgaaggtcgagttcaccccaacacccgggccaactatttagcctctccccccttagtaatagcatatgcaattgctggaaccatcagaatcgactttgagaaagagccattgggagtaaatgcaaagggacagcaggtatttctgaaagatatctggccgactagagacgagatccaggcagtggagcgtcagtatgtcatcccggggatgtttaaggaagtctatcagaaaatagagactgtgaatgaaagctggaatgccttagcaaccccatcagataagctgtttttctggaattccaaatctacgtatatcaaatcaccaccattctttgaaaacctgactttggatcttcagccccctaaatctatagtggatgcctatgtgctgctaaatttgggagattcggtaacaactgaccacatctccccagctggaaatattgcaagaaacagtcctgctgctcgctacttaactaacagaggcctaactccacgagaattcaactcctatggctcccgccgaggtaatgacgccgtcatggcacggggaacatttgccaacattcgcttgttaaacagatttttgaacaagcaggcaccacagactatccatctgccttctggggaaatccttgatgtgtttgatgctgctgagcggtaccagcaggcaggccttcccctgatcgttctggctggcaaagagtacggtgcaggcagctcccgagactgggcagctaagggccctttcctgctgggaatcaaagccgtcctggccgagagctacgagcgcattcaccgcagtaacctggttgggatgggtgtgatcccacttgaatatctccctggtgagaatgcagatgccctggggctcacagggcaagaacgatacactatcattattccagaaaacctcaaaccacaaatgaaagtccaggtcaagctggatactggcaagaccttccaggctgtcatgaggtttgacactgatgtggagctcacttatttcctcaacgggggcatcctcaactacatgatccgcaagatggccaagtaggagacgtgcacttggtgctgcgcccagggaggaagccgcaccaccagccagcgcaggccctggtggagaggcctccctggctgcctctgggaggggtgctgccttgtagatggagcaagtgagcactgagggtctggtgccaatcctgtaggcacaaaaccagaagtttctacattctctatttttgttaatcatcttctctttttccagaatttggaagctagaatggtgggaatgtcagtagtgccagaaagagagaaccaagcttgtctttaaagttactgatcacaggacgttgctttttcactgtttcctattaatcttcagctgaacacaagcaaaccttctcaggaggtgtctcctaccctcttattgttcctcttacgctctgctcaatgaaaccttcctcttgagggtcattttcctttctgtattaattataccagtgttaagtgacatagataagaactttgcacacttcaaatcagagcagtgattctctcttctctccccttttccttcagagtgaatcatccagactcctcatggataggtcgggtgttaaagttgttttgattatgtaccttttgatagatccacataaaaagaaatgtgaagttttcttttactatcttttcatttatcaagcagagacctttgttgggaggcggtttgggagaacacatttctaatttgaatgaaatgaaatctattttcagtgaaaa

SEQ ID NO: 600 - DNA, 2393 bp, Homo sapiens
  source 1..2393: mol_type = unassigned DNA
atcgcgcggcggccccgggggcgagagggggcggagcgtggaggcggcagctggaaccgcgcagcgcacgggaacgcgtcccgctgcttgggtcaggttcgccggtcgcgggagccccgccgtgcagtcggaggaacacgtggccatcagtaatcatgagcaacccattcgcacaccttgctgagccattggatcctgtacaaccaggaaagaaattcttcaatttgaataaattggaggattcaagatatgggcgcttaccattttcgatcagagttcttctggaagcagccattcggaattgtgatgagtttttggtgaagaaacaggatattgaaaatattctacattggaatgtcacgcagcacaagaacatagaagtgccatttaagcctgctcgtgtcatcctgcaggactttacgggtgtgcccgctgtggttgactttgctgcaatgcgtgatgctgtgaaaaagttaggaggagatccagagaaaataaaccctgtctgccctgctgatcttgtaatagatcattccatccaggttgatttcaacagaagggcagacagtttacagaagaatcaagacctggaatttgaaagaaatagagagcgatttgaatttttaaagtggggttcccaggcttttcacaacatgcggattattccccctggctcaggaatcatccaccaggtgaatttggaatatttggcaagagtggtatttgatcaggatggatattattacccagacagcctcgtgggcacagactcgcacactaccatgattgatggcttgggcattcttggttggggtgtcggtggtattgaagcagaagctgtcatgctgggtcagccaatcagtatggtgcttcctcaggtgattggctacaggctgatggggaagccccaccctctggtaacatccactgacatcgtgctcaccattaccaagcacctccgccaggttggggtagtgggcaaatttgtcgagttcttcgggcctggagtagcccagttgtccattgctgaccgagctacgattgctaacatgtgtccagagtacggagcaactgctgcctttttcccagttgatgaagttagtatcacgtacctggtgcaaacaggtcgtgatgaagaaaaattaaagtatattaaaaaatatcttcaggctgtaggaatgtttcgagatttcaatgacccttctcaagacccagacttcacccaggttgtggaattagatttgaaaacagtagtgccttgctgtagtggacccaaaaggcctcaggacaaagttgctgtgtccgacatgaaaaaggactttgagagctgccttggagccaagcaaggatttaaaggattccaagttgctcctgaacatcataatgaccataagacctttatctatgataacactgaattcacccttgctcatggttctgtggtcattgctgccattactagctgcacaaacaccagtaatccgtctgtgatgttaggggcaggattgttagcaaagaaagctgtggatgctggcctgaacgtgatgccttacatcaaaactagcctgtctcctgggagtggcgtggtcacctactacctacaagaaagcggagtcatgccttatctgtctcagcttgggtttgacgtggtgggctatggctgcatgacctgcattggcaacagtgggcctttacctgaacctgtggtagaagccatcacacagggagaccttgtagctgttggagtactatctggaaacaggaattttgaaggtcgagttcaccccaacacccgggccaactatttagcctctccccccttagtaatagcatatgcaattgctggaaccatcagaatcgactttgagaaagagccattgggagtaaatgcaaagggacagcaggtatttctgaaagatatctggccgactagagacgagatccaggcagtggagcgtcagtatgtcatcccggggatgtttaaggaagtctatcagaaaatagagactgtgaatgaaagctggaatgccttagcaaccccatcagataagctgtttttctggaattccaaatctacgtatatcaaatcaccaccattctttgaaaacctgactttggatcttcagccccctaaatctatagtggatgcctatgtgctgctaaatttgggagattcggtaacaactgaccacatctccccagctggaaatattgcaagaaacagtcctgctgctcgctacttaactaacagaggatttgaaagacaattaacccaggagaatactgacttatgcctctcaccaccccttctcacctctctctcttctccgttgaagctttggggacagcttttctgccatggagaacaatgcttaggagacttagagaaatag

SEQ ID NO: 601 - DNA, 3597 bp, Homo sapiens
  source 1..3597: mol_type = unassigned DNA
ggggcgagagggggcggagcgtggaggcggcagctggaaccgcgcagcgcacgggaacgcgtcccgctgcttgggtcaggttcgccggtcgcgggagccccgccgtgcagtcggagagggtgtcactctgagtggtgcttcctcagcccctgtcaaaaagcagtttccaccatcctggagtgtggaacacgtggccatcagtaatcatgagcaacccattcgcacaccttgctgagccattggatcctgtacaaccaggaaagaaattcttcaatttgaataaattggaggattcaagatatgggcgcttaccattttcgatcagagttcttctggaagcagccattcggaattgtgatgagtttttggtgaagaaacaggatattgaaaatattctacattggaatgtcacgcagcacaagaacatagaagtgccatttaagcctgctcgtgtcatcctgcaggactttacgggtgtgcccgctgtggttgactttgctgcaatgcgtgatgctgtgaaaaagttaggaggagatccagagaaaataaaccctgtctgccctgctgatcttgtaatagatcattccatccaggttgatttcaacagaagggcagacagtttacagaagaatcaagacctggaatttgaaagaaatagagagcgatttgaatttttaaagtggggttcccaggcttttcacaacatgcggattattccccctggctcaggaatcatccaccaggtgaatttggaatatttggcaagagtggtatttgatcaggatggatattattacccagacagcctcgtgggcacagactcgcacactaccatgattgatggcttgggcattcttggttggggtgtcggtggtattgaagcagaagctgtcatgctgggtcagccaatcagtatggtgcttcctcaggtgattggctacaggctgatggggaagccccaccctctggtaacatccactgacatcgtgctcaccattaccaagcacctccgccaggttggggtagtgggcaaatttgtcgagttcttcgggcctggagtagcccagttgtccattgctgaccgagctacgattgctaacatgtgtccagagtacggagcaactgctgcctttttcccagttgatgaagttagtatcacgtacctggtgcaaacaggtcgtgatgaagaaaaattaaagtatattaaaaaatatcttcaggctgtaggaatgtttcgagatttcaatgacccttctcaagacccagacttcacccaggttgtggaattagatttgaaaacagtagtgccttgctgtagtggacccaaaaggcctcaggacaaagttgctgtgtccgacatgaaaaaggactttgagagctgccttggagccaagcaaggatttaaaggattccaagttgctcctgaacatcataatgaccataagacctttatctatgataacactgaattcacccttgctcatggttctgtggtcattgctgccattactagctgcacaaacaccagtaatccgtctgtgatgttaggggcaggattgttagcaaagaaagctgtggatgctggcctgaacgtgatgccttacatcaaaactagcctgtctcctgggagtggcgtggtcacctactacctacaagaaagcggagtcatgccttatctgtctcagcttgggtttgacgtggtgggctatggctgcatgacctgcattggcaacagtgggcctttacctgaacctgtggtagaagccatcacacagggagaccttgtagctgttggagtactatctggaaacaggaattttgaaggtcgagttcaccccaacacccgggccaactatttagcctctccccccttagtaatagcatatgcaattgctggaaccatcagaatcgactttgagaaagagccattgggagtaaatgcaaagggacagcaggtatttctgaaagatatctggccgactagagacgagatccaggcagtggagcgtcagtatgtcatcccggggatgtttaaggaagtctatcagaaaatagagactgtgaatgaaagctggaatgccttagcaaccccatcagataagctgtttttctggaattccaaatctacgtatatcaaatcaccaccattctttgaaaacctgactttggatcttcagccccctaaatctatagtggatgcctatgtgctgctaaatttgggagattcggtaacaactgaccacatctccccagctggaaatattgcaagaaacagtcctgctgctcgctacttaactaacagaggcctaactccacgagaattcaactcctatggctcccgccgaggtaatgacgccgtcatggcacggggaacatttgccaacattcgcttgttaaacagatttttgaacaagcaggcaccacagactatccatctgccttctggggaaatccttgatgtgtttgatgctgctgagcggtaccagcaggcaggccttcccctgatcgttctggctggcaaagagtacggtgcaggcagctcccgagactgggcagctaagggccctttcctgctgggaatcaaagccgtcctggccgagagctacgagcgcattcaccgcagtaacctggttgggatgggtgtgatcccacttgaatatctccctggtgagaatgcagatgccctggggctcacagggcaagaacgatacactatcattattccagaaaacctcaaaccacaaatgaaagtccaggtcaagctggatactggcaagaccttccaggctgtcatgaggtttgacactgatgtggagctcacttatttcctcaacgggggcatcctcaactacatgatccgcaagatggccaagtaggagacgtgcacttggtgctgcgcccagggaggaagccgcaccaccagccagcgcaggccctggtggagaggcctccctggctgcctctgggaggggtgctgccttgtagatggagcaagtgagcactgagggtctggtgccaatcctgtaggcacaaaaccagaagtttctacattctctatttttgttaatcatcttctctttttccagaatttggaagctagaatggtgggaatgtcagtagtgccagaaagagagaaccaagcttgtctttaaagttactgatcacaggacgttgctttttcactgtttcctattaatcttcagctgaacacaagcaaaccttctcaggaggtgtctcctaccctcttattgttcctcttacgctctgctcaatgaaaccttcctcttgagggtcattttcctttctgtattaattataccagtgttaagtgacatagataagaactttgcacacttcaaatcagagcagtgattctctcttctctccccttttccttcagagtgaatcatccagactcctcatggataggtcgggtgttaaagttgttttgattatgtaccttttgatagatccacataaaaagaaatgtgaagttttcttttactatcttttcatttatcaagcagagacctttgttgggaggcggtttgggagaacacatttctaatttgaatgaaatgaaatctattttcagtg

SEQ ID NO: 602 - DNA, 2741 bp, Homo sapiens
  source 1..2741: mol_type = unassigned DNA
ctcatctttgtcagtgcacaaaatggcgccctacagcctactggtgactcggctgcagaaagctctgggtgtgcggcagtaccatgtggcctcagtcctgtgccaacgggccaaggtggcgatgagccactttgagcccaacgagtacatccattatgacctgctagagaagaacattaacattgttcgcaaacgactgaaccggccgctgacactctcggagaagattgtgtatggacacctggatgaccccgccagccaggaaattgagcgaggcaagtcgtacctgcggctgcggccggaccgtgtggccatgcaggatgcgacggcccagatggccatgctccagttcatcagcagcgggctgtccaaggtggctgtgccatccaccatccactgtgaccatctgattgaagcccaggttgggggcgagaaagacctgcgccgggccaaggacatcaaccaggaagtttataatttcctggcaactgcaggtgccaaatatggcgtgggcttctggaagcctggatctggaatcattcaccagattattctggaaaactatgcgtaccctggtgttcttctgattggcactgactcccacacccccaatggtggcggccttgggggcatctgcattggagttgggggtgccgatgctgtggatgtcatggctgggatcccctgggagctgaagtgccccaaggtgattggcgtgaagctgacgggctctctctccggttggtcctcacccaaagatgtgatcctgaaggtggcaggcatcctcacggtgaaaggtggcacaggtgcaatcgtggaataccacgggcctggtgtagactccatctcctgcactggcatggcgacaatctgcaacatgggtgcagaaattggggccaccacttccgtgttcccttacaaccacaggatgaagaagtacctgagcaagaccggccgggaagacattgccaatctagctgatgaattcaaggatcacttggtgcctgaccctggctgccattatgaccaactaattgaaattaacctcagtgagctgaagccacacatcaatgggcccttcacccctgacctggctcaccctgtggcagaagtgggcaaggtggcagagaaggaaggatggcctctggacatccgagtgggtctaattggtagctgcaccaattcaagctatgaagatatggggcgctcagcagctgtggccaagcaggcactggcccatggcctcaagtgcaagtcccagttcaccatcactccaggttccgagcagatccgcgccaccattgagcgggacggctatgcacagatcttgagggatctgggtggcattgtcctggccaatgcttgtggcccctgcattggccagtgggacaggaaggacatcaagaagggggagaagaacacaatcgtcacctcctacaacaggaacttcacgggccgcaacgacgcaaaccccgagacccatgcctttgtcacgtccccagagattgtcacagccctggccattgcgggaaccctcaagttcaacccagagaccgactacctgacgggcacggatggcaagaagttcaggctggaggctccggatgcagatgagcttcccaaaggggagtttgacccagggcaggacacctaccagcacccacccaaggacagcagcgggcagcatgtggacgtgagccccaccagccagcgcctgcagctcctggagccttttgacaagtgggatggcaaggacctggaggacctgcagatcctcatcaaggtcaaagggaagtgtaccactgaccacatctcagctgctggcccctggctcaagttccgtgggcacttggataacatctccaacaacctgctcattggtgccatcaacattgaaaacggcaaggccaactccgtgcgcaatgccgtcactcaggagtttggccccgtccctgacactgcccgctactacaagaaacatggcatcaggtgggtggtgatcggagacgagaactacggcgagggctcgagccgggagcatgcagctctggagcctcgccaccttgggggccgggccatcatcaccaagagctttgccaggatccacgagaccaacctgaagaaacagggcctgctgcctctgaccttcgctgacccggctgactacaacaagattcaccctgtggacaagctgaccattcagggcctgaaggacttcacccctggcaagcccctgaagtgcatcatcaagcaccccaacgggacccaggagaccatcctcctgaaccacaccttcaacgagacgcagattgagtggttccgcgctggcagtgccctcaacagaatgaaggaactgcaacagtgagggcagtgcctccccgccccgccgctggcgtcaagttcagctccacgtgtgccatcagtggatccgatccgtccagccatggcttcctattccaagatggtgtgaccagacatgcttcctgctccccgcttagcccacggagtgactgtggttgtggtgggggggttcttaaaataactttttagcccccgtcttcctattttgagtttggttcagatcttaagcagctccatgcaactgtatttatttttgatgacaagactcccatctaaagtttttctcctgcctgatcatttcattggtggctgaaggattctagagaaccttttgttcttgcaaggaaaacaagaatccaaaaccagtgactgttctgtga

SEQ ID NO: 603 - DNA, 2811 bp, Homo sapiens
  source 1..2811: mol_type = unassigned DNA
ctttgtcagtgcacaaaatggcgccctacagcctactggtgactcggctgcagaaagctctgggtgtgcggcagtaccatgtggcctcagtcctgtgccaacgggccaaggtggcgatgagccactttgagcccaacgagtacatccattatgacctgctagagaagaacattaacattgttcgcaaacgactgaaccggccgctgacactctcggagaagattgtgtatggacacctggatgaccccgccagccaggaaattgagcgaggcaagtcgtacctgcggctgcggccggaccgtgtggccatgcaggatgcgacggcccagatggccatgctccagttcatcagcagcgggctgtccaaggtggctgtgccatccaccatccactgtgaccatctgattgaagcccaggttgggggcgagaaagacctgcgccgggccaaggacatcaaccaggaagtttataatttcctggcaactgcaggtgccaaatatggcgtgggcttctggaagcctggatctggaatcattcaccagattattctggaaaactatgcgtaccctggtgttcttctgattggcactgactcccacacccccaatggtggcggccttgggggcatctgcattggagttgggggtgccgatgctgtggatgtcatggctgggatcccctgggagctgaagtgccccaaggtgattggcgtgaagctgacgggctctctctccggttggtcctcacccaaagatgtgatcctgaaggtggcaggcatcctcacggtgaaaggtggcacaggtgcaatcgtggaataccacgggcctggtgtagactccatctcctgcactggtgaggaaggcggccaggcgacgtggcccctaccctgtgctgggcctgatgggtctccagttgggagtagaagcggcatggcgacaatctgcaacatgggtgcagaaattggggccaccacttccgtgttcccttacaaccacaggatgaagaagtacctgagcaagaccggccgggaagacattgccaatctagctgatgaattcaaggatcacttggtgcctgaccctggctgccattatgaccaactaattgaaattaacctcagtgagctgaagccacacatcaatgggcccttcacccctgacctggctcaccctgtggcagaagtgggcaaggtggcagagaaggaaggatggcctctggacatccgagtgggtctaattggtagctgcaccaattcaagctatgaagatatggggcgctcagcagctgtggccaagcaggcactggcccatggcctcaagtgcaagtcccagttcaccatcactccaggttccgagcagatccgcgccaccattgagcgggacggctatgcacagatcttgagggatctgggtggcattgtcctggccaatgcttgtggcccctgcattggccagtgggacaggaaggacatcaagaagggggagaagaacacaatcgtcacctcctacaacaggaacttcacgggccgcaacgacgcaaaccccgagacccatgcctttgtcacgtccccagagattgtcacagccctggccattgcgggaaccctcaagttcaacccagagaccgactacctgacgggcacggatggcaagaagttcaggctggaggctccggatgcagatgagcttcccaaaggggagtttgacccagggcaggacacctaccagcacccacccaaggacagcagcgggcagcatgtggacgtgagccccaccagccagcgcctgcagctcctggagccttttgacaagtgggatggcaaggacctggaggacctgcagatcctcatcaaggtcaaagggaagtgtaccactgaccacatctcagctgctggcccctggctcaagttccgtgggcacttggataacatctccaacaacctgctcattggtgccatcaacattgaaaacggcaaggccaactccgtgcgcaatgccgtcactcaggagtttggccccgtccctgacactgcccgctactacaagaaacatggcatcaggtgggtggtgatcggagacgagaactacggcgagggctcgagccgggagcatgcagctctggagcctcgccaccttgggggccgggccatcatcaccaagagctttgccaggatccacgagaccaacctgaagaaacagggcctgctgcctctgaccttcgctgacccggctgactacaacaagattcaccctgtggacaagctgaccattcagggcctgaaggacttcacccctggcaagcccctgaagtgcatcatcaagcaccccaacgggacccaggagaccatcctcctgaaccacaccttcaacgagacgcagattgagtggttccgcgctggcagtgccctcaacagaatgaaggaactgcaacagtgagggcagtgcctccccgccccgccgctggcgtcaagttcagctccacgtgtgccatcagtggatccgatccgtccagccatggcttcctattccaagatggtgtgaccagacatgcttcctgctccccgcttagcccacggagtgactgtggttgtggtgggggggttcttaaaataactttttagcccccgtcttcctattttgagtttggttcagatcttaagcagctccatgcaactgtatttatttttgatgacaagactcccatctaaagtttttctcctgcctgatcatttcattggtggctgaaggattctagagaaccttttgttcttgcaaggaaaacaagaatccaaaaccagtgactgttctgtga

SEQ ID NO: 604 - DNA, 1625 bp, Homo sapiens
  source 1..1625: mol_type = unassigned DNA
ctttaatgcgacctcatctttgtcagtgcacaaaatggcgccctacagcctactggtgactcggctgcagaaagctctggcatggcgacaatctgcaacatgggtgcagaaattggggccaccacttccgtgttcccttacaaccacaggatgaagaagtacctgagcaagaccggccgggaagacattgccaatctagctgatgaattcaaggatcacttggtgcctgaccctggctgccattatgaccaactaattgaaattaacctcagtgagctgaagccacacatcaatgggcccttcacccctgacctggctcaccctgtggcagaagtgggcaaggtggcagagaaggaaggatggcctctggacatccgagtgggtctaattggtagctgcaccaattcaagctatgaagatatggggcgctcagcagctgtggccaagcaggcactggcccatggcctcaagtgcaagtcccagttcaccatcactccaggttccgagcagatccgcgccaccattgagcgggacggctatgcacagatcttgagggatctgggtggcattgtcctggccaatgcttgtggcccctgcattggccagtgggacaggaaggacatcaagaagggggagaagaacacaatcgtcacctcctacaacaggaacttcacgggccgcaacgacgcaaaccccgagacccatgcctttgtcacgtccccagagattgtcacagccctggccattgcgggaaccctcaagttcaacccagagaccgactacctgacgggcacggatggcaagaagttcaggctggaggctccggatgcagatgagcttcccaaaggggagtttgacccagggcaggacacctaccagcacccacccaaggacagcagcgggcagcatgtggacgtgagccccaccagccagcgcctgcagctcctggagccttttgacaagtgggatggcaaggacctggaggacctgcagatcctcatcaaggtcaaagggaagtgtaccactgaccacatctcagctgctggcccctggctcaagttccgtgggcacttggataacatctccaacaacctgctcattggtgccatcaacattgaaaacggcaaggccaactccgtgcgcaatgccgtcactcaggagtttggccccgtccctgacactgcccgctactacaagaaacatggcatcaggtgggtggtgatcggagacgagaactacggcgagggctcgagccgggagcatgcagctctggagcctcgccaccttgggggccgggccatcatcaccaagagctttgccaggatccacgagaccaacctgaagaaacagggcctgctgcctctgaccttcgctgacccggctgactacaacaagattcaccctgtggacaagctgaccattcagggcctgaaggacttcacccctggcaagcccctgaagtgcatcatcaagcaccccaacgggacccaggagaccatcctcctgaaccacaccttcaacgagacgcagattgagtggttccgcgctggcagtgccctcaacagaatgaaggaactgcaacagtgagggcagtgcctccccgccccgccgctggcgtcaagttc

SEQ ID NO: 605 - DNA, 2675 bp, Homo sapiens
  source 1..2675: mol_type = unassigned DNA
atgcgacctcatctttgtcagtgcacaaaatggcgccctacagcctactggtgactcggctgcagaaagctctgggtgtgcggcagtaccatgtggcctcagtcctgtgccaacgggccaaggtggcgatgagccactttgagcccaacgagtacatccattatgacctgctagagaagaacattaacattgttcgcaaacgactgaaccggccgctgacactctcggagaagattgtgtatggacacctggatgaccccgccagccaggaaattgagcgaggcaagtcgtacctgcggctgcggccggaccgtgtggccatggtggctgtgccatccaccatccactgtgaccatctgattgaagcccaggttgggggcgagaaagacctgcgccgggccaaggacatcaaccaggaagtttataatttcctggcaactgcaggtgccaaatatggcgtgggcttctggaagcctggatctggaatcattcaccagattattctggaaaactatgcgtaccctggtgttcttctgattggcactgactcccacacccccaatggtggcggccttgggggcatctgcattggagttgggggtgccgatgctgtggatgtcatggctgggatcccctgggagctgaagtgccccaaggtgattggcgtgaagctgacgggctctctctccggttggtcctcacccaaagatgtgatcctgaaggtggcaggcatcctcacggtgaaaggtggcacaggtgcaatcgtggaataccacgggcctggtgtagactccatctcctgcactggcatggcgacaatctgcaacatgggtgcagaaattggggccaccacttccgtgttcccttacaaccacaggatgaagaagtacctgagcaagaccggccgggaagacattgccaatctagctgatgaattcaaggatcacttggtgcctgaccctggctgccattatgaccaactaattgaaattaacctcagtgagctgaagccacacatcaatgggcccttcacccctgacctggctcaccctgtggcagaagtgggcaaggtggcagagaaggaaggatggcctctggacatccgagtgggtctaattggtagctgcaccaattcaagctatgaagatatggggcgctcagcagctgtggccaagcaggcactggcccatggcctcaagtgcaagtcccagttcaccatcactccaggttccgagcagatccgcgccaccattgagcgggacggctatgcacagatcttgagggatctgggtggcattgtcctggccaatgcttgtggcccctgcattggccagtgggacaggaaggacatcaagaagggggagaagaacacaatcgtcacctcctacaacaggaacttcacgggccgcaacgacgcaaaccccgagacccatgcctttgtcacgtccccagagattgtcacagccctggccattgcgggaaccctcaagttcaacccagagaccgactacctgacgggcacggatggcaagaagttcaggctggaggctccggatgcagatgagcttcccaaaggggagtttgacccagggcaggacacctaccagcacccacccaaggacagcagcgggcagcatgtggacgtgagccccaccagccagcgcctgcagctcctggagccttttgacaagtgggatggcaaggacctggaggacctgcagatcctcatcaaggtcaaagggaagtgtaccactgaccacatctcagctgctggcccctggctcaagttccgtgggcacttggataacatctccaacaacctgctcattggtgccatcaacattgaaaacggcaaggccaactccgtgcgcaatgccgtcactcaggagtttggccccgtccctgacactgcccgctactacaagaaacatggcatcaggtgggtggtgatcggagacgagaactacggcgagggctcgagccgggagcatgcagctctggagcctcgccaccttgggggccgggccatcatcaccaagagctttgccaggatccacgagaccaacctgaagaaacagggcctgctgcctctgaccttcgctgacccggctgactacaacaagattcaccctgtggacaagctgaccattcagggcctgaaggacttcacccctggcaagcccctgaagtgcatcatcaagcaccccaacgggacccaggagaccatcctcctgaaccacaccttcaacgagacgcagattgagtggttccgcgctggcagtgccctcaacagaatgaaggaactgcaacagtgagggcagtgcctccccgccccgccgctggcgtcaagttcagctccacgtgtgccatcagtggatccgatccgtccagccatggcttcctattccaagatggtgtgaccagacatgcttcctgctccccgcttagcccacggagtgactgtggttgtggtgggggggttcttaaaataactttttagcccccgtcttcctattttgagtttggttcagatcttaagcagctccatgcaactgtatttatttttgatgacaagactcccatctaaagtttttctcctgcctgatcatttcattggtggctgaaggattctagagaaccttttgttcttgcaaggaaaacaagaatccaaaacc

SEQ ID NO: 606 - DNA, 1433 bp, Homo sapiens
  source 1..1433: mol_type = unassigned DNA
gtgaggtcactaggcttgcaggccaggcagtgccaggagtatggttgagatgctaccaactgccattctgctggtcttggcagtgtccgtggttgctaaagataacgccacgtgtgatggcccctgtgggttacggttcaggcaaaacccacagggtggtgtccgcatcgtcggcgggaaggctgcacagcatggggcctggccctggatggtcagcctccagatcttcacgtacaacagccacaggtaccacacatgtggaggcagcttgctgaattcacgatgggtgctcactgctgctcactgcttcgtcggcaaaaataatgtgcatgactggagactggttttcggagcaaaggaaattacatatgggaacaataaaccagtaaaggcgcctctgcaagagagatatgtggagaaaatcatcattcatgaaaaatacaactctgcgacagagggaaatgacattgccctcgtggagatcacccctcccatttcgtgtgggcgcttcattgggccgggctgcctgccccactttaaggcaggcctccccagaggctcccagagctgctgggtggccggctggggatatatagaagagaaagcccccaggccatcatctatactgatggaggcacgtgtggatctcatcgacctggacttgtgtaactcgacccagtggtacaatgggcgcgttcagccaaccaatgtgtgcgcggggtatcctgtaggcaagatcgacacctgccagggagacagcggcgggcctctcatgtgcaaagacagcaaggaaagcgcctatgtggtcgtgggaatcacaagctggggggtaggctgtgcccgtgccaagcgccccggaatctacacggccacctggccctatctgaactggatcgcctccaagattggttctaacgctttgcgtatgattcaatcggccacccctccacctcccaccactcgaccgcccccgattcgaccccccttctcccaccctatctctgctcaccttccttggtatttccaaccgccccctcgaccacttccaccccgaccaccggcagcccagccccgacccccaccttcacccccgcccccacccccacctccagcctcacctttacccccacccccacccccacccccacctacaccctcatctaccacaaaacttccccaaggactttcttttgccaagcgcctacagcagctcatagaggtcttgaaggggaagacctattccgacggaaagaaccattatgacatggagaccacagagctcccagaactgacctcgacctcctgatctgacctggttctcaacagacccagtgagcccttcactcctgagaaaaaggaaagatgaaataaataaataaacatatatatatagatatacacacacacatatctgtatgtatacatgcatatac

SEQ ID NO: 607 - DNA, 1158 bp, Homo sapiens
  source 1..1158: mol_type = unassigned DNA
gccccaacacactaccctgcacacagaaaataatcattggtcttcactagtgaaataagcagtgggttgctaagggccaacttgcctgaacaggctacacaagaacctcagagcccaacccattgtgaagaaacatgggttacttctgaggttctagaattcccagaagctctgcttcagcactggaagcttttgctcgcagtttgcttcatagctctgtgaagaagctgtggcccacactggggtcccctcttttcctaaatccagatgaacaggtttctcttgctaatgagtctttatctgcttggatctgccagaggaacatcaagtcagcctaatgagctttctggctccatagatcatcaaacttcagttcagcaacttccaggtgagcccgctgcgactgaacatgctgaaggtgagcatactgtaggtgagcagccttcaggagaacagccttcaggtgaacacctctccggagaacagcctttgagtgagcttgagtcaggtgaacagccttcagatgaacagccttcaggtgaacatggctccggtgaacagccttctggtgagcaggcctcgggtgaacagccttcaggtgagcacgcttcaggggaacaggcttcaggtgcaccaatttcaagcacatctacaggcacaatattaaattgctacacatgtgcttatatgaatgatcaaggaaaatgtcttcgtggagagggaacctgcatcactcagaattcccagcagtgcatgttaaagaagatctttgaaggtggaaaactccaattcatggttcaagggtgtgagaacatgtgcccatctatgaacctcttctcccatggaacgaggatgcaaattatatgctgtcgaaatcaatctttctgcaataagatctagaagcctgggcccttgcttgttttgactcaggcagtaaaaagcctccatcactctatttggctcattttatatttagttccttccccagtcaacaactgaccacatctgcctctgcctgagcattaggatgctcaaacatcctatctttcttcttctattcatgcttttatccattcttctctgtcctgtcttccctgctccaactctttctctcaatattcctgatttttttttcaataaatttcacatggttaaagc

SEQ ID NO: 608 - DNA, 1042 bp, Homo sapiens
  source 1..1042: mol_type = unassigned DNA
ctgtgaagaagctgtggcccacactggggtcccctcttttcctaaatccagatgaacaggtttctcttgctaatgagtctttatctgcttggatctgccagaggaacatcaagtcagcctaatgagctttctggctccatagatcatcaaacttcagttcagcaacttccaggtgagttcttttcacttgaaaacccttctgatgctgaggctttatatgagacttcttcaggcctgaacactttaagtgagcatggttccagtgagcatggttcaagcaagcacactgtggccgagcacacttctggagaacatgctgagagtgagcatgcttcaggtgagcccgctgcgactgaacatgctgaaggtgagcatactgtaggtgagcagccttcaggagaacagccttcaggtgaacacctctccggagaacagcctttgagtgagcttgagtcaggtgaacagccttcagatgaacagccttcaggtgaacatggctccggtgaacagccttctggtgagcaggcctcgggtgaacagccttcaggcacaatattaaattgctacacatgtgcttatatgaatgatcaaggaaaatgtcttcgtggagagggaacctgcatcactcagaattcccagcagtgcatgttaaagaagatctttgaaggtggaaaactccaattcatggttcaagggtgtgagaacatgtgcccatctatgaacctcttctcccatggaacgaggatgcaaattatatgctgtcgaaatcaatctttctgcaataagatctagaagcctgggcccttgcttgttttgactcaggcagtaaaaagcctccatcactctatttggctcattttatatttagttccttccccagtcaacaactgaccacatctgcctctgcctgagcattaggatgctcaaacatcctatctttcttcttctattcatgcttttatccattcttctctgtcctgtcttccctgctccaactctttctctcaatattcctgatttttttttcaataaatttcacatg

SEQ ID NO: 609 - DNA, 993 bp, Homo sapiens
  source 1..993: mol_type = unassigned DNA
gccccaacacactaccctgcacacagaaaataatcattggtcttcactagtgaaataagcagtgggttgctaagggccaacttgcctgaacaggctacacaagaacctcagagcccaacccattgtgaagaaacatgggttacttctgaggttctagaattcccagaagctctgcttcagcactggaagcttttgctcgcagtttgcttcatagctctgtgaagaagctgtggcccacactggggtcccctcttttcctaaatccagatgaacaggtttctcttgctaatgagtctttatctgcttggatctgccagaggaacatcaagtcagcctaatgagctttctggctccatagatcatcaaacttcagttcagcaacttccaggtgagcagccttcaggagaacagccttcaggtgaacacctctccggagaacagcctttgagtgagcttgagtcaggtgaacagccttcagatgaacagccttcaggtgaacatggctccggtgaacagccttctggtgagcaggcctcgggtgaacagccttcaggtgagcacgcttcaggggaacaggcttcaggtgcaccaatttcaagcacatctacaggtggaaaactccaattcatggttcaagggtgtgagaacatgtgcccatctatgaacctcttctcccatggaacgaggatgcaaattatatgctgtcgaaatcaatctttctgcaataagatctagaagcctgggcccttgcttgttttgactcaggcagtaaaaagcctccatcactctatttggctcattttatatttagttccttccccagtcaacaactgaccacatctgcctctgcctgagcattaggatgctcaaacatcctatctttcttcttctattcatgcttttatccattcttctctgtcctgtcttccctgctccaactctttctctcaatattcctgatttttttttcaataaatttcacatggttaaagc

SEQ ID NO: 610 - DNA, 1023 bp, Homo sapiens
  source 1..1023: mol_type = unassigned DNA
gccccaacacactaccctgcacacagaaaataatcattggtcttcactagtgaaataagcagtgggttgctaagggccaacttgcctgaacaggctacacaagaacctcagagcccaacccattgtgaagaaacatgggttacttctgaggttctagaattcccagaagctctgcttcagcactggaagcttttgctcgcagtttgcttcatagctctgtgaagaagctgtggcccacactggggtcccctcttttcctaaatccagatgaacaggtttctcttgctaatgagtctttatctgcttggatctgccagaggaacatcaagtcagcctaatgagctttctggctccatagatcatcaaacttcagttcagcaacttccaggtgagcccgctgcgactgaacatgctgaaggtgagcatactgtaggtgagcagccttcaggagaacagccttcaggtgagcacgcttcaggggaacaggcttcaggtgcaccaatttcaagcacatctacaggcacaatattaaattgctacacatgtgcttatatgaatgatcaaggaaaatgtcttcgtggagagggaacctgcatcactcagaattcccagcagtgcatgttaaagaagatctttgaaggtggaaaactccaattcatggttcaagggtgtgagaacatgtgcccatctatgaacctcttctcccatggaacgaggatgcaaattatatgctgtcgaaatcaatctttctgcaataagatctagaagcctgggcccttgcttgttttgactcaggcagtaaaaagcctccatcactctatttggctcattttatatttagttccttccccagtcaacaactgaccacatctgcctctgcctgagcattaggatgctcaaacatcctatctttcttcttctattcatgcttttatccattcttctctgtcctgtcttccctgctccaactctttctctcaatattcctgatttttttttcaataaatttcacatggttaaagc

SEQ ID NO: 611 - DNA, 771 bp, Homo sapiens
  source 1..771: mol_type = unassigned DNA
gccccaacacactaccctgcacacagaaaataatcattggtcttcactagtgaaataagcagtgggttgctaagggccaacttgcctgaacaggctacacaagaacctcagagcccaacccattgtgaagaaacatgggttacttctgaggttctagaattcccagaagctctgcttcagcactggaagcttttgctcgcagtttgcttcatagctctgtgaagaagctgtggcccacactggggtcccctcttttcctaaatccagatgaacaggtttctcttgctaatgagtctttatctgcttggatctgccagaggaacatcaagtcagcctaatgagctttctggctccatagatcatcaaacttcagttcagcaacttccaggtggaaaactccaattcatggttcaagggtgtgagaacatgtgcccatctatgaacctcttctcccatggaacgaggatgcaaattatatgctgtcgaaatcaatctttctgcaataagatctagaagcctgggcccttgcttgttttgactcaggcagtaaaaagcctccatcactctatttggctcattttatatttagttccttccccagtcaacaactgaccacatctgcctctgcctgagcattaggatgctcaaacatcctatctttcttcttctattcatgcttttatccattcttctctgtcctgtcttccctgctccaactctttctctcaatattcctgatttttttttcaataaatttcacatggttaaagc

SEQ ID NO: 612 - DNA, 891 bp, Homo sapiens
  source 1..891: mol_type = unassigned DNA
gccccaacacactaccctgcacacagaaaataatcattggtcttcactagtgaaataagcagtgggttgctaagggccaacttgcctgaacaggctacacaagaacctcagagcccaacccattgtgaagaaacatgggttacttctgaggttctagaattcccagaagctctgcttcagcactggaagcttttgctcgcagtttgcttcatagctctgtgaagaagctgtggcccacactggggtcccctcttttcctaaatccagatgaacaggtttctcttgctaatgagtctttatctgcttggatctgccagaggaacatcaagtcagcctaatgagctttctggctccatagatcatcaaacttcagttcagcaacttccaggcacaatattaaattgctacacatgtgcttatatgaatgatcaaggaaaatgtcttcgtggagagggaacctgcatcactcagaattcccagcagtgcatgttaaagaagatctttgaaggtggaaaactccaattcatggttcaagggtgtgagaacatgtgcccatctatgaacctcttctcccatggaacgaggatgcaaattatatgctgtcgaaatcaatctttctgcaataagatctagaagcctgggcccttgcttgttttgactcaggcagtaaaaagcctccatcactctatttggctcattttatatttagttccttccccagtcaacaactgaccacatctgcctctgcctgagcattaggatgctcaaacatcctatctttcttcttctattcatgcttttatccattcttctctgtcctgtcttccctgctccaactctttctctcaatattcctgatttttttttcaataaatttcacatggttaaagc

SEQ ID NO: 613 - DNA, 1113 bp, Homo sapiens
  source 1..1113: mol_type = unassigned DNA
gccccaacacactaccctgcacacagaaaataatcattggtcttcactagtgaaataagcagtgggttgctaagggccaacttgcctgaacaggctacacaagaacctcagagcccaacccattgtgaagaaacatgggttacttctgaggttctagaattcccagaagctctgcttcagcactggaagcttttgctcgcagtttgcttcatagctctgtgaagaagctgtggcccacactggggtcccctcttttcctaaatccagatgaacaggtttctcttgctaatgagtctttatctgcttggatctgccagaggaacatcaagtcagcctaatgagctttctggctccatagatcatcaaacttcagttcagcaacttccaggtgagcagccttcaggagaacagccttcaggtgaacacctctccggagaacagcctttgagtgagcttgagtcaggtgaacagccttcagatgaacagccttcaggtgaacatggctccggtgaacagccttctggtgagcaggcctcgggtgaacagccttcaggtgagcacgcttcaggggaacaggcttcaggtgcaccaatttcaagcacatctacaggcacaatattaaattgctacacatgtgcttatatgaatgatcaaggaaaatgtcttcgtggagagggaacctgcatcactcagaattcccagcagtgcatgttaaagaagatctttgaaggtggaaaactccaattcatggttcaagggtgtgagaacatgtgcccatctatgaacctcttctcccatggaacgaggatgcaaattatatgctgtcgaaatcaatctttctgcaataagatctagaagcctgggcccttgcttgttttgactcaggcagtaaaaagcctccatcactctatttggctcattttatatttagttccttccccagtcaacaactgaccacatctgcctctgcctgagcattaggatgctcaaacatcctatctttcttcttctattcatgcttttatccattcttctctgtcctgtcttccctgctccaactctttctctcaatattcctgatttttttttcaataaatttcacatggttaaagc

SEQ ID NO: 614 - DNA, 1266 bp, Homo sapiens
  source 1..1266: mol_type = unassigned DNA
gccccaacacactaccctgcacacagaaaataatcattggtcttcactagtgaaataagcagtgggttgctaagggccaacttgcctgaacaggctacacaagaacctcagagcccaacccattgtgaagaaacatgggttacttctgaggttctagaattcccagaagctctgcttcagcactggaagcttttgctcgcagtttgcttcatagctctgtgaagaagctgtggcccacactggggtcccctcttttcctaaatccagatgaacaggtttctcttgctaatgagtctttatctgcttggatctgccagaggaacatcaagtcagcctaatgagctttctggctccatagatcatcaaacttcagttcagcaacttccaggtgagttcttttcacttgaaaacccttctgatgctgaggctttatatgagacttcttcaggcctgaacactttaagtgagcatggttccagtgagcatggttcaagcaagcacactgtggccgagcacacttctggagaacatgctgagagtgagcatgcttcaggtgagcccgctgcgactgaacatgctgaaggtgagcatactgtaggtgagcagccttcaggagaacagccttcaggtgaacacctctccggagaacagcctttgagtgagcttgagtcaggtgaacagccttcagatgaacagccttcaggtgaacatggctccggtgaacagccttctggtgagcaggcctcgggtgaacagccttcaggcacaatattaaattgctacacatgtgcttatatgaatgatcaaggaaaatgtcttcgtggagagggaacctgcatcactcagaattcccagcagtgcatgttaaagaagatctttgaaggtggaaaactccaattcatggttcaagggtgtgagaacatgtgcccatctatgaacctcttctcccatggaacgaggatgcaaattatatgctgtcgaaatcaatctttctgcaataagatctagaagcctgggcccttgcttgttttgactcaggcagtaaaaagcctccatcactctatttggctcattttatatttagttccttccccagtcaacaactgaccacatctgcctctgcctgagcattaggatgctcaaacatcctatctttcttcttctattcatgcttttatccattcttctctgtcctgtcttccctgctccaactctttctctcaatattcctgatttttttttcaataaatttcacatggttaaagc

SEQ ID NO: 615 - DNA, 1038 bp, Homo sapiens
  source 1..1038: mol_type = unassigned DNA
gccccaacacactaccctgcacacagaaaataatcattggtcttcactagtgaaataagcagtgggttgctaagggccaacttgcctgaacaggctacacaagaacctcagagcccaacccattgtgaagaaacatgggttacttctgaggttctagaattcccagaagctctgcttcagcactggaagcttttgctcgcagtttgcttcatagctctgtgaagaagctgtggcccacactggggtcccctcttttcctaaatccagatgaacaggtttctcttgctaatgagtctttatctgcttggatctgccagaggaacatcaagtcagcctaatgagctttctggctccatagatcatcaaacttcagttcagcaacttccaggtgaacagccttcagatgaacagccttcaggtgaacatggctccggtgaacagccttctggtgagcaggcctcgggtgaacagccttcaggtgagcacgcttcaggggaacaggcttcaggtgcaccaatttcaagcacatctacaggcacaatattaaattgctacacatgtgcttatatgaatgatcaaggaaaatgtcttcgtggagagggaacctgcatcactcagaattcccagcagtgcatgttaaagaagatctttgaaggtggaaaactccaattcatggttcaagggtgtgagaacatgtgcccatctatgaacctcttctcccatggaacgaggatgcaaattatatgctgtcgaaatcaatctttctgcaataagatctagaagcctgggcccttgcttgttttgactcaggcagtaaaaagcctccatcactctatttggctcattttatatttagttccttccccagtcaacaactgaccacatctgcctctgcctgagcattaggatgctcaaacatcctatctttcttcttctattcatgcttttatccattcttctctgtcctgtcttccctgctccaactctttctctcaatattcctgatttttttttcaataaatttcacatggttaaagc

SEQ ID NO: 616 - DNA, 1056 bp, Homo sapiens
  source 1..1056: mol_type = unassigned DNA
gccccaacacactaccctgcacacagaaaataatcattggtcttcactagtgaaataagcagtgggttgctaagggccaacttgcctgaacaggctacacaagaacctcagagcccaacccattgtgaagaaacatgggttacttctgaggttctagaattcccagaagctctgcttcagcactggaagcttttgctcgcagtttgcttcatagctctgtgaagaagctgtggcccacactggggtcccctcttttcctaaatccagatgaacaggtttctcttgctaatgagtctttatctgcttggatctgccagaggaacatcaagtcagcctaatgagctttctggctccatagatcatcaaacttcagttcagcaacttccaggtgagcagccttcaggagaacagccttcaggtgaacacctctccggagaacagcctttgagtgagcttgagtcaggtgaacagccttcagatgaacagccttcaggtgaacatggctccggtgaacagccttctggtgagcaggcctcgggtgaacagccttcaggcacaatattaaattgctacacatgtgcttatatgaatgatcaaggaaaatgtcttcgtggagagggaacctgcatcactcagaattcccagcagtgcatgttaaagaagatctttgaaggtggaaaactccaattcatggttcaagggtgtgagaacatgtgcccatctatgaacctcttctcccatggaacgaggatgcaaattatatgctgtcgaaatcaatctttctgcaataagatctagaagcctgggcccttgcttgttttgactcaggcagtaaaaagcctccatcactctatttggctcattttatatttagttccttccccagtcaacaactgaccacatctgcctctgcctgagcattaggatgctcaaacatcctatctttcttcttctattcatgcttttatccattcttctctgtcctgtcttccctgctccaactctttctctcaatattcctgatttttttttcaataaatttcacatggttaaagc

SEQ ID NO: 617 - DNA, 782 bp, Homo sapiens
  source 1..782: mol_type = unassigned DNA
gcttcagcactggaagcttttgctcgcagtttgcttcatagctctgtgaagaagctgtggcccacactggggtcccctcttttcctaaatccagatgaacaggtttctcttgctaatgagtctttatctgcttggatctgccagaggaacatcaagtcagcctaatgagctttctggctccatagatcatcaaacttcagttcagcaacttccaggtgagcagccttcaggagaacagccttcaggtgaacacctctccggagaacagcctttgagtgagcttgagtcaggtgaacagccttcagatgaacagccttcaggtgaacatggctccggtgaacagccttctggtgagcaggcctcgggtgaacagccttcaggtgagcacgcttcaggggaacaggcttcaggtgcaccaatttcaagcacatctacaggcacaatattaaattgctacacatgtgcttatatgaatgatcaaggaaaatgtcttcgtggagagggaacctgcatcactcagaattcccagcagtgcatgttaaagaagatctttgaaggtggaaaactccaattcatggttcaagggtgtgagaacatgtgcccatctatgaacctcttctcccatggaacgaggatgcaaattatatgctgtcgaaatcaatctttctgcaataagatctagaagcctgggcccttgcttgttttgactcaggcagtaaaaagcctccatcactctatttggctcattttatatttagttccttccccagtcaacaactgac

SEQ ID NO: 618 - DNA, 794 bp, Homo sapiens
  source 1..794: mol_type = unassigned DNA
ctgtgaagaagctgtggcccacactggggtcccctcttttcctaaatccagatgaacaggtttctcttgctaatgagtctttatctgcttggatctgccagaggaacatcaagtcagcctaatgagctttctggctccatagatcatcaaacttcagttcagcaacttccaggtgagcccgctgcgactgaacatgctgaaggtgagcatactgtaggtgagcagccttcaggagaacagccttcaggtgaacacctctccggagaacagcctttgagtgagcttgagtcaggtgaacagccttcagatgaacagccttcaggtgaacatggctccggtgaacagccttctggtgagcaggcctcgggtgaacagccttcaggtgagcacgcttcaggggaacaggcttcaggtgcaccaatttcaagcacatctacaggcacaatattaaattgctacacatgtgcttatatgaatgatcaaggaaaatgtcttcgtggagagggaacctgcatcactcagaattcccagcagtgcatgttaaagaagatctttgaaggtggaaaactccaattcatggttcaagggtgtgagaacatgtgcccatctatgaacctcttctcccatggaacgaggatgcaaattatatgctgtcgaaatcaatctttctgcaataagatctagaagcctgggcccttgcttgttttgactcaggcagtaaaaagcctccatcactctatttggctcattttatatttagttccttccccagtcaacaactgaccacatctgcc

SEQ ID NO: 619 - DNA, 2212 bp, Homo sapiens
  source 1..2212: mol_type = unassigned DNA
atcttttaaactttattacaaaaaatatgtgctttttggtaatactttttttttttttttaaagatagggcagatagccccaacacactaccctgcacacagaaaataatcattggtcttcactagtgaaataagcagtgggttgctaagggccaacttgcctgaacaggctacacaagaacctcagagcccaacccattgtgaagaaacatgggttacttctgaggttctagaattcccagaagctctgcttcagcactggaagcttttgctcgcagtttgcttcatagctctgtgaagaagctgtggcccacactggggtcccctcttttcctaaatccagatgaacaggtttctcttgctaatgagtctttatctgcttggatctgccagaggaacatcaagtcagcctaatgagctttctggctccatagatcatcaaacttcagttcagcaacttccaggtgagttcttttcacttgaaaacccttctgatgctgaggctttatatgagacttcttcaggcctgaacactttaagtgagcatggttccagtgagcatggttcaagcaagcacactgtggccgagcacacttctggagaacatgctgagagtgagcatgcttcaggtgagcccgctgcgactgaacatgctgaaggtgagcatactgtaggtgagcagccttcaggagaacagccttcaggtgaacacctctccggagaacagcctttgagtgagcttgagtcaggtgaacagccttcagatgaacagccttcaggtgaacatggctccggtgaacagccttctggtgagcaggcctcgggtgaacagccttcaggtgagcacgcttcaggggaacaggcttcaggtgcaccaatttcaagcacatctacaggcacaatattaaattgctacacatgtgcttatatgaatgatcaaggaaaatgtcttcgtggagagggaacctgcatcactcagaattcccagcagtgcatgttaaagaagatctttgaaggtggaaaactccaattcatggttcaagggtgtgagaacatgtgcccatctatgaacctcttctcccatggaacgaggatgcaaattatatgctgtcgaaatcaatctttctgcaataagatctagaagcctgggcccttgcttgttttgactcaggcagtaaaaagcctccatcactctatttggctcattttatatttagttccttccccagtcaacaactgaccacatctgcctctgcctgagcattaggatgctcaaacatcctatctttcttcttctattcatgcttttatccattcttctctgtcctgtcttccctgctccaactctttctctcaatattcctgatttttttttcaataaatttcacatggttaaagcacacaggctcaagacagacctttttttcccccattaatctagttgcagggtcaacatgagcttccttccacaccgacactaaactgggtgcattgtttaagcattccatatttatgaaagtaaaggagtctccaagggcagagacaacaaagaggaatgcaaagtaggtattaatcttttacagggtgtaaacgtgcaggtacttctgacacccccccttttccatccctacacactcttccatttattatggcatacaaaaactcaactcttctttggctcttgagagtttctagtcttcagtagtccactactaacataatgataatagtataatgattccttatttgctatatattgcagcagttcataatgcttaaatcatttttttcacacacaatgttactgaatcatctatacaggataggagggcaaatggaaatactaaacggtccctcatataagtgttatgttcttcaagatgttttcacatacacggtctcatctgatcctcaggaaagatcccagagtggtagacaggaaagatggcatcatccttttttgcaaataaggaaatgtgacacagagatgttttctttattcatactccatgttgttccaaatttaccaaggttacagagctacagagagctataggcagattccacaaccaaatctgcaagatctaaatctgagctgtttccaccacaatgaaagtagccagaatggttctaagaactcttagaacagtacaacaagaagtcaattttactgtatataaaatttaaaatttcaacatatatacacatcatg

SEQ ID NO: 620 - DNA, 3539 bp, Homo sapiens
  source 1..3539: mol_type = unassigned DNA
tgcggcggcgctgcctggcgtgtgcgcaaggagcgggcgcggagccggcgggcgggcggaggatagcgcgggcgcggcacctgcgggcccgagggtctggctgtcgcagcgccgggccgccccgactccgagcggctgctgagatgagtgcagtgtcgcagccccaggctgctcccagcccgctggagaagtcgcccagcacggcgatcctgtgcaacacgtgtgggaatgtgtgcaagggcgaggtgctgcgggtgcaggacaagtacttccacatcaagtgcttcgtctgtaaagcatgtggctgcgacctggccgagggcggcttcttcgtgcggcagggcgagtacatctgcacgctggactaccagaggctctacggcacccgctgcttcagctgcgaccagttcattgagggtgaggtggtgtcggcgctgggcaagacctaccaccccgactgcttcgtgtgtgccgtctgccggctgcccttcccccccggggaccgagtgaccttcaacgggaaggaatgcatgtgccagaagtgttccctgcccgtatcggtgggcagcagcgcgcacctgtcccagggcctccgaagttgtgggggctgcggcacagaaatcaagaatggccaggccctggtagccttggacaagcactggcacttgggctgttttaagtgcaagagctgtgggaagctcctgaatgccgagtacatcagcaaggatgggctgccctactgcgaagctgactatcacgccaagttcggcatccgctgtgacagctgtgagaaatacatcacggggcgcgtgctggaggccggagagaagcactaccacccttcctgcgcgctatgtgtcaggtgcggccagatgtttgcagaaggcgaagagatgtatcttcaaggttcctccatctggcatccggcgtgtcgacaagcagccagaactgaagacagaaacaaggaaaccagaacttcctcagagagcatcatttctgtccctgcttccagcacctcagggtctccgagccgtgtgatttatgccaagcttggtggtgagatcctggactacagggacttggcagcccttcctaaaagtaaggccatctatgacatcgaccgccccgacatgatctcctactcaccctacatcagccactctgcaggggacaggcagagctacggcgagggggatcaggatgaccggtcctacaagcagtgtcggacctccagcccaagctccactgggtcggttagcctcgggcgctacactccgacctcacggtcaccacagcactacagccgtccaggcagtgaaagtggccggagcacccccagcctctccgtgctctctgacagcaagccgcccccctccacctaccagcaggcacctcgccacttccacgtcccagacactggcgtaaaagataacatctataggaaaccccctatctacagacagcatgctgccaggcgatcggatggggaggatggaagcttggaccaggataacaggaagcagaagagcagctggctgatgctcaagggggatgcagacacaaggaccaattctccagacctggacacccagtccttgtcccacagcagcgggaccgacagagaccctctccaaaggatggcaggggacagctttcactcacgtgagaagatctatccgtatgactccctcatcgtcacaaaccgaattcgcgtgaaactgcccaaagacgtggaccggacgagactggagagacacttgtcgcccgaggagttccaggaagtgtttgggatgagcatcgaggagtttgaccgcctggccctctggaagaggaatgaccttaagaagaaagcccttttgttctgacggctgccagcctgccccactggtgtgtgccgggcgccgaggccaggggcccctggcgagaaccgcacacacccctcccacacaccttgctctggcttctctgtgtccatggggtgggcgggagggggtcccccagcaggtgcggcccctgcacctgccggcgacactcctgccggtagtttagggccgagacggctagcttcacgccacccttccccgctgtggcttggtgtcagggagaggctgtagagtggctgtgtcgggcatcagatggagcacacaggtggctgcagcccagcccaccttcccagcgttctcgaggtgccctggccccggtgctgggcacgtgggggacagaggtggccgggacgtgagctgtgaggcttgttgatgatggttgctgacaccatcatcgggggtgggcacacggcccttcggagcctgggcagcctggcctcacaggcagactcgcagacggggcagtgagcgtctgggacagtgccaagagtggggtgtgtgatttttgcaggcgtctgtgatgggtctctttagggacaaatgtcaacaagggacaagacagggcaccttccgccagcgcccctccatgcgctgcgttcctcctccagatcgacccctagatgcctacacaatatctttaaagtaacacagaagtttttattttattaaaaagtatagcctacttaaacgcgagatgacatatatagagtttaattttacggtccctccgcaggggagcggcctccagccttattctccaccgctcggatctgtgtggtttcagtctgttcttggtgtggtcctcatacacagagctccctgtctagtttcttttctttttcttttttctttttctcgtcacacaggtaaccttaaagacagacccctctaaagaacgctttgtaaatacatgtgaggtatagccaccactgttttccttgctgttatttttccaagtcttggggagaaaacatcctcctctgatggccaaagccctggaatcaagggtttccacgtaccctgcctaatacccgacgtagctcttgatgcaccgtccttgtgctgtggctggcggtgtctcagcctgaaacataaaccccacatgccccaggagcgatgtgctccctgaaacagacaaccacacgctgttggggagagaaggatggagataggatggagataggatggagatgtggctcttctcatctttgaagccagcagggcatcccggagcaggaggctggccgggctccccaagcgaaggcgttggtgtctgtcattaggtgtgtgttagggtgcagcaccggccgtcacaggatgctgataagcgcgctgagaggtggatgaaacaccaaagtctgtttccccgtccgcagtgggtgttgcctctttgtgtgtgtcccgatgttcctgcctgtgagtcggccttactccgtttccttagcgcccatgacacgccaagtcccgtttcgcactcggcttctcacccgcccagctcggctagggagggggagtttttagcacctaatatgcttcctgccattgcgcaatctgagcctgagcaactggaaacccccatttctcattagtgcaatgtcatatctgatcccaggaagcctggaaaataaaagacgatgcattataacttgcggaagt

SEQ ID NO: 621 - DNA, 3587 bp, Homo sapiens
  source 1..3587: mol_type = unassigned DNA
tgcggcggcgctgcctggcgtgtgcgcaaggagcgggcgcggagccggcgggcgggcggaggatagcgcgggcgcggcacctgcgggcccgagggtctggctgtcgcagcgccgggccgccccgactccgagcggctgctgagatgagtgcagtgtcgcagccccaggctgctcccagcccgctggagaagtcgcccagcacggcgatcctgtgcaacacgtgtgggaatgtgtgcaagggcgaggtgctgcgggtgcaggacaagtacttccacatcaagtgcttcgtctgtaaagcatgtggctgcgacctggccgagggcggcttcttcgtgcggcagggcgagtacatctgcacgctggactaccagaggctctacggcacccgctgcttcagctgcgaccagttcattgagggtgaggtggtgtcggcgctgggcaagacctaccaccccgactgcttcgtgtgtgccgtctgccggctgcccttcccccccggggaccgagtgaccttcaacgggaaggaatgcatgtgccagaagtgttccctgcccgtatcggtgggcagcagcgcgcacctgtcccagggcctccgaagttgtgggggctgcggcacagaaatcaagaatggccaggccctggtagccttggacaagcactggcacttgggctgttttaagtgcaagagctgtgggaagctcctgaatgccgagtacatcagcaaggatgggctgccctactgcgaagctgactatcacgccaagttcggcatccgctgtgacagctgtgagaaatacatcacggggcgcgtgctggaggccggagagaagcactaccacccttcctgcgcgctatgtgtcaggtgcggccagatgtttgcagaaggcgaagagatgtatcttcaaggttcctccatctggcatccggcgtgtcgacaagcagccagaactgaagacagaaacaaggaaaccagaacttcctcagagagcatcatttctgtccctgcttccagcacctcagggtctccgagccgtgtgatttatgccaagcttggtggtgagatcctggactacagggacttggcagcccttcctaaaagtaaggccatctatgacatcgaccgccccgacatgatctcctactcaccctacatcagccactctgcaggggacaggcagagctacggcgagtcccctcagttgctctcgccaacgccgaccgagggggatcaggatgaccggtcctacaagcagtgtcggacctccagcccaagctccactgggtcggttagcctcgggcgctacactccgacctcacggtcaccacagcactacagccgtccagacactggcgtaaaagataacatctataggaaaccccctatctacagacagcatgctgccaggcgatcggatggggaggatggaagcttggaccaggataacaggaagcagaagagcagctggctgatgctcaagggggatgcagacacaaggaccaattctccagacctggacacccagtccttgtcccacagcagcgggaccgacagagaccctctccaaaggatggcaggggacagctttcactcacgattcccctattccaaatctgaccctctcccaggacatggaaagaatggcttggaccagcggaatgccaatctggccccctgtggagcagacccggatgccagctggggcatgcgagaatacaagatctatccgtatgactccctcatcgtcacaaaccgaattcgcgtgaaactgcccaaagacgtggaccggacgagactggagagacacttgtcgcccgaggagttccaggaagtgtttgggatgagcatcgaggagtttgaccgcctggccctctggaagaggaatgaccttaagaagaaagcccttttgttctgacggctgccagcctgccccactggtgtgtgccgggcgccgaggccaggggcccctggcgagaaccgcacacacccctcccacacaccttgctctggcttctctgtgtccatggggtgggcgggagggggtcccccagcaggtgcggcccctgcacctgccggcgacactcctgccggtagtttagggccgagacggctagcttcacgccacccttccccgctgtggcttggtgtcagggagaggctgtagagtggctgtgtcgggcatcagatggagcacacaggtggctgcagcccagcccaccttcccagcgttctcgaggtgccctggccccggtgctgggcacgtgggggacagaggtggccgggacgtgagctgtgaggcttgttgatgatggttgctgacaccatcatcgggggtgggcacacggcccttcggagcctgggcagcctggcctcacaggcagactcgcagacggggcagtgagcgtctgggacagtgccaagagtggggtgtgtgatttttgcaggcgtctgtgatgggtctctttagggacaaatgtcaacaagggacaagacagggcaccttccgccagcgcccctccatgcgctgcgttcctcctccagatcgacccctagatgcctacacaatatctttaaagtaacacagaagtttttattttattaaaaagtatagcctacttaaacgcgagatgacatatatagagtttaattttacggtccctccgcaggggagcggcctccagccttattctccaccgctcggatctgtgtggtttcagtctgttcttggtgtggtcctcatacacagagctccctgtctagtttcttttctttttcttttttctttttctcgtcacacaggtaaccttaaagacagacccctctaaagaacgctttgtaaatacatgtgaggtatagccaccactgttttccttgctgttatttttccaagtcttggggagaaaacatcctcctctgatggccaaagccctggaatcaagggtttccacgtaccctgcctaatacccgacgtagctcttgatgcaccgtccttgtgctgtggctggcggtgtctcagcctgaaacataaaccccacatgccccaggagcgatgtgctccctgaaacagacaaccacacgctgttggggagagaaggatggagataggatggagataggatggagatgtggctcttctcatctttgaagccagcagggcatcccggagcaggaggctggccgggctccccaagcgaaggcgttggtgtctgtcattaggtgtgtgttagggtgcagcaccggccgtcacaggatgctgataagcgcgctgagaggtggatgaaacaccaaagtctgtttccccgtccgcagtgggtgttgcctctttgtgtgtgtcccgatgttcctgcctgtgagtcggccttactccgtttccttagcgcccatgacacgccaagtcccgtttcgcactcggcttctcacccgcccagctcggctagggagggggagtttttagcacctaatatgcttcctgccattgcgcaatctgagcctgagcaactggaaacccccatttctcattagtgcaatgtcatatctgatcccaggaagcctggaaaataaaagacgatgcattataacttgcggaagt

SEQ ID NO: 622 - DNA, 2589 bp, Homo sapiens
  source 1..2589: mol_type = unassigned DNA
acctgcgggcccgagggtctggctgtcgcagcgccgggccgccccgactccgagcggctgctgagatgagtgcagtgtcgcagccccaggctgctcccagcccgctggagaagtcgcccagcacggcgatcctgtgcaacacgtgtgggaatgtgtgcaagggcgaggtgctgcgggtgcaggacaagtacttccacatcaagtgcttcgtctgtaaagcatgtggctgcgacctggccgagggcggcttcttcgtgcggcagggcgagtacatctgcacgctggactaccagaggctctacggcacccgctgcttcagctgcgaccagttcattgagggtgaggtggtgtcggcgctgggcaagacctaccaccccgactgcttcgtgtgtgccgtctgccggctgcccttcccccccggggaccgagtgaccttcaacgggaaggaatgcatgtgccagaagtgttccctgcccgtatcggtgggcagcagcgcgcacctgtcccagggcctccgaagttgtgggggctgcggcacagaaatcaagaatggccaggccctggtagccttggacaagcactggcacttgggctgttttaagtgcaagagctgtgggaagctcctgaatgccgagtacatcagcaaggatgggctgccctactgcgaagctgactatcacgccaagttcggcatccgctgtgacagctgtgagaaatacatcacggggcgcgtgctggaggccggagagaagcactaccacccttcctgcgcgctatgtgtcaggtgcggccagatgtttgcagaaggcgaagagatgtatcttcaaggttcctccatctggcatccggcgtgtcgacaagcagccagaactgaagacagaaacaaggaaaccagaacttcctcagagagcatcatttctgtccctgcttccagcacctcagggtctccgagccgtgtgatttatgccaagcttggtggtgagatcctggactacagggacttggcagcccttcctaaaagtaaggccatctatgacatcgaccgccccgacatgatctcctactcaccctacatcagccactctgcaggggacaggcagagctacggcgagggggatcaggatgaccggtcctacaagcagtgtcggacctccagcccaagctccactgggtcggttagcctcgggcgctacactccgacctcacggtcaccacagcactacagccgtccaggcagtgaaagtggccggagcacccccagcctctccgtgctctctgacagcaagccgcccccctccacctaccagcaggcacctcgccacttccacgtcccagacactggcgtaaaagataacatctataggaaaccccctatctacagacagcatgctgccaggcgatcggatggggaggatggaagcttggaccaggataacaggaagaagagcagctggctgatgctcaagggggatgcagacacaaggaccaattctccagacctggacacccagtccttgtcccacagcagcgggaccgacagagaccctctccaaaggatggcaggggacagctttcactcacgattcccctattccaaatctgaccctctcccaggacatggaaagaatggcttggaccagcggaatgccaatctggccccctgtggagcagacccggatgccagctggggcatgcgagaatacaagatctatccgtatgactccctcatcgtcacaaaccgaattcgcgtgaaactgcccaaagacgtggaccggacgagactggagagacacttgtcgcccgaggagttccaggaagtgtttgggatgagcatcgaggagtttgaccgcctggccctctggaagaggaatgaccttaagaagaaagcccttttgttctgacggctgccagcctgccccactggtgtgtgccgggcgccgaggccaggggcccctggcgagaaccgcacacacccctcccacacaccttgctctggcttctctgtgtccatggggtgggcgggagggggtcccccagcaggtgcggcccctgcacctgccggcgacactcctgccggtagtttagggccgagacggctagcttcacgccacccttccccgctgtggcttggtgtcagggagaggctgtagagtggctgtgtcgggcatcagatggagcacacaggtggctgcagcccagcccaccttcccagcgttctcgaggtgccctggccccggtgctgggcacgtgggggacagaggtggccgggacgtgagctgtgaggcttgttgatgatggttgctgacaccatcatcgggggtgggcacacggcccttcggagcctgggcagcctggcctcacaggcagactcgcagacggggcagtgagcgtctgggacagtgccaagagtggggtgtgtgatttttgcaggcgtctgtgatgggtctctttagggacaaatgtcaacaagggacaagacagggcaccttccgccagcgcccctccatgcgctgcgttcctcctccagatcgacccctagatgcctacacaatatctttaaagtaacacagaagtttttattttattaaa

SEQ ID NO: 623 - DNA, 2472 bp, Homo sapiens
  source 1..2472: mol_type = unassigned DNA
acctgcgggcccgagggtctggctgtcgcagcgccgggccgccccgactccgagcggctgctgagatgagtgcagtgtcgcagccccaggctgctcccagcccgctggagaagtcgcccagcacggcgatcctgtgcaacacgtgtgggaatgtgtgcaagggcgaggtgctgcgggtgcaggacaagtacttccacatcaagtgcttcgtctgtaaagcatgtggctgcgacctggccgagggcggcttcttcgtgcggcagggcgagtacatctgcacgctggactaccagaggctctacggcacccgctgcttcagctgcgaccagttcattgagggtgaggtggtgtcggcgctgggcaagacctaccaccccgactgcttcgtgtgtgccgtctgccggctgcccttcccccccggggaccgagtgaccttcaacgggaaggaatgcatgtgccagaagtgttccctgcccgtatcggtgggcagcagcgcgcacctgtcccagggcctccgaagttgtgggggctgcggcacagaaatcaagaatggccaggccctggtagccttggacaagcactggcacttgggctgttttaagtgcaagagctgtgggaagctcctgaatgccgagtacatcagcaaggatgggctgccctactgcgaagctgactatcacgccaagttcggcatccgctgtgacagctgtgagaaatacatcacggggcgcgtgctggaggccggagagaagcactaccacccttcctgcgcgctatgtgtcaggtgcggccagatgtttgcagaaggcgaagagatgtatcttcaaggttcctccatctggcatccggcgtgtcgacaagcagccagaactgaagacagaaacaaggaaaccagaacttcctcagagagcatcatttctgtccctgcttccagcacctcagggtctccgagccgtgtgatttatgccaagcttggtggtgagatcctggactacagggacttggcagcccttcctaaaagtaaggccatctatgacatcgaccgccccgacatgatctcctactcaccctacatcagccactctgcaggggacaggcagagctacggcgagggggatcaggatgaccggtcctacaagcagtgtcggacctccagcccaagctccactgggtcggttagcctcgggcgctacactccgacctcacggtcaccacagcactacagccgtccaggcagtgaaagtggccggagcacccccagcctctccgtgctctctgacagcaagccgcccccctccacctaccagcaggcacctcgccacttccacgtcccagacactggcgtaaaagataacatctataggaaaccccctatctacagacagcatgctgccaggcgatcggatggggaggatggaagcttggaccaggataacaggaagaagagcagctggctgatgctcaagggggatgcagacacaaggaccaattctccagacctggacacccagtccttgtcccacagcagcgggaccgacagagaccctctccaaaggatggcaggggacagctttcactcacaatacaagatctatccgtatgactccctcatcgtcacaaaccgaattcgcgtgaaactgcccaaagacgtggaccggacgagactggagagacacttgtcgcccgaggagttccaggaagtgtttgggatgagcatcgaggagtttgaccgcctggccctctggaagaggaatgaccttaagaagaaagcccttttgttctgacggctgccagcctgccccactggtgtgtgccgggcgccgaggccaggggcccctggcgagaaccgcacacacccctcccacacaccttgctctggcttctctgtgtccatggggtgggcgggagggggtcccccagcaggtgcggcccctgcacctgccggcgacactcctgccggtagtttagggccgagacggctagcttcacgccacccttccccgctgtggcttggtgtcagggagaggctgtagagtggctgtgtcgggcatcagatggagcacacaggtggctgcagcccagcccaccttcccagcgttctcgaggtgccctggccccggtgctgggcacgtgggggacagaggtggccgggacgtgagctgtgaggcttgttgatgatggttgctgacaccatcatcgggggtgggcacacggcccttcggagcctgggcagcctggcctcacaggcagactcgcagacggggcagtgagcgtctgggacagtgccaagagtggggtgtgtgatttttgcaggcgtctgtgatgggtctctttagggacaaatgtcaacaagggacaagacagggcaccttccgccagcgcccctccatgcgctgcgttcctcctccagatcgacccctagatgcctacacaatatctttaaagtaacacagaagtttttattttattaaa

SEQ ID NO: 624 - DNA, 3396 bp, Homo sapiens
  source 1..3396: mol_type = unassigned DNA
gtgcgcaaggagcgggcgcggagccggcgggcgggcggaggatagcgcgggcgcggcacctgcgggcccgagggtctggctgtcgcagcgccgggccgccccgactccgagcggctgctgagatgagtgcagtgtcgcagccccaggctgctcccagcccgctggagaagtcgcccagcacggcgatcctgtgcaacacgtgtgggaatgtgtgcaagggcgaggtgctgcgggtgcaggacaagtacttccacatcaagtgcttcgtctgtaaagcatgtggctgcgacctggccgagggcggcttcttcgtgcggcagggcgagtacatctgcacgctggactaccagaggctctacggcacccgctgcttcagctgcgaccagttcattgagggtgaggtggtgtcggcgctgggcaagacctaccaccccgactgcttcgtgtgtgccgtctgccggctgcccttcccccccggggaccgagtgaccttcaacgggaaggaatgcatgtgccagaagtgttccctgcccgtatcggtgggcagcagcgcgcacctgtcccagggcctccgaagttgtgggggctgcggcacagaaatcaagaatggccaggccctggtagccttggacaagcactggcacttgggctgttttaagtgcaagagctgtgggaagctcctgaatgccgagtacatcagcaaggatgggctgccctactgcgaagctgactatcacgccaagttcggcatccgctgtgacagctgtgagaaatacatcacggggcgcgtgctggaggccggagagaagcactaccacccttcctgcgcgctatgtgtcaggtgcggccagatgtttgcagaaggcgaagagatgtatcttcaaggttcctccatctggcatccggcgtgtcgacaagcagccagaactgaagacagaaacaaggaaaccagaacttcctcagagagcatcatttctgtccctgcttccagcacctcagggtctccgagccgtgtgatttatgccaagcttggtggtgagatcctggactacagggacttggcagcccttcctaaaagtaaggccatctatgacatcgaccgccccgacatgatctcctactcaccctacatcagccactctgcaggggacaggcagagctacggcgagtcccctcagttgctctcgccaacgccgaccgagggggatcaggatgaccggtcctacaagcagtgtcggacctccagcccaagctccactgggtcggttagcctcgggcgctacactccgacctcacggtcaccacagcactacagccgtccagctgccaggcgatcggatggggaggatggaagcttggaccaggataacaggaagaagagcagctggctgatgctcaagggggatgcagacacaaggaccaattctccagacctggacacccagtccttgtcccacagcagcgggaccgacagagaccctctccaaaggatggcaggggacagctttcactcacaatacaagatctatccgtatgactccctcatcgtcacaaaccgaattcgcgtgaaactgcccaaagacgtggaccggacgagactggagagacacttgtcgcccgaggagttccaggaagtgtttgggatgagcatcgaggagtttgaccgcctggccctctggaagaggaatgaccttaagaagaaagcccttttgttctgacggctgccagcctgccccactggtgtgtgccgggcgccgaggccaggggcccctggcgagaaccgcacacacccctcccacacaccttgctctggcttctctgtgtccatggggtgggcgggagggggtcccccagcaggtgcggcccctgcacctgccggcgacactcctgccggtagtttagggccgagacggctagcttcacgccacccttccccgctgtggcttggtgtcagggagaggctgtagagtggctgtgtcgggcatcagatggagcacacaggtggctgcagcccagcccaccttcccagcgttctcgaggtgccctggccccggtgctgggcacgtgggggacagaggtggccgggacgtgagctgtgaggcttgttgatgatggttgctgacaccatcatcgggggtgggcacacggcccttcggagcctgggcagcctggcctcacaggcagactcgcagacggggcagtgagcgtctgggacagtgccaagagtggggtgtgtgatttttgcaggcgtctgtgatgggtctctttagggacaaatgtcaacaagggacaagacagggcaccttccgccagcgcccctccatgcgctgcgttcctcctccagatcgacccctagatgcctacacaatatctttaaagtaacacagaagtttttattttattaaaaagtatagcctacttaaacgcgagatgacatatatagagtttaattttacggtccctccgcaggggagcggcctccagccttattctccaccgctcggatctgtgtggtttcagtctgttcttggtgtggtcctcatacacagagctccctgtctagtttcttttctttttcttttttctttttctcgtcacacaggtaaccttaaagacagacccctctaaagaacgctttgtaaatacatgtgaggtatagccaccactgttttccttgctgttatttttccaagtcttggggagaaaacatcctcctctgatggccaaagccctggaatcaagggtttccacgtaccctgcctaatacccgacgtagctcttgatgcaccgtccttgtgctgtggctggcggtgtctcagcctgaaacataaaccccacatgccccaggagcgatgtgctccctgaaacagacaaccacacgctgttggggagagaaggatggagataggatggagataggatggagatgtggctcttctcatctttgaagccagcagggcatcccggagcaggaggctggccgggctccccaagcgaaggcgttggtgtctgtcattaggtgtgtgttagggtgcagcaccggccgtcacaggatgctgataagcgcgctgagaggtggatgaaacaccaaagtctgtttccccgtccgcagtgggtgttgcctctttgtgtgtgtcccgatgttcctgcctgtgagtcggccttactccgtttccttagcgcccatgacacgccaagtcccgtttcgcactcggcttctcacccgcccagctcggctagggagggggagtttttagcacctaatatgcttcctgccattgcgcaatctgagcctgagcaactggaaacccccatttctcattagtgcaatgtcatatctgatcccaggaagcctggaaaataaaagacgatgcattataacttgcggaagtacaa

SEQ ID NO: 625 - DNA, 3752 bp, Homo sapiens
  source 1..3752: mol_type = unassigned DNA
tgcggcggcgctgcctggcgtgtgcgcaaggagcgggcgcggagccggcgggcgggcggaggatagcgcgggcgcggcacctgcgggcccgagggtctggctgtcgcagcgccgggccgccccgactccgagcggctgctgagatgagtgcagtgtcgcagccccaggctgctcccagcccgctggagaagtcgcccagcacggcgatcctgtgcaacacgtgtgggaatgtgtgcaagggcgaggtgctgcgggtgcaggacaagtacttccacatcaagtgcttcgtctgtaaagcatgtggctgcgacctggccgagggcggcttcttcgtgcggcagggcgagtacatctgcacgctggactaccagaggctctacggcacccgctgcttcagctgcgaccagttcattgagggtgaggtggtgtcggcgctgggcaagacctaccaccccgactgcttcgtgtgtgccgtctgccggctgcccttcccccccggggaccgagtgaccttcaacgggaaggaatgcatgtgccagaagtgttccctgcccgtatcggtgggcagcagcgcgcacctgtcccagggcctccgaagttgtgggggctgcggcacagaaatcaagaatggccaggccctggtagccttggacaagcactggcacttgggctgttttaagtgcaagagctgtgggaagctcctgaatgccgagtacatcagcaaggatgggctgccctactgcgaagctgactatcacgccaagttcggcatccgctgtgacagctgtgagaaatacatcacggggcgcgtgctggaggccggagagaagcactaccacccttcctgcgcgctatgtgtcaggtgcggccagatgtttgcagaaggcgaagagatgtatcttcaaggttcctccatctggcatccggcgtgtcgacaagcagccagaactgaagacagaaacaaggaaaccagaacttcctcagagagcatcatttctgtccctgcttccagcacctcagggtctccgagccgtgtgatttatgccaagcttggtggtgagatcctggactacagggacttggcagcccttcctaaaagtaaggccatctatgacatcgaccgccccgacatgatctcctactcaccctacatcagccactctgcaggggacaggcagagctacggcgagggggatcaggatgaccggtcctacaagcagtgtcggacctccagcccaagctccactgggtcggttagcctcgggcgctacactccgacctcacggtcaccacagcactacagccgtccagctggtactgtgagtgtgggtaccagtagctgcctctccctgtcccaacacccaagccctacatccgtgttcagacatcattacatcccctacttccgaggcagtgaaagtggccggagcacccccagcctctccgtgctctctgacagcaagccgccccctccacctaccagcaggcacctcgccactcacgtcccagacactggcgtaaaagataacatctataggaaaccccctatctacagacagcatgctgccaggcgatcggatggggaggatggaagcttggaccaggataacaggaagcagaagagcagctggctgatgctcaagggggatgcagacacaaggaccaattctccagacctggacacccagtccttgtcccacagcagcgggaccgacagagaccctctccaaaggatggcaggggacagctttcactcacgattcccctattccaaatctgaccctctcccaggacatggaaagaatggcttggaccagcggaatgccaatctggccccctgtggagcagacccggatgccagctggggcatgcgagaatacaagatctatccgtatgactccctcatcgtcacaaaccgaattcgcgtgaaactgcccaaagacgtggaccggacgagactggagagacacttgtcgcccgaggagttccaggaagtgtttgggatgagcatcgaggagtttgaccgcctggccctctggaagaggaatgaccttaagaagaaagcccttttgttctgacggctgccagcctgccccactggtgtgtgccgggcgccgaggccaggggcccctggcgagaaccgcacacacccctcccacacaccttgctctggcttctctgtgtccatggggtgggcgggagggggtcccccagcaggtgcggcccctgcacctgccggcgacactcctgccggtagtttagggccgagacggctagcttcacgccacccttccccgctgtggcttggtgtcagggagaggctgtagagtggctgtgtcgggcatcagatggagcacacaggtggctgcagcccagcccaccttcccagcgttctcgaggtgccctggccccggtgctgggcacgtgggggacagaggtggccgggacgtgagctgtgaggcttgttgatgatggttgctgacaccatcatcgggggtgggcacacggcccttcggagcctgggcagcctggcctcacaggcagactcgcagacggggcagtgagcgtctgggacagtgccaagagtggggtgtgtgatttttgcaggcgtctgtgatgggtctctttagggacaaatgtcaacaagggacaagacagggcaccttccgccagcgcccctccatgcgctgcgttcctcctccagatcgacccctagatgcctacacaatatctttaaagtaacacagaagtttttattttattaaaaagtatagcctacttaaacgcgagatgacatatatagagtttaattttacggtccctccgcaggggagcggcctccagccttattctccaccgctcggatctgtgtggtttcagtctgttcttggtgtggtcctcatacacagagctccctgtctagtttcttttctttttcttttttctttttctcgtcacacaggtaaccttaaagacagacccctctaaagaacgctttgtaaatacatgtgaggtatagccaccactgttttccttgctgttatttttccaagtcttggggagaaaacatcctcctctgatggccaaagccctggaatcaagggtttccacgtaccctgcctaatacccgacgtagctcttgatgcaccgtccttgtgctgtggctggcggtgtctcagcctgaaacataaaccccacatgccccaggagcgatgtgctccctgaaacagacaaccacacgctgttggggagagaaggatggagataggatggagataggatggagatgtggctcttctcatctttgaagccagcagggcatcccggagcaggaggctggccgggctccccaagcgaaggcgttggtgtctgtcattaggtgtgtgttagggtgcagcaccggccgtcacaggatgctgataagcgcgctgagaggtggatgaaacaccaaagtctgtttccccgtccgcagtgggtgttgcctctttgtgtgtgtcccgatgttcctgcctgtgagtcggccttactccgtttccttagcgcccatgacacgccaagtcccgtttcgcactcggcttctcacccgcccagctcggctagggagggggagtttttagcacctaatatgcttcctgccattgcgcaatctgagcctgagcaactggaaacccccatttctcattagtgcaatgtcatatctgatcccaggaagcctggaaaataaaagacgatgcattataacttgcggaagt

SEQ ID NO: 626 - DNA, 2291 bp, Homo sapiens
  source 1..2291: mol_type = unassigned DNA
gggcgggcggaggatagcgcgggcgcggcacctgcgggcccgagggtctggctgtcgcagcgccgggccgccccgactccgagcggctgctgagatgagtgcagtgtcgcagccccaggctgctcccagcccgctggagaagtcgcccagcacggcgatcctgtgcaacacgtgtgggaatgtgtgcaagggcgaggtgctgcgggtgcaggacaagtacttccacatcaagtgcttcgtctgtaaagcatgtggctgcgacctggccgagggcggcttcttcgtgcggcagggcgagtacatctgcacgctggactaccagaggctctacggcacccgctgcttcagctgcgaccagttcattgagggtgaggtggtgtcggcgctgggcaagacctaccaccccgactgcttcgtgtgtgccgtctgccggctgcccttcccccccggggaccgagtgaccttcaacgggaaggaatgcatgtgccagaagtgttccctgcccgtatcggtgggcagcagcgcgcacctgtcccagggcctccgaagttgtgggggctgcggcacagaaatcaagaatggccaggccctggtagccttggacaagcactggcacttgggctgttttaagtgcaagagctgtgggaagctcctgaatgccgagtacatcagcaaggatgggctgccctactgcgaagctgactatcacgccaagttcggcatccgctgtgacagctgtgagaaatacatcacggggcgcgtgctggaggccggagagaagcactaccacccttcctgcgcgctatgtgtcaggtgcggccagatgtttgcagaaggcgaagagatgtatcttcaaggttcctccatctggcatccggcgtgtcgacaagcagccagaactgaagacagaaacaaggaaaccagaacttcctcagagagcatcatttctgtccctgcttccagcacctcagggtctccgagccgtgtgatttatgccaagcttggtggtgagatcctggactacagggacttggcagcccttcctaaaagtaaggccatctatgacatcgaccgccccgacatgatctcctactcaccctacatcagccactctgcaggggacaggcagagctacggcgagggggatcaggatgaccggtcctacaagcagtgtcggacctccagcccaagctccactgggtcggttagcctcgggcgctacactccgacctcacggtcaccacagcactacagccgtccagctgccaggcgatcggatggggaggatggaagcttggaccaggataacaggaagcagaagagcagctggctgatgctcaagggggatgcagacacaaggaccaattctccagacctggacacccagtccttgtcccacagcagcgggaccgacagagaccctctccaaaggatggcaggggacagctttcactcacaatacaagatctatccgtatgactccctcatcgtcacaaaccgaattcgcgtgaaactgcccaaagacgtggaccggacgagactggagagacacttgtcgcccgaggagttccaggaagtgtttgggatgagcatcgaggagtttgaccgcctggccctctggaagaggaatgaccttaagaagaaagcccttttgttctgacggctgccagcctgccccactggtgtgtgccgggcgccgaggccaggggcccctggcgagaaccgcacacacccctcccacacaccttgctctggcttctctgtgtccatggggtgggcgggagggggtcccccagcaggtgcggcccctgcacctgccggcgacactcctgccggtagtttagggccgagacggctagcttcacgccacccttccccgctgtggcttggtgtcagggagaggctgtagagtggctgtgtcgggcatcagatggagcacacaggtggctgcagcccagcccaccttcccagcgttctcgaggtgccctggccccggtgctgggcacgtgggggacagaggtggccgggacgtgagctgtgaggcttgttgatgatggttgctgacaccatcatcgggggtgggcacacggcccttcggagcctgggcagcctggcctcacaggcagactcgcagacggggcagtgagcgtctgggacagtgccaagagtggggtgtgtgatttttgcaggcgtctgtgatgggtctctttagggacaaatgtcaacaagggacaagacagggcaccttccgccagcgcccctccatgcgctgcgttcctcctccagatcga

SEQ ID NO: 627 - DNA, 2573 bp, Homo sapiens
  source 1..2573: mol_type = unassigned DNA
tgcggcggcgctgcctggcgtgtgcgcaaggagcgggcgcggagccggcgggcgggcggaggatagcgcgggcgcggcacctgcgggcccgagggtctggctgtcgcagcgccgggccgccccgactccgagcggctgctgagatgagtgcagtgtcgcagccccaggctgctcccagcccgctggagaagtcgcccagcacggcgatcctgtgcaacacgtgtgggaatgtgtgcaagggcgaggtgctgcgggtgcaggacaagtacttccacatcaagtgcttcgtctgtaaagcatgtggctgcgacctggccgagggcggcttcttcgtgcggcagggcgagtacatctgcacgctggactaccagaggctctacggcacccgctgcttcagctgcgaccagttcattgagggtgaggtggtgtcggcgctgggcaagacctaccaccccgactgcttcgtgtgtgccgtctgccggctgcccttcccccccggggaccgagtgaccttcaacgggaaggaatgcatgtgccagaagtgttccctgcccgtatcggtgggcagcagcgcgcacctgtcccagggcctccgaagttgtgggggctgcggcacagaaatcaagaatggccaggccctggtagccttggacaagcactggcacttgggctgttttaagtgcaagagctgtgggaagctcctgaatgccgagtacatcagcaaggatgggctgccctactgcgaagctgactatcacgccaagttcggcatccgctgtgacagctgtgagaaatacatcacggggcgcgtgctggaggccggagagaagcactaccacccttcctgcgcgctatgtgtcaggtgcggccagatgtttgcagaaggcgaagagatgtatcttcaaggttcctccatctggcatccggcgtgtcgacaagcagccagaactgaagacagaaacaaggaaaccagaacttcctcagagagcatcatttctgtccctgcttccagcacctcagggtctccgagccgtgtgatttatgccaagcttggtggtgagatcctggactacagggacttggcagcccttcctaaaagtaaggccatctatgacatcgaccgccccgacatgatctcctactcaccctacatcagccactctgcaggggacaggcagagctacggcgagtcccctcagttgctctcgccaacgccgaccgagggggatcaggatgaccggtcctacaagcagtgtcggacctccagcccaagctccactgggtcggttagcctcgggcgctacactccgacctcacggtcaccacagcactacagccgtccagctgccaggcgatcggatggggaggatggaagcttggaccaggataacaggaagcagaagagcagctggctgatgctcaagggggatgcagacacaaggaccaattctccagacctggacacccagtccttgtcccacagcagcgggaccgacagagaccctctccaaaggatggcaggggacagctttcactcacgtgagtggttcttttgaagaaggagccgtgatgtgcacaaaatgcctcgcggcaaagaggccccagaactcagagctatccccctacatctaagccttgcctgttaaaaagcatgaaagcaaagcccacaaatctaaggaccgaccggaaggaaatatggggcttttgcagtttgccggcttcccaagaactgtccccgagccagtgtgctaacgagggccacgcctgcatgtcccctcacagatttccaaggtgtgcaagaatgcagaaacccagacctgctcctgggctgtttaggagaaaggcgtccgggctgccgggtggaagtcagggcctgttccctccagagcagacatgggcatggtccggctgatgagtgcagacttggagttggtgatgggcaccatccctgtcccctgtgactcatcctgaacgaggcacagcctcaggcttcatagagagacagtgatggtgtctgcctgaccctaggggtgttttgaagactgaatcaggagtgattttcaaatgtagagaaaactccagataatgctgtttgcttccggccgctgtaaatcataggtgaaaaccagtagcaagtgctcactcagtgcctcccagaagcggtctgcgggtctcagctgggctgggggcagttttcattgggcaaggcttgggcttagcttcgaagcaggggctgggagaggatggatgggggtgtgagagcagaagaaagacctggctttgcagtgaggcagtcccaagttcaaatctgagctcaccactgacccgtcgtgtgatgggcgccaggtgttaggagactggaactgggtatgtgtgtggcattcggccggccatagtagctgctcagtaaacagaaactgtttctcatcctcatcctcatcctcatgcctgcaaactgtaaaccgtcctacttaacaatgaaagtagaaaagtgtttcaatgtgacaggaaagagtgaagacacagaagcttggaaatgatgatgtgttaaagaatcactttaaacaaagaaa

SEQ ID NO: 628 - DNA, 2902 bp, Homo sapiens
  source 1..2902: mol_type = unassigned DNA
gactccgagcggctgctgagatgagtgcagtgtcgcagccccaggctgctcccagcccgctggagaagtcgcccagcacggcgatcctgtgcaacacgtgtgggaatgtgtgcaagggcgaggtgctgcgggtgcaggacaagtacttccacatcaagtgcttcgtctgtaaagcatgtggctgcgacctggccgagggcggcttcttcgtgcggcagggcgagtacatctgcacgctggactaccagaggctctacggcacccgctgcttcagctgcgaccagttcattgagggtgaggtggtgtcggcgctgggcaagacctaccaccccgactgcttcgtgtgtgccgtctgccggctgcccttcccccccggggaccgagtgaccttcaacgggaaggaatgcatgtgccagaagtgttccctgcccgtatcggtgggcagcagcgcgcacctgtcccagggcctccgaagttgtgggggctgcggcacagaaatcaagaatggccaggccctggtagccttggacaagcactggcacttgggctgttttaagtgcaagagctgtgggaagctcctgaatgccgagtacatcagcaaggatgggctgccctactgcgaagctgactatcacgccaagttcggcatccgctgtgacagctgtgagaaatacatcacggggcgcgtgctggaggccggagagaagcactaccacccttcctgcgcgctatgtgtcaggtgcggccagatgtttgcagaaggcgaagagatgtatcttcaaggttcctccatctggcatccggcgtgtcgacaagcagccagaactgaagacagaaacaaggaaaccagaacttcctcagagagcatcatttctgtccctgcttccagcacctcagggtctccgagccgtgtgatttatgccaagcttggtggtgagatcctggactacagggacttggcagcccttcctaaaagtaaggccatctatgacatcgaccgccccgacatgatctcctactcaccctacatcagccactctgcaggggacaggcagagctacggcgagggggatcaggatgaccggtcctacaagcagtgtcggacctccagcccaagctccactgggtcggttagcctcgggcgctacactccgacctcacggtcaccacagcactacagccgtccagctggtactgtgagtgtgggtaccagtagctgcctctccctgtcccaacacccaagccctacatccgtgttcagacatcattacatcccctacttccgaggcagtgaaagtggccggagcacccccagcctctccgtgctctctgacagcaagccgcccccctccacctaccagcaggcacctcgccacttccacgtcccagacactggcgtaaaagataacatctataggaaaccccctatctacagacagcatgctgccaggcgatcggatggggaggatggaagcttggaccaggataacaggaagcagaagagcagctggctgatgctcaagggggatgcagacacaaggaccaattctccagacctggacacccagtccttgtcccacagcagcgggaccgacagagaccctctccaaaggatggcaggggacagctttcactcacgattcccctattccaaatctgaccctctcccaggacatggaaagaatggcttggaccagcggaatgccaatctggccccctgtggagcagacccggatgccagctggggcatgcgagaatacaagatctatccgtatgactccctcatcgtcacaaaccgaattcgcgtgaaactgcccaaagacgtggaccggacgagactggagagacacttgtcgcccgaggagttccaggaagtgtttgggatgagcatcgaggagtttgaccgcctggccctctggaagaggaatgaccttaagaagaaagcccttttgttctgacggctgccagcctgccccactggtgtgtgccgggcgccgaggccaggggcccctggcgagaaccgcacacacccctcccacacaccttgctctggcttctctgtgtccatggggtgggcgggagggggtcccccagcaggtgcggcccctgcacctgccggcgacactcctgccggtagtttagggccgagacggctagcttcacgccacccttccccgctgtggcttggtgtcagggagaggctgtagagtggctgtgtcgggcatcagatggagcacacaggtggctgcagcccagcccaccttcccagcgttctcgaggtgccctggccccggtgctgggcacgtgggggacagaggtggccgggacgtgagctgtgaggcttgttgatgatggttgctgacaccatcatcgggggtgggcacacggcccttcggagcctgggcagcctggcctcacaggcagactcgcagacggggcagtgagcgtctgggacagtgccaagagtggggtgtgtgatttttgcaggcgtctgtgatgggtctctttagggacaaatgtcaacaagggacaagacagggcaccttccgccagcgcccctccatgcgctgcgttcctcctccagatcgacccctagatgcctacacaatatctttaaagtaacacagaagtttttattttattaaaaagtatagcctacttaaacgcgagatgacatatatagagtttaattttacggtccctccgcaggggagcggcctccagccttattctccaccgctcggatctgtgtggtttcagtctgttcttggtgtggtcctcatacacagagctccctgtctagtttcttttctttttcttttttctttttctcgtcacacaggtaaccttaaagacagacccctctaaagaacgctttgtaaatacatgtgaggtatagcca

SEQ ID NO: 629 - DNA, 1680 bp, Homo sapiens
  source 1..1680: mol_type = unassigned DNA
atgagtgcagtgtcgcagccccaggctgctcccagcccgctggagaagtcgcccagcacggcgatcctgtgcaacacgtgtgggaatgtgtgcaagggcgaggtgctgcgggtgcaggacaagtacttccacatcaagtgcttcgtctgtaaagcatgtggctgcgacctggccgagggcggcttcttcgtgcggcagggcgagtacatctgcacgctggactaccagaggctctacggcacccgctgcttcagctgcgaccagttcattgagggtgaggtggtgtcggcgctgggcaagacctaccaccccgactgcttcgtgtgtgccgtctgccggctgcccttcccccccggggaccgagtgaccttcaacgggaaggaatgcatgtgccagaagtgttccctgcccgtatcggtgggcagcagcgcgcacctgtcccagggcctccgaagttgtgggggctgcggcacagaaatcaagaatggccaggccctggtagccttggacaagcactggcacttgggctgttttaagtgcaagagctgtgggaagctcctgaatgccgagtacatcagcaaggatgggctgccctactgcgaagctgactatcacgccaagttcggcatccgctgtgacagctgtgagaaatacatcacggggcgcgtgctggaggccggagagaagcactaccacccttcctgcgcgctatgtgtcaggtgcggccagatgtttgcagaaggcgaagagatgtatcttcaaggttcctccatctggcatccggcgtgtcgacaagcagccagaactgaagacagaaacaaggaaaccagaacttcctcagagagcatcatttctgtccctgcttccagcacctcagggtctccgagccgtgtgatttatgccaagcttggtggtgagatcctggactacagggacttggcagcccttcctaaaagtaaggccatctatgacatcgaccgccccgacatgatctcctactcaccctacatcagccactctgcaggggacaggcagagctacggcgagggggatcaggatgaccggtcctacaagcagtgtcggacctccagcccaagctccactgggtcggttagcctcgggcgctacactccgacctcacggtcaccacagcactacagccgtccagctgccaggcgatcggatggggaggatggaagcttggaccaggataacaggaagaagagcagctggctgatgctcaagggggatgcagacacaaggaccaattctccagacctggacacccagtccttgtcccacagcagcgggaccgacagagaccctctccaaaggatggcaggggacagctttcactcacgattcccctattccaaatctgaccctctcccaggacatggaaagaatggcttggaccagcggaatgccaatctggccccctgtggagcagacccggatgccagctggggcatgcgagaatacaagatctatccgtatgactccctcatcgtcacaaaccgaattcgcgtgaaactgcccaaagacgtggaccggacgagactggagagacacttgtcgcccgaggagttccaggaagtgtttgggatgagcatcgaggagtttgaccgcctggccctctggaagaggaatgaccttaagaagaaagcccttttgttctga

SEQ ID NO: 630 - DNA, 2974 bp, Homo sapiens
  source 1..2974: mol_type = unassigned DNA
agaaggggagctgccgccgccgcggtggcactgcctgatgctcggcccagtgtgccggtgccccgctgggtgacagtggactcccagggcgcagcaggagcaggtgacagactgttggctgaaggtgagggtgtccaccctcgcaggcacacgttccagggagcacggcactcaagcagggccgtcagactgggctctggtgcccagaagctgtgcaggccggagagaagcactaccacccttcctgcgcgctatgtgtcaggtgcggccagatgtttgcagaaggcgaagagatgtatcttcaaggttcctccatctggcatccggcgtgtcgacaagcagccagaactgaagacagaaacaaggaaaccagaacttcctcagagagcatcatttctgtccctgcttccagcacctcagggtctccgagccgtgtgatttatgccaagcttggtggtgagatcctggactacagggacttggcagcccttcctaaaagtaaggccatctatgacatcgaccgccccgacatgatctcctactcaccctacatcagccactctgcaggggacaggcagagctacggcgagtcccctcagttgctctcgccaacgccgaccgagggggatcaggatgaccggtcctacaagcagtgtcggacctccagcccaagctccactgggtcggttagcctcgggcgctacactccgacctcacggtcaccacagcactacagccgtccagacactggcgtaaaagataacatctataggaaaccccctatctacagacagcatgctgccaggcgatcggatggggaggatggaagcttggaccaggataacaggaagcagaagagcagctggctgatgctcaagggggatgcagacacaaggaccaattctccagacctggacacccagtccttgtcccacagcagcgggaccgacagagaccctctccaaaggatggcaggggacagctttcactcacgattcccctattccaaatctgaccctctcccaggacatggaaagaatggcttggaccagcggaatgccaatctggccccctgtggagcagacccggatgccagctggggcatgcgagaatacaagatctatccgtatgactccctcatcgtcacaaaccgaattcgcgtgaaactgcccaaagacgtggaccggacgagactggagagacacttgtcgcccgaggagttccaggaagtgtttgggatgagcatcgaggagtttgaccgcctggccctctggaagaggaatgaccttaagaagaaagcccttttgttctgacggctgccagcctgccccactggtgtgtgccgggcgccgaggccaggggcccctggcgagaaccgcacacacccctcccacacaccttgctctggcttctctgtgtccatggggtgggcgggagggggtcccccagcaggtgcggcccctgcacctgccggcgacactcctgccggtagtttagggccgagacggctagcttcacgccacccttccccgctgtggcttggtgtcagggagaggctgtagagtggctgtgtcgggcatcagatggagcacacaggtggctgcagcccagcccaccttcccagcgttctcgaggtgccctggccccggtgctgggcacgtgggggacagaggtggccgggacgtgagctgtgaggcttgttgatgatggttgctgacaccatcatcgggggtgggcacacggcccttcggagcctgggcagcctggcctcacaggcagactcgcagacggggcagtgagcgtctgggacagtgccaagagtggggtgtgtgatttttgcaggcgtctgtgatgggtctctttagggacaaatgtcaacaagggacaagacagggcaccttccgccagcgcccctccatgcgctgcgttcctcctccagatcgacccctagatgcctacacaatatctttaaagtaacacagaagtttttattttattaaaaagtatagcctacttaaacgcgagatgacatatatagagtttaattttacggtccctccgcaggggagcggcctccagccttattctccaccgctcggatctgtgtggtttcagtctgttcttggtgtggtcctcatacacagagctccctgtctagtttcttttctttttcttttttctttttctcgtcacacaggtaaccttaaagacagacccctctaaagaacgctttgtaaatacatgtgaggtatagccaccactgttttccttgctgttatttttccaagtcttggggagaaaacatcctcctctgatggccaaagccctggaatcaagggtttccacgtaccctgcctaatacccgacgtagctcttgatgcaccgtccttgtgctgtggctggcggtgtctcagcctgaaacataaaccccacatgccccaggagcgatgtgctccctgaaacagacaaccacacgctgttggggagagaaggatggagataggatggagataggatggagatgtggctcttctcatctttgaagccagcagggcatcccggagcaggaggctggccgggctccccaagcgaaggcgttggtgtctgtcattaggtgtgtgttagggtgcagcaccggccgtcacaggatgctgataagcgcgctgagaggtggatgaaacaccaaagtctgtttccccgtccgcagtgggtgttgcctctttgtgtgtgtcccgatgttcctgcctgtgagtcggccttactccgtttccttagcgcccatgacacgccaagtcccgtttcgcactcggcttctcacccgcccagctcggctagggagggggagtttttagcacctaatatgcttcctgccattgcgcaatctgagcctgagcaactggaaacccccatttctcattagtgcaatgtcatatctgatcccaggaagcctggaaaataaaagacgatgcattat

SEQ ID NO: 631 - DNA, 3533 bp, Homo sapiens
  source 1..3533: mol_type = unassigned DNA
tgcggcggcgctgcctggcgtgtgcgcaaggagcgggcgcggagccggcgggcgggcggaggatagcgcgggcgcggcacctgcgggcccgagggtctggctgtcgcagcgccgggccgccccgactccgagcggctgctgagatgagtgcagtgtcgcagccccaggctgctcccagcccgctggagaagtcgcccagcacggcgatcctgtgcaacacgtgtgggaatgtgtgcaagggcgaggtgctgcgggtgcaggacaagtacttccacatcaagtgcttcgtctgtaaagcatgtggctgcgacctggccgagggcggcttcttcgtgcggcagggcgagtacatctgcacgctggactaccagaggctctacggcacccgctgcttcagctgcgaccagttcattgagggtgaggtggtgtcggcgctgggcaagacctaccaccccgactgcttcgtgtgtgccgtctgccggctgcccttcccccccggggaccgagtgaccttcaacgggaaggaatgcatgtgccagaagtgttccctgcccgtatcggtgggcagcagcgcgcacctgtcccagggcctccgaagttgtgggggctgcggcacagaaatcaagaatggccaggccctggtagccttggacaagcactggcacttgggctgttttaagtgcaagagctgtgggaagctcctgaatgccgagtacatcagcaaggatgggctgccctactgcgaagctgactatcacgccaagttcggcatccgctgtgacagctgtgagaaatacatcacggggcgcgtgctggaggccggagagaagcactaccacccttcctgcgcgctatgtgtcaggtgcggccagatgtttgcagaaggcgaagagatgtatcttcaaggttcctccatctggcatccggcgtgtcgacaagcagccagaactgaagacagaaacaaggaaaccagaacttcctcagagagcatcatttctgtccctgcttccagcacctcagggtctccgagccgtgtgatttatgccaagcttggtggtgagatcctggactacagggacttggcagcccttcctaaaagtaaggccatctatgacatcgaccgccccgacatgatctcctactcaccctacatcagccactctgcaggggacaggcagagctacggcgagggggatcaggatgaccggtcctacaagcagtgtcggacctccagcccaagctccactgggtcggttagcctcgggcgctacactccgacctcacggtcaccacagcactacagccgtccaggcagtgaaagtggccggagcacccccagcctctccgtgctctctgacagcaagccgcccccctccacctaccagcaggcacctcgccacttccacgtcccagacactggcgtaaaagataacatctataggaaaccccctatctacagacagcatgctgccaggcgatcggatggggaggatggaagcttggaccaggataacaggaagaagagcagctggctgatgctcaagggggatgcagacacaaggaccaattctccagacctggacacccagtccttgtcccacagcagcgggaccgacagagaccctctccaaaggatggcaggggacagctttcactcacaacagatctatccgtatgactccctcatcgtcacaaaccgaattcgcgtgaaactgcccaaagacgtggaccggacgagactggagagacacttgtcgcccgaggagttccaggaagtgtttgggatgagcatcgaggagtttgaccgcctggccctctggaagaggaatgaccttaagaagaaagcccttttgttctgacggctgccagcctgccccactggtgtgtgccgggcgccgaggccaggggcccctggcgagaaccgcacacacccctcccacacaccttgctctggcttctctgtgtccatggggtgggcgggagggggtcccccagcaggtgcggcccctgcacctgccggcgacactcctgccggtagtttagggccgagacggctagcttcacgccacccttccccgctgtggcttggtgtcagggagaggctgtagagtggctgtgtcgggcatcagatggagcacacaggtggctgcagcccagcccaccttcccagcgttctcgaggtgccctggccccggtgctgggcacgtgggggacagaggtggccgggacgtgagctgtgaggcttgttgatgatggttgctgacaccatcatcgggggtgggcacacggcccttcggagcctgggcagcctggcctcacaggcagactcgcagacggggcagtgagcgtctgggacagtgccaagagtggggtgtgtgatttttgcaggcgtctgtgatgggtctctttagggacaaatgtcaacaagggacaagacagggcaccttccgccagcgcccctccatgcgctgcgttcctcctccagatcgacccctagatgcctacacaatatctttaaagtaacacagaagtttttattttattaaaaagtatagcctacttaaacgcgagatgacatatatagagtttaattttacggtccctccgcaggggagcggcctccagccttattctccaccgctcggatctgtgtggtttcagtctgttcttggtgtggtcctcatacacagagctccctgtctagtttcttttctttttcttttttctttttctcgtcacacaggtaaccttaaagacagacccctctaaagaacgctttgtaaatacatgtgaggtatagccaccactgttttccttgctgttatttttccaagtcttggggagaaaacatcctcctctgatggccaaagccctggaatcaagggtttccacgtaccctgcctaatacccgacgtagctcttgatgcaccgtccttgtgctgtggctggcggtgtctcagcctgaaacataaaccccacatgccccaggagcgatgtgctccctgaaacagacaaccacacgctgttggggagagaaggatggagataggatggagataggatggagatgtggctcttctcatctttgaagccagcagggcatcccggagcaggaggctggccgggctccccaagcgaaggcgttggtgtctgtcattaggtgtgtgttagggtgcagcaccggccgtcacaggatgctgataagcgcgctgagaggtggatgaaacaccaaagtctgtttccccgtccgcagtgggtgttgcctctttgtgtgtgtcccgatgttcctgcctgtgagtcggccttactccgtttccttagcgcccatgacacgccaagtcccgtttcgcactcggcttctcacccgcccagctcggctagggagggggagtttttagcacctaatatgcttcctgccattgcgcaatctgagcctgagcaactggaaacccccatttctcattagtgcaatgtcatatctgatcccaggaagcctggaaaataaaagacgatgcattataacttgcggaagt

SEQ ID NO: 632 - DNA, 3413 bp, Homo sapiens
  source 1..3413: mol_type = unassigned DNA
tgcggcggcgctgcctggcgtgtgcgcaaggagcgggcgcggagccggcgggcgggcggaggatagcgcgggcgcggcacctgcgggcccgagggtctggctgtcgcagcgccgggccgccccgactccgagcggctgctgagatgagtgcagtgtcgcagccccaggctgctcccagcccgctggagaagtcgcccagcacggcgatcctgtgcaacacgtgtgggaatgtgtgcaagggcgaggtgctgcgggtgcaggacaagtacttccacatcaagtgcttcgtctgtaaagcatgtggctgcgacctggccgagggcggcttcttcgtgcggcagggcgagtacatctgcacgctggactaccagaggctctacggcacccgctgcttcagctgcgaccagttcattgagggtgaggtggtgtcggcgctgggcaagacctaccaccccgactgcttcgtgtgtgccgtctgccggctgcccttcccccccggggaccgagtgaccttcaacgggaaggaatgcatgtgccagaagtgttccctgcccgtatcggtgggcagcagcgcgcacctgtcccagggcctccgaagttgtgggggctgcggcacagaaatcaagaatggccaggccctggtagccttggacaagcactggcacttgggctgttttaagtgcaagagctgtgggaagctcctgaatgccgagtacatcagcaaggatgggctgccctactgcgaagctgactatcacgccaagttcggcatccgctgtgacagctgtgagaaatacatcacggggcgcgtgctggaggccggagagaagcactaccacccttcctgcgcgctatgtgtcaggtgcggccagatgtttgcagaaggcgaagagatgtatcttcaaggttcctccatctggcatccggcgtgtcgacaagcagccagaactgaagacagaaacaaggaaaccagaacttcctcagagagcatcatttctgtccctgcttccagcacctcagggtctccgagccgtgtgatttatgccaagcttggtggtgagatcctggactacagggacttggcagcccttcctaaaagtaaggccatctatgacatcgaccgccccgacatgatctcctactcaccctacatcagccactctgcaggggacaggcagagctacggcgagtcccctcagttgctctcgccaacgccgaccgagggggatcaggatgaccggtcctacaagcagtgtcggacctccagcccaagctccactgggtcggttagcctcgggcgctacactccgacctcacggtcaccacagcactacagccgtccagctgccaggcgatcggatggggaggatggaagcttggaccaggataacaggaagaagagcagctggctgatgctcaagggggatgcagacacaaggaccaattctccagacctggacacccagtccttgtcccacagcagcgggaccgacagagaccctctccaaaggatggcaggggacagctttcactcacgtgagcagatctatccgtatgactccctcatcgtcacaaaccgaattcgcgtgaaactgcccaaagacgtggaccggacgagactggagagacacttgtcgcccgaggagttccaggaagtgtttgggatgagcatcgaggagtttgaccgcctggccctctggaagaggaatgaccttaagaagaaagcccttttgttctgacggctgccagcctgccccactggtgtgtgccgggcgccgaggccaggggcccctggcgagaaccgcacacacccctcccacacaccttgctctggcttctctgtgtccatggggtgggcgggagggggtcccccagcaggtgcggcccctgcacctgccggcgacactcctgccggtagtttagggccgagacggctagcttcacgccacccttccccgctgtggcttggtgtcagggagaggctgtagagtggctgtgtcgggcatcagatggagcacacaggtggctgcagcccagcccaccttcccagcgttctcgaggtgccctggccccggtgctgggcacgtgggggacagaggtggccgggacgtgagctgtgaggcttgttgatgatggttgctgacaccatcatcgggggtgggcacacggcccttcggagcctgggcagcctggcctcacaggcagactcgcagacggggcagtgagcgtctgggacagtgccaagagtggggtgtgtgatttttgcaggcgtctgtgatgggtctctttagggacaaatgtcaacaagggacaagacagggcaccttccgccagcgcccctccatgcgctgcgttcctcctccagatcgacccctagatgcctacacaatatctttaaagtaacacagaagtttttattttattaaaaagtatagcctacttaaacgcgagatgacatatatagagtttaattttacggtccctccgcaggggagcggcctccagccttattctccaccgctcggatctgtgtggtttcagtctgttcttggtgtggtcctcatacacagagctccctgtctagtttcttttctttttcttttttctttttctcgtcacacaggtaaccttaaagacagacccctctaaagaacgctttgtaaatacatgtgaggtatagccaccactgttttccttgctgttatttttccaagtcttggggagaaaacatcctcctctgatggccaaagccctggaatcaagggtttccacgtaccctgcctaatacccgacgtagctcttgatgcaccgtccttgtgctgtggctggcggtgtctcagcctgaaacataaaccccacatgccccaggagcgatgtgctccctgaaacagacaaccacacgctgttggggagagaaggatggagataggatggagataggatggagatgtggctcttctcatctttgaagccagcagggcatcccggagcaggaggctggccgggctccccaagcgaaggcgttggtgtctgtcattaggtgtgtgttagggtgcagcaccggccgtcacaggatgctgataagcgcgctgagaggtggatgaaacaccaaagtctgtttccccgtccgcagtgggtgttgcctctttgtgtgtgtcccgatgttcctgcctgtgagtcggccttactccgtttccttagcgcccatgacacgccaagtcccgtttcgcactcggcttctcacccgcccagctcggctagggagggggagtttttagcacctaatatgcttcctgccattgcgcaatctgagcctgagcaactggaaacccccatttctcattagtgcaatgtcatatctgatcccaggaagcctggaaaataaaagacgatgcattataacttgcggaagt

SEQ ID NO: 633 - DNA, 7516 bp, Homo sapiens
  source 1..7516: mol_type = unassigned DNA
gggcgcccggctccgctgggggcgggacggcgggcggcgggcggggccgtgtgcgcctgcgtggtgtctgtcccggccgcagccccacgccggctgcagctccgcgagccgagccggatctcgagcggggtacacgggctgaggcggcggcggcggccccgccccggggctccattgttaaggcggctgcggctctgtcggctgttcagctgcgctccagtcggcccaggcgccgcggcgaggagcgagcgctgcgaggtggcggcctgagcaatggaagagttaatagttgaacttcgtctctttcttgaactcctggaccatgaatatctaacctcaactgtcagggagaaaaaggcagtgataaccaacattctgctaagaatacagtcatccaaaggttttgatgtgaaggaccatgctcagaagcaggagaccgctaacagcctgccagcccctcctcagatgcccctgccggagatccctcagccctggctgcctcctgacagtgggcctccaccattgccaacatcctccctcccagaaggttattatgaggaagctgtgccgctgagccccggaaaagctccggaatacatcacatcaaattatgattccgatgcgatgagcagctcttatgagtcgtatgatgaagaggaggaggatgggaaggggaagaaaacccggcaccagtggccctccgaggaggcctccatggacctggtcaaggacgccaaaatctgcgccttcctgctgcggaagaagcggttcggccagtggaccaagttgctctgcgtcatcaaagacaccaaactgctgtgctataaaagttccaaggaccagcagcctcagatggaactgccactccaaggctgtaacattacgtacatcccgaaagacagcaaaaagaagaagcacgagctgaagattactcagcagggcacggacccgcttgttctcgccgtccagagcaaggaacaggccgagcagtggctgaaggtgatcaaagaagcctacagtggttgtagtggccccgtggattcagagtgtcctcctccaccaagctccccggtgcacaaggcagaactggagaagaaactgtcttcagagagacccagctcagatggggagggtgttgtggaaaatggaattaccacatgtaatggaaaggagcaagtgaagaggaagaaaagttccaaatcagaggccaagggcactgtgtcgaaagtcactgggaaaaaaatcaccaagatcatcagtctgggaaagaaaaagccgtccacagacgagcagacctcctcagctgaggaagatgttcccacctgcggctatctgaacgtgctctccaacagccgctggcgagagcgctggtgccgagtgaaagataacaagctcattttccacaaggacaggaccgacctgaagacccatattgtgtctattccgctccgtggctgcgaggtgatcccgggtttggattctaaacatcctctgacgttccggctgctgcgcaacggccaggaggttgcagtattggaggcatcttcttctgaagacatgggcaggtggattgggattttactcgcagagacgggatcgtccacagacccggaggctctgcactatgactacattgatgtggagatgtctgcaagtgtcattcagacagccaaacagaccttctgtttcatgaacaggcgtgttatatctgctaacccatatctagggggcacctccaacggctatgcccaccccagcgggacggcacttcattatgacgatgtcccgtgcatcaacggctcgctcaagggtaaaaagccccccgtggcgtctaatggggtcacaggaaaagggaagactctgagcagtcagccaaagaaagcggatcccgcggctgttgtgaaaaggacgggttcgaatgctgcccagtacaagtatggcaagaaccgggtagaagcagatgccaagcggctacagaccaaagaggaggagctgctgaagaggaaagaggccctgcggaataggctggcccagctccgcaaggaaagaaaagaccttcgagcggctattgaagtgaacgccggcaggaagccgcaggcgatcctggaggagaagctgaagcagctggaggaggagtgccggcagaaggaggcggagcgtgtcagcctggagctggagctgacggaggtcaaggagagcctgaagaaagcgctggcgggcggagtcaccctggggctggccatcgagcccaagtcagggacatcgagtccacagtctccagtgttccggcaccggaccctggaaaactcgcccatctccagctgtgacaccagtgacaccgagggccccgtgccggtgaacagcgcggccgtcttgaagaagagccaggctgccccgggcagctccccctgccgagggcatgtgctgcggaaggccaaggaatgggaattgaagaacgggacctaggggacagcagcaccactccagcctcagagactgcacacccccttgcctgtatcctcatctgtgtgacggcaggaagctctgcccagagtggcctcagctgcacgactccagaggctccacgactgagctctgaggccagtgcctgtcccccaggcccacttgtattctttctactgtaaaatggcgcctttaaaaaagatgtaagactttggttcccaactttgttaaaaaacaaaaaaagtgatggaaaggtgtttgaaaggatgctatcaggcgaagtgacatctttctaaccagataggccattgctttcaccgattccaacccagccctggactgaggatggatggttccatgagcccccagatgaaaacctggattcgacagggaagagcttggatccccggctgccccgggcatgagtgtggctggccatgggcactgggctcgccttgcacgcccaccaggagggccaggggcatacgcagtcctgacgtggactttgtgtcttggcgtaccctctccacgtgcccgtccccctcgtcatcagaggtaaaggcatgagaaaatcgcgctgtgaaacgttttttaccttttattattattttttggacagatgcttttgtcaccaagacatgaaaagctgccattcttcttaacctgttttttaggaatgtctttttactgtgtgtcacacttagatcaaggagttttcagaggttccttattttattaattaattatttgtgctgcttttgacaggtagcagagggttttaatacttcactaacagtacaccctcctcccccttgggctagcatccccagcccttaatccacgtcggagccggcaggtgcttctcacaccaggagcctctgggggcaggggctggctcctcgccgctgtacaggacgtttactgctgcttggggccagggcagtcctttgaaagggaagcaagttccggaatttgttcgctcatggaactataacaccttagagcaagaggcaggaattccagggcctcctgcccctccccttcctccagcttgtcaagttaaaccactaatgtgttggtgggcctggccgtgctgcctctcctgagtagggtgggtgcaagtagggcctctttcccagctttcttgcttgccttctgtgcaatatttcttggagaatttggatgcctaaggcataaaggaaaaaaacagagttcatagtttgagctggtatttaccccctgggtttaaaaatcagattaacttcttggtctcccggaggctgctgtcaggaattctccagtacgggaagatgcagtcacttatgacgaaataagtcacccctgaacgcctccgcaggcagattcatggagaccagtcccagtagcaaccgccccttccccaagcatagaatacagaggtgccatacttggtgtaagccttccttctgtccactgtccagaatgtcctttttcacacagaggaagagatggcgggaaaacactgactgactccttgggtttcccccagacatactttcagagcgctagctgtgtggtgcacgggactttacagttaggattcatgtttaaggtggtggcgcttgaggcctgcaagggccacgttggattactgaagcggaaagcggtctcccatgtataagaaaaagttttacaacacgaattggaagctgcttgagtccacctgaacttgaattgattgcaaagccatctgctgggaacggttttgggttcctgagccatcagccagcctttctttcccctctgatgcacgttcctcccggcctagtccgtggaggcccatcacaccagcatccgtgacgccagcttcccactaggacatccaggcaggtcgggcggggacgccacacacctcagggccgtccgctgcattgccatagaggagccctccctccagtggtcacttcccaccattgcaggcagacttcccaccattgcaggcagctgggcccacttcatatcacacaaaatgaattttctataaagggaaaaaagtttgctcctccatagatttttgctgccttcgggtcaaatagtttccctggttgacactcttgggccactctgattggcagcctgctttgccaaagagaactgtgtgaggttttggtggttagtaagagaagggggagatggccagcctgaagtcacggtcctggcccagcacaggtgggcagcagcgagctggcaggtgaagtgtgagcagcacgcaaagtgtcacgtgggccttagccgtcacccaccagcttcctcaccaggcaaggaggccccggagccttagcagggacttgcccaacggcacagctgattggtgctcgactcccagcatgcatattttgttgtaaaaacccaggtttgtaattcacatccacaaccctaagccttttaaagcggaggcaaacgttaacaaaccccatcgtggtccatggagcctttcaaaatgggtgccctggaggggcctgacagtgggttccttccatggcggatactcccttgaaatttcacattccatcaaagtttaaagcatttacttcagaataagttatttatgtgtatatgttcaataaatatagtttttaatttatatctgtacatattagacacacgcgagccatcttgccagaattctgacagtgatgtcattttattcccctcccaaaacatgccccaggaacaagcaccccttgcctctgtggcagctgcgagtgtgtctgatttcataacgaagccaggctgagggcaagaggcccgacaggcaggccagggtccccggagaagccggatttcttcgcaatgtcactggtacttagcagatggtcgtgttcacaggggctagccacctgtactacggtgccgaccgcaatgcgaggaatgtggtggccacgcgatggagctggccggaggacaggtcaggtgagggggccgacccctgcggggctcagggctccttccattctaaccttgagccacagtgtcactcttcagggctctgctcctggctctattttgttaaggtgtcatcagccttcaacctccatttatatatttttataatgttaagccactgaccaactttttcatagaaacaactatcagattcgagggctccctttgtccccctgacctgggcacaggcatgggcgatggctccctcttcccagaatctgcggggaactggggcaaggcccatctgtctgcaaggctggtagctctctccctcggcttccagagtccacggcagttgcaaggtaaccagtgtggatctgctgagtcaccccaggcaccagacttaccccaggagcatgggccactgtccatggggccttccttgagaccttcccttggggctggcgggcggcggcttaccagctgggtcagtcccatctcgcccctctgtgcctatgccctggcgttgccaggcttaaccttcccctgtatcttactcatcccagaattattactggccatttctaaatagacaaaaactaccctaaaatgtggagatttactccttttgaaaagtctgtttcaaaaagtgtggcctcagctctggaggccacccccaggaaggagtttgaggttcattgtcattatggccacagtttggtgcttgtgcacgggactcaaagggcagcgtcgaagctggggttaggtgtagggttgtgagcaaagctcccctgtttgtggccacaccttccctttccaaaaaggctattaattctactcacccactatttggggggatgtaaattttgcccacagactttgccacccaggtgaggtgctgtgttcatgcacggaactgatgtcattagacaccatccaaggatgggcagcctgcagtgtggccggcgactgccatccagagaaaaggcaccttgtgccacagggcggggccgacaccctgagctcacaggtggcccctgcattcaggtggatgtccatccttgaaacagcctcttctgggaacacagcactggaggtctccaggcatcagggttggccggcagggtgccctgcagcttacataaaggtcgtggcaatgtttcaatgttaaactaaactattgccttcctcttacttttcctaaaatgattttctaatgggaacagtcacttcaagttcatgacatagtttgaaggaggataattcattttttcctggttgtcactgtcttcttatccccttggtgggctgggttcatactgtgaaataaactaaaatgaaaccaaaacgttcctgccgtaaatacgtggcacagcactgcagaaaaagcagtcacctctattcgtgagtccccaagccatagcagggcgtctgtaaaagaagggaaactgcacccaggaagtggtgggcgtcagacgcatcctttcgcccgtagttcatgaaatagttccggctttggtcttccagaaaatctcaacttcaccgtgcacaagtgttaccgggtctttttagtgtagccatggaagatactttcaaaaggacatcttcagatcataagtcttaggaccaaaggtgtttttaatgagataatctttttgattttctaacaagaaaggaaatattcactttacattttaacatcaacttttaagtgatattcagaattaattgaccatggtgatacgttgtaaaatgttttcatattaagaatgtaattatttccttattgtattttttaaaagctaaagtcatatttaaaattctctttgaaagaaacaggcaaagaaacagcaaagatttttttaaattaaatatgttagtagtgcccacttcaaatgactgtaaatatattttcactgtttctcaatgtatttaattcataaagtaaaaattttatgaaaagaaacttgcaaggaaaatcctagttttcagtccactcgccccactttgtagtagcttcactgaatttcctgctttcctggttgaattttctactgtttcacgtggtgtaaccctagactggcgcccttggcgtgcccctttgtgtatgaataaacttctctccccc

SEQ ID NO: 634 - DNA, 7479 bp, Homo sapiens
  source 1..7479: mol_type = unassigned DNA
ctcccagttgaattttgctgccttaaagcagaagcaaaggagtagtgcatttgttaagaagaagacgcctgaatcttttagtggacctgctttcagcaaacttgttttttaggtcagaatactatatccaatgatcaagctaaacatgaaatgcttcgagtaagactcagtattcatactttgacatttgcaaatcactgggtctaataatactcttcctcttttgttgtcagcaatggaagagttaatagttgaacttcgtctctttcttgaactcctggaccatgaatatctaacctcaactgtcagggagaaaaaggcagtgataaccaacattctgctaagaatacagtcatccaaaggttttgatgtgaaggaccatgctcagaagcaggagaccgctaacagcctgccagcccctcctcagatgcccctgccggagatccctcagccctggctgcctcctgacagtgggcctccaccattgccaacatcctccctcccagaaggttattatgaggaagctgtgccgctgagccccggaaaagctccggaatacatcacatcaaattatgattccgatgcgatgagcagctcttatgagtcgtatgatgaagaggaggaggatgggaaggggaagaaaacccggcaccagtggccctccgaggaggcctccatggacctggtcaaggacgccaaaatctgcgccttcctgctgcggaagaagcggttcggccagtggaccaagttgctctgcgtcatcaaagacaccaaactgctgtgctataaaagttccaaggaccagcagcctcagatggaactgccactccaaggctgtaacattacgtacatcccgaaagacagcaaaaagaagaagcacgagctgaagattactcagcagggcacggacccgcttgttctcgccgtccagagcaaggaacaggccgagcagtggctgaaggtgatcaaagaagcctacagtggttgtagtggccccgtggattcagagtgtcctcctccaccaagctccccggtgcacaaggcagaactggagaagaaactgtcttcagagagacccagctcagatggggagggtgttgtggaaaatggaattaccacatgtaatggaaaggagcaagtgaagaggaagaaaagttccaaatcagaggccaagggcactgtgtcgaaagtcactgggaaaaaaatcaccaagatcatcagtctgggaaagaaaaagccgtccacagacgagcagacctcctcagctgaggaagatgttcccacctgcggctatctgaacgtgctctccaacagccgctggcgagagcgctggtgccgagtgaaagataacaagctcattttccacaaggacaggaccgacctgaagacccatattgtgtctattccgctccgtggctgcgaggtgatcccgggtttggattctaaacatcctctgacgttccggctgctgcgcaacggccaggaggttgcagtattggaggcatcttcttctgaagacatgggcaggtggattgggattttactcgcagagacgggatcgtccacagacccggaggctctgcactatgactacattgatgtggagatgtctgcaagtgtcattcagacagccaaacagaccttctgtttcatgaacaggcgtgttatatctgctaacccatatctagggggcacctccaacggctatgcccaccccagcgggacggcacttcattatgacgatgtcccgtgcatcaacggctcgctcaagggtaaaaagccccccgtggcgtctaatggggtcacaggaaaagggaagactctgagcagtcagccaaagaaagcggatcccgcggctgttgtgaaaaggacgggttcgaatgctgcccagtacaagtatggcaagaaccgggtagaagcagatgccaagcggctacagaccaaagaggaggagctgctgaagaggaaagaggccctgcggaataggctggcccagctccgcaaggaaagaaaagaccttcgagcggctattgaagtgaacgccggcaggaagccgcaggcgatcctggaggagaagctgaagcagctggaggaggagtgccggcagaaggaggcggagcgtgtcagcctggagctggagctgacggaggtcaaggagagcctgaagaaagcgctggcgggcggagtcaccctggggctggccatcgagcccaagtcagggacatcgagtccacagtctccagtgttccggcaccggaccctggaaaactcgcccatctccagctgtgacaccagtgacaccgagggccccgtgccggtgaacagcgcggccgtcttgaagaagagccaggctgccccgggcagctccccctgccgagggcatgtgctgcggaaggccaaggaatgggaattgaagaacgggacctaggggacagcagcaccactccagcctcagagactgcacacccccttgcctgtatcctcatctgtgtgacggcaggaagctctgcccagagtggcctcagctgcacgactccagaggctccacgactgagctctgaggccagtgcctgtcccccaggcccacttgtattctttctactgtaaaatggcgcctttaaaaaagatgtaagactttggttcccaactttgttaaaaaacaaaaaaagtgatggaaaggtgtttgaaaggatgctatcaggcgaagtgacatctttctaaccagataggccattgctttcaccgattccaacccagccctggactgaggatggatggttccatgagcccccagatgaaaacctggattcgacagggaagagcttggatccccggctgccccgggcatgagtgtggctggccatgggcactgggctcgccttgcacgcccaccaggagggccaggggcatacgcagtcctgacgtggactttgtgtcttggcgtaccctctccacgtgcccgtccccctcgtcatcagaggtaaaggcatgagaaaatcgcgctgtgaaacgttttttaccttttattattattttttggacagatgcttttgtcaccaagacatgaaaagctgccattcttcttaacctgttttttaggaatgtctttttactgtgtgtcacacttagatcaaggagttttcagaggttccttattttattaattaattatttgtgctgcttttgacaggtagcagagggttttaatacttcactaacagtacaccctcctcccccttgggctagcatccccagcccttaatccacgtcggagccggcaggtgcttctcacaccaggagcctctgggggcaggggctggctcctcgccgctgtacaggacgtttactgctgcttggggccagggcagtcctttgaaagggaagcaagttccggaatttgttcgctcatggaactataacaccttagagcaagaggcaggaattccagggcctcctgcccctccccttcctccagcttgtcaagttaaaccactaatgtgttggtgggcctggccgtgctgcctctcctgagtagggtgggtgcaagtagggcctctttcccagctttcttgcttgccttctgtgcaatatttcttggagaatttggatgcctaaggcataaaggaaaaaaacagagttcatagtttgagctggtatttaccccctgggtttaaaaatcagattaacttcttggtctcccggaggctgctgtcaggaattctccagtacgggaagatgcagtcacttatgacgaaataagtcacccctgaacgcctccgcaggcagattcatggagaccagtcccagtagcaaccgccccttccccaagcatagaatacagaggtgccatacttggtgtaagccttccttctgtccactgtccagaatgtcctttttcacacagaggaagagatggcgggaaaacactgactgactccttgggtttcccccagacatactttcagagcgctagctgtgtggtgcacgggactttacagttaggattcatgtttaaggtggtggcgcttgaggcctgcaagggccacgttggattactgaagcggaaagcggtctcccatgtataagaaaaagttttacaacacgaattggaagctgcttgagtccacctgaacttgaattgattgcaaagccatctgctgggaacggttttgggttcctgagccatcagccagcctttctttcccctctgatgcacgttcctcccggcctagtccgtggaggcccatcacaccagcatccgtgacgccagcttcccactaggacatccaggcaggtcgggcggggacgccacacacctcagggccgtccgctgcattgccatagaggagccctccctccagtggtcacttcccaccattgcaggcagacttcccaccattgcaggcagctgggcccacttcatatcacacaaaatgaattttctataaagggaaaaaagtttgctcctccatagatttttgctgccttcgggtcaaatagtttccctggttgacactcttgggccactctgattggcagcctgctttgccaaagagaactgtgtgaggttttggtggttagtaagagaagggggagatggccagcctgaagtcacggtcctggcccagcacaggtgggcagcagcgagctggcaggtgaagtgtgagcagcacgcaaagtgtcacgtgggccttagccgtcacccaccagcttcctcaccaggcaaggaggccccggagccttagcagggacttgcccaacggcacagctgattggtgctcgactcccagcatgcatattttgttgtaaaaacccaggtttgtaattcacatccacaaccctaagccttttaaagcggaggcaaacgttaacaaaccccatcgtggtccatggagcctttcaaaatgggtgccctggaggggcctgacagtgggttccttccatggcggatactcccttgaaatttcacattccatcaaagtttaaagcatttacttcagaataagttatttatgtgtatatgttcaataaatatagtttttaatttatatctgtacatattagacacacgcgagccatcttgccagaattctgacagtgatgtcattttattcccctcccaaaacatgccccaggaacaagcaccccttgcctctgtggcagctgcgagtgtgtctgatttcataacgaagccaggctgagggcaagaggcccgacaggcaggccagggtccccggagaagccggatttcttcgcaatgtcactggtacttagcagatggtcgtgttcacaggggctagccacctgtactacggtgccgaccgcaatgcgaggaatgtggtggccacgcgatggagctggccggaggacaggtcaggtgagggggccgacccctgcggggctcagggctccttccattctaaccttgagccacagtgtcactcttcagggctctgctcctggctctattttgttaaggtgtcatcagccttcaacctccatttatatatttttataatgttaagccactgaccaactttttcatagaaacaactatcagattcgagggctccctttgtccccctgacctgggcacaggcatgggcgatggctccctcttcccagaatctgcggggaactggggcaaggcccatctgtctgcaaggctggtagctctctccctcggcttccagagtccacggcagttgcaaggtaaccagtgtggatctgctgagtcaccccaggcaccagacttaccccaggagcatgggccactgtccatggggccttccttgagaccttcccttggggctggcgggcggcggcttaccagctgggtcagtcccatctcgcccctctgtgcctatgccctggcgttgccaggcttaaccttcccctgtatcttactcatcccagaattattactggccatttctaaatagacaaaaactaccctaaaatgtggagatttactccttttgaaaagtctgtttcaaaaagtgtggcctcagctctggaggccacccccaggaaggagtttgaggttcattgtcattatggccacagtttggtgcttgtgcacgggactcaaagggcagcgtcgaagctggggttaggtgtagggttgtgagcaaagctcccctgtttgtggccacaccttccctttccaaaaaggctattaattctactcacccactatttggggggatgtaaattttgcccacagactttgccacccaggtgaggtgctgtgttcatgcacggaactgatgtcattagacaccatccaaggatgggcagcctgcagtgtggccggcgactgccatccagagaaaaggcaccttgtgccacagggcggggccgacaccctgagctcacaggtggcccctgcattcaggtggatgtccatccttgaaacagcctcttctgggaacacagcactggaggtctccaggcatcagggttggccggcagggtgccctgcagcttacataaaggtcgtggcaatgtttcaatgttaaactaaactattgccttcctcttacttttcctaaaatgattttctaatgggaacagtcacttcaagttcatgacatagtttgaaggaggataattcattttttcctggttgtcactgtcttcttatccccttggtgggctgggttcatactgtgaaataaactaaaatgaaaccaaaacgttcctgccgtaaatacgtggcacagcactgcagaaaaagcagtcacctctattcgtgagtccccaagccatagcagggcgtctgtaaaagaagggaaactgcacccaggaagtggtgggcgtcagacgcatcctttcgcccgtagttcatgaaatagttccggctttggtcttccagaaaatctcaacttcaccgtgcacaagtgttaccgggtctttttagtgtagccatggaagatactttcaaaaggacatcttcagatcataagtcttaggaccaaaggtgtttttaatgagataatctttttgattttctaacaagaaaggaaatattcactttacattttaacatcaacttttaagtgatattcagaattaattgaccatggtgatacgttgtaaaatgttttcatattaagaatgtaattatttccttattgtattttttaaaagctaaagtcatatttaaaattctctttgaaagaaacaggcaaagaaacagcaaagatttttttaaattaaatatgttagtagtgcccacttcaaatgactgtaaatatattttcactgtttctcaatgtatttaattcataaagtaaaaattttatgaaaagaaacttgcaaggaaaatcctagttttcagtccactcgccccactttgtagtagcttcactgaatttcctgctttcctggttgaattttctactgtttcacgtggtgtaaccctagactggcgcccttggcgtgcccctttgtgtatgaataaacttctctccccca

SEQ ID NO: 635 - DNA, 7768 bp, Homo sapiens
  source 1..7768: mol_type = unassigned DNA
gggcgcccggctccgctgggggcgggacggcgggcggcgggcggggccgtgtgcgcctgcgtggtgtctgtcccggccgcagccccacgccggctgcagctccgcgagccgagccggatctcgagcggggtacacgggctgaggcggcggcggcggccccgccccggggctccattgttaaggcggctgcggctctgtcggctgttcagctgcgctccagtcggcccaggcgccgcggcgaggagcgagcgctgcgaggtggcggcctgagcaatggaagagttaatagttgaacttcgtctctttcttgaactcctggaccatgaatatctaacctcaactgtcagggagaaaaaggcagtgataaccaacattctgctaagaatacagtcatccaaaggttttgatgtgaaggaccatgctcagaagcaggagaccgctaacagcctgccagcccctcctcagatgcccctgccggagatccctcagccctggctgcctcctgacagtgggcctccaccattgccaacatcctccctcccagaaggttattatgaggaagctgtgccgctgagccccggaaaagctccggaatacatcacatcaaattatgattccgatgcgatgagcagctcttatgagtcgtatgatgaagaggaggaggatgggaaggggaagaaaacccggcaccagtggccctccgaggaggcctccatggacctggtcaaggacgccaaaatctgcgccttcctgctgcggaagaagcggttcggccagtggaccaagttgctctgcgtcatcaaagacaccaaactgctgtgctataaaagttccaaggaccagcagcctcagatggaactgccactccaaggctgtaacattacgtacatcccgaaagacagcaaaaagaagaagcacgagctgaagattactcagcagggcacggacccgcttgttctcgccgtccagagcaaggaacaggccgagcagtggctgaaggtgatcaaagaagcctacagtggttgtagtggccccgtggattcagagtgtcctcctccaccaagctccccggtgcacaaggcagaactggagaagaaactgtcttcagagagacccagctcagatggggagggtgttgtggaaaatggaattaccacatgtaatggaaaggagcaagtgaagaggaagaaaagttccaaatcagaggccaagggcactgtgtcgaaagtcactgggaaaaaaatcaccaagatcatcagtctgggaaagaaaaagccgtccacagacgagcagacctcctcagctgaggaagatgttcccacctgcggctatctgaacgtgctctccaacagccgctggcgagagcgctggtgccgagtgaaagataacaagctcattttccacaaggacaggaccgacctgaagacccatattgtgtctattccgctccgtggctgcgaggtgatcccgggtttggattctaaacatcctctgacgttccggctgctgcgcaacggccaggaggttgcagtattggaggcatcttcttctgaagacatgggcaggtggattgggattttactcgcagagacgggatcgtccacagacccggaggctctgcactatgactacattgatgtggagatgtctgcaagtgtcattcagacagccaaacagaccttctgtttcatgaacaggcgtgttatatctgctaacccatatctagggggcacctccaacggctatgcccaccccagcgggacggcacttcattatgacgatgtcccgtgcatcaacggctcgtgggaaccggaagacggctttcctgcttcctgcagcagaggcttgggagaagaggtgctttatgataacgcaggcctgtacgataacttgccgcctccgcacatctttgcccgctactctcctgctgacagaaaggcctctaggctgtctgctgacaagctgtcctctaaccattacaaataccctgcctccgctcagtctgtcactaatacctcttctgtggggagggcgtctctcgggctcaactcgcagctcaagggtaaaaagccccccgtggcgtctaatggggtcacaggaaaagggaagactctgagcagtcagccaaagaaagcggatcccgcggctgttgtgaaaaggacgggttcgaatgctgcccagtacaagtatggcaagaaccgggtagaagcagatgccaagcggctacagaccaaagaggaggagctgctgaagaggaaagaggccctgcggaataggctggcccagctccgcaaggaaagaaaagaccttcgagcggctattgaagtgaacgccggcaggaagccgcaggcgatcctggaggagaagctgaagcagctggaggaggagtgccggcagaaggaggcggagcgtgtcagcctggagctggagctgacggaggtcaaggagagcctgaagaaagcgctggcgggcggagtcaccctggggctggccatcgagcccaagtcagggacatcgagtccacagtctccagtgttccggcaccggaccctggaaaactcgcccatctccagctgtgacaccagtgacaccgagggccccgtgccggtgaacagcgcggccgtcttgaagaagagccaggctgccccgggcagctccccctgccgagggcatgtgctgcggaaggccaaggaatgggaattgaagaacgggacctaggggacagcagcaccactccagcctcagagactgcacacccccttgcctgtatcctcatctgtgtgacggcaggaagctctgcccagagtggcctcagctgcacgactccagaggctccacgactgagctctgaggccagtgcctgtcccccaggcccacttgtattctttctactgtaaaatggcgcctttaaaaaagatgtaagactttggttcccaactttgttaaaaaacaaaaaaagtgatggaaaggtgtttgaaaggatgctatcaggcgaagtgacatctttctaaccagataggccattgctttcaccgattccaacccagccctggactgaggatggatggttccatgagcccccagatgaaaacctggattcgacagggaagagcttggatccccggctgccccgggcatgagtgtggctggccatgggcactgggctcgccttgcacgcccaccaggagggccaggggcatacgcagtcctgacgtggactttgtgtcttggcgtaccctctccacgtgcccgtccccctcgtcatcagaggtaaaggcatgagaaaatcgcgctgtgaaacgttttttaccttttattattattttttggacagatgcttttgtcaccaagacatgaaaagctgccattcttcttaacctgttttttaggaatgtctttttactgtgtgtcacacttagatcaaggagttttcagaggttccttattttattaattaattatttgtgctgcttttgacaggtagcagagggttttaatacttcactaacagtacaccctcctcccccttgggctagcatccccagcccttaatccacgtcggagccggcaggtgcttctcacaccaggagcctctgggggcaggggctggctcctcgccgctgtacaggacgtttactgctgcttggggccagggcagtcctttgaaagggaagcaagttccggaatttgttcgctcatggaactataacaccttagagcaagaggcaggaattccagggcctcctgcccctccccttcctccagcttgtcaagttaaaccactaatgtgttggtgggcctggccgtgctgcctctcctgagtagggtgggtgcaagtagggcctctttcccagctttcttgcttgccttctgtgcaatatttcttggagaatttggatgcctaaggcataaaggaaaaaaacagagttcatagtttgagctggtatttaccccctgggtttaaaaatcagattaacttcttggtctcccggaggctgctgtcaggaattctccagtacgggaagatgcagtcacttatgacgaaataagtcacccctgaacgcctccgcaggcagattcatggagaccagtcccagtagcaaccgccccttccccaagcatagaatacagaggtgccatacttggtgtaagccttccttctgtccactgtccagaatgtcctttttcacacagaggaagagatggcgggaaaacactgactgactccttgggtttcccccagacatactttcagagcgctagctgtgtggtgcacgggactttacagttaggattcatgtttaaggtggtggcgcttgaggcctgcaagggccacgttggattactgaagcggaaagcggtctcccatgtataagaaaaagttttacaacacgaattggaagctgcttgagtccacctgaacttgaattgattgcaaagccatctgctgggaacggttttgggttcctgagccatcagccagcctttctttcccctctgatgcacgttcctcccggcctagtccgtggaggcccatcacaccagcatccgtgacgccagcttcccactaggacatccaggcaggtcgggcggggacgccacacacctcagggccgtccgctgcattgccatagaggagccctccctccagtggtcacttcccaccattgcaggcagacttcccaccattgcaggcagctgggcccacttcatatcacacaaaatgaattttctataaagggaaaaaagtttgctcctccatagatttttgctgccttcgggtcaaatagtttccctggttgacactcttgggccactctgattggcagcctgctttgccaaagagaactgtgtgaggttttggtggttagtaagagaagggggagatggccagcctgaagtcacggtcctggcccagcacaggtgggcagcagcgagctggcaggtgaagtgtgagcagcacgcaaagtgtcacgtgggccttagccgtcacccaccagcttcctcaccaggcaaggaggccccggagccttagcagggacttgcccaacggcacagctgattggtgctcgactcccagcatgcatattttgttgtaaaaacccaggtttgtaattcacatccacaaccctaagccttttaaagcggaggcaaacgttaacaaaccccatcgtggtccatggagcctttcaaaatgggtgccctggaggggcctgacagtgggttccttccatggcggatactcccttgaaatttcacattccatcaaagtttaaagcatttacttcagaataagttatttatgtgtatatgttcaataaatatagtttttaatttatatctgtacatattagacacacgcgagccatcttgccagaattctgacagtgatgtcattttattcccctcccaaaacatgccccaggaacaagcaccccttgcctctgtggcagctgcgagtgtgtctgatttcataacgaagccaggctgagggcaagaggcccgacaggcaggccagggtccccggagaagccggatttcttcgcaatgtcactggtacttagcagatggtcgtgttcacaggggctagccacctgtactacggtgccgaccgcaatgcgaggaatgtggtggccacgcgatggagctggccggaggacaggtcaggtgagggggccgacccctgcggggctcagggctccttccattctaaccttgagccacagtgtcactcttcagggctctgctcctggctctattttgttaaggtgtcatcagccttcaacctccatttatatatttttataatgttaagccactgaccaactttttcatagaaacaactatcagattcgagggctccctttgtccccctgacctgggcacaggcatgggcgatggctccctcttcccagaatctgcggggaactggggcaaggcccatctgtctgcaaggctggtagctctctccctcggcttccagagtccacggcagttgcaaggtaaccagtgtggatctgctgagtcaccccaggcaccagacttaccccaggagcatgggccactgtccatggggccttccttgagaccttcccttggggctggcgggcggcggcttaccagctgggtcagtcccatctcgcccctctgtgcctatgccctggcgttgccaggcttaaccttcccctgtatcttactcatcccagaattattactggccatttctaaatagacaaaaactaccctaaaatgtggagatttactccttttgaaaagtctgtttcaaaaagtgtggcctcagctctggaggccacccccaggaaggagtttgaggttcattgtcattatggccacagtttggtgcttgtgcacgggactcaaagggcagcgtcgaagctggggttaggtgtagggttgtgagcaaagctcccctgtttgtggccacaccttccctttccaaaaaggctattaattctactcacccactatttggggggatgtaaattttgcccacagactttgccacccaggtgaggtgctgtgttcatgcacggaactgatgtcattagacaccatccaaggatgggcagcctgcagtgtggccggcgactgccatccagagaaaaggcaccttgtgccacagggcggggccgacaccctgagctcacaggtggcccctgcattcaggtggatgtccatccttgaaacagcctcttctgggaacacagcactggaggtctccaggcatcagggttggccggcagggtgccctgcagcttacataaaggtcgtggcaatgtttcaatgttaaactaaactattgccttcctcttacttttcctaaaatgattttctaatgggaacagtcacttcaagttcatgacatagtttgaaggaggataattcattttttcctggttgtcactgtcttcttatccccttggtgggctgggttcatactgtgaaataaactaaaatgaaaccaaaacgttcctgccgtaaatacgtggcacagcactgcagaaaaagcagtcacctctattcgtgagtccccaagccatagcagggcgtctgtaaaagaagggaaactgcacccaggaagtggtgggcgtcagacgcatcctttcgcccgtagttcatgaaatagttccggctttggtcttccagaaaatctcaacttcaccgtgcacaagtgttaccgggtctttttagtgtagccatggaagatactttcaaaaggacatcttcagatcataagtcttaggaccaaaggtgtttttaatgagataatctttttgattttctaacaagaaaggaaatattcactttacattttaacatcaacttttaagtgatattcagaattaattgaccatggtgatacgttgtaaaatgttttcatattaagaatgtaattatttccttattgtattttttaaaagctaaagtcatatttaaaattctctttgaaagaaacaggcaaagaaacagcaaagatttttttaaattaaatatgttagtagtgcccacttcaaatgactgtaaatatattttcactgtttctcaatgtatttaattcataaagtaaaaattttatgaaaagaaacttgcaaggaaaatcctagttttcagtccactcgccccactttgtagtagcttcactgaatttcctgctttcctggttgaattttctactgtttcacgtggtgtaaccctagactggcgcccttggcgtgcccctttgtgtatgaataaacttctctccccc

SEQ ID NO: 636 - DNA, 4177 bp, Homo sapiens
  source 1..4177: mol_type = unassigned DNA
ccgctgggctggcctgagagcgcagcgcgccggccgctaccagccgcgccggagcccctgcgccctgcggcccgctccccggggaccgggccggcgccatggaccgaggccaggtgctggagcagctgctcccagagctcaccgggctgctcagcctcctggaccacgagtacctcagcgataccaccctggaaaagaagatggccgtggcctccatcctgcagagcctgcagccccttccagcaaaggaggtctcctacctgtatgtgaacacagcagacctccactcggggcccagcttcgtggaatccctctttgaagaatttgactgtgacctgagtgaccttcgggacatgccagaggatgatggggagcccagcaaaggagccagccctgagctagccaagagcccacgcctgagaaacgcggccgacctgcctccaccgctccccaacaagcctccccctgaggactactatgaagaggcccttcctctgggacccggcaagtcgcctgagtacatcagctcccacaatggctgcagcccctcacactcgattgtggatggctactatgaggacgcagacagcagctaccctgcaaccagggtgaacggcgagcttaagagctcctataatgactctgacgcaatgagcagctcctatgagtcctacgatgaagaggaggaggaagggaagagcccgcagccccgacaccagtggccctcagaggaggcctccatgcacctggtgagggaatgcaggatatgtgccttcctgctgcggaaaaagcgtttcgggcagtgggccaagcagctgacggtcatcagggaggaccagctcctgtgttacaaaagctccaaggatcggcagccacatctgaggttggcactggatacctgcagcatcatctacgtgcccaaggacagccggcacaagaggcacgagctgcgtttcacccagggggctaccgaggtcttggtgctggcactgcagagccgagagcaggccgaggagtggctgaaggtcatccgagaagtgagcaagccagttgggggagctgagggagtggaggtccccagatccccagtcctcctgtgcaagttggacctggacaagaggctgtcccaagagaagcagacctcagattctgacagcgtgggtgtgggtgacaactgttctacccttggccgccgggagacctgtgatcacggcaaagggaagaagagcagcctggcagaactgaagggctcaatgagcagggctgcgggccgcaagatcacccgtatcattggcttctccaagaagaagacactggccgatgacctgcagacgtcctccaccgaggaggaggttccctgctgtggctacctgaacgtgctggtgaaccagggctggaaggaacgctggtgccgcctgaagtgcaacactctgtatttccacaaggatcacatggacctgcgaacccatgtgaacgccatcgccctgcaaggctgtgaggtggccccgggctttgggccccgacacccatttgccttcaggatcctgcgcaaccggcaggaggtggccatcttggaggcaagctgttcagaggacatgggtcgctggctcgggctgctgctggtggagatgggctccagagtcactccggaggcgctgcactatgactacgtggatgtggagaccttaaccagcatcgtcagtgctgggcgcaactccttcctatatgcaagatcctgccagaatcagtggcctgagccccgagtctatgatgatgttccttatgaaaagatgcaggacgaggagcccgagcgccccacaggggcccaggtgaagcgtcacgcctcctcctgcagtgagaagtcccatcgtgtggacccgcaggtcaaagtcaaacgccacgcctccagtgccaatcaatacaagtatggcaagaaccgagccgaggaggatgcccggaggtacttggtagaaaaagagaagctggagaaagagaaagagacgattcggacagagctgatagcactgagacaggagaagagggaactgaaggaagccattcggagcagcccaggagcaaaattaaaggctctggaagaagccgtggccaccctggaagctcagtgtcgggcaaaggaggagcgccggattgacctggagctgaagctggtggctgtgaaggagcgcttgcagcagtccctggcaggagggccagccctggggctctccgtgagcagcaagcccaagagtggggaaactgcaaataaaccccagaacagcgttccagagcaacctctccctgtcaactgtgtttctgagctgaggaagaggagcccatccatcgtagcctccaaccaaggaagggtgctacagaaagccaaggaatgggaaatgaagaagacctaggaagaggatgaggatttcattccaaaggaaataccagcttgtccacctgaggaagaaatgcttttttcacaaggagacaccaagagaagactaggaagtagccctcgttctccagggcacccaaaataccagcctttattgtctgcatgattttaggggatatggggagggaacaagtagaagggaagagggaaatggagagcatccttatgactttacaaagggtggaaatgaggatggagggatacagaagtctgcacagctgtaaaggttttatagatgtctttgccttcccttctgaggaagggaagaagtaatgaaagcacatgtgaataaccccttccatcccattcacagcatcgcactcccagtccttaaggcaaagggaggcagtgctgaagcattggtggtgcagtgtaaagagacaagacctgatcatctgatcacacttgtgccaacttgattcatattgggcattactaacaacccctggtcaaggtaaataggttgaacaatcaataacattatccctgcctgcatacatgtgaacaaaagctatagaggacatgcaaattctacagtcattcctcatatgctttagacagagtgcagctactggaatcttccagatttcagtgttttaaaatcagagctctgaatacacaaaaggaaagagaaatggagcagctgacatattttaagctcacagtgatactcagtgacaggagcacagagctctaatgtccacaggatgttgtagggtagggtctctcagtaaatcaagtcccttacctatgttctgacactgaggctcttggagctatgggttagaaatccaggaggcaatatgtctttattctaatgaagtcctcatcttgcactcagaggcccactagtttgcccttctatatattaagtaaaaccaagagaaattaagaggatgatggcttctttctgtcacatgggtgctaaaccttttacaaacacttgatacttctatagagggaccaaggacctcaagtcctgggcagtctccttactgtgctactcactactgtctcaacactgtagtgagtctgtctttaacacatttccttccaataaagataaaaccacttaactcttaagtgccagtgcttagctcaagaggaaagaaggaaaatcccagaataaccgtggccactttgctataggggttacatattttaacccacctaaggttttacagactttagcctcactcaaactttatcaccctctgaggtagctggagaccacagcaggaaaaataacctgaccagtaatcacccactgattagtggcagagcgtaggacttaggggttataagcccagatccagatagggctaggtttgagccatgcctctaatgaccagctgggtgaccttgggaaagtcacttgattgctctgattcttgttttccttatctgtgaaatgggactaacaattgttacttttctcccaagattgttgggaagatttaataagataatatatagtaggcatcttgcatagtgtctgagaaataagaaatgctcagtcaatagtggctctcattagccaggcatggtggtactcgcctgtagtcccagctactcaggaggctgaggcaggaggaccgcttgagcccaggagtttgagactgtagtgcactatgatcacgcctgtgaattgccactgcactccagcctaagcaaatagcaagaccccatctattaaaaaaaaaaagtggctattattagctatatcag

SEQ ID NO: 637 - DNA, 2319 bp, Homo sapiens
  source 1..2319: mol_type = unassigned DNA
ccggagcccctgcgccctgcggcccgctccccggggaccgggccggcgccatggaccgaggccaggtgctggagcagctgctcccagagctcaccgggctgctcagcctcctggaccacgagtacctcagcgataccaccctggaaaagaagatggccgtggcctccatcctgcagagcctgcagccccttccagcaaaggaggtctcctacctgtatgtgaacacagcagacctccactcggggcccagcttcgtggaatccctctttgaagaatttgactgtgacctgagtgaccttcgggacatgccagaggatgatggggagcccagcaaaggagccagccctgagctagccaagagcccacgcctgagaaacgcggccgacctgcctccaccgctccccaacaagcctccccctgaggactactatgaagaggcccttcctctgggacccggcaagtcgcctgagtacatcagctcccacaatggctgcagcccctcacactcgattgtggatggctactatgaggacgcagacagcagctaccctgcaaccagggtgaacggcgagcttaagagctcctataatgactctgacgcaatgagcagctcctatgagtcctacgatgaagaggaggaggaagggaagagcccgcagccccgacaccagtggccctcagaggaggcctccatgcacctggtgagggaatgcaggatatgtgccttcctgctgcggaaaaagcgtttcgggcagtgggccaagcagctgacggtcatcagggaggaccagctcctgtgttacaaaagctccaaggatcggcagccacatctgaggttggcactggatacctgcagcatcatctacgtgcccaaggacagccggcacaagaggcacgagctgcgtttcacccagggggctaccgaggtcttggtgctggcactgcagagccgagagcaggccgaggagtggctgaaggtcatccgagaagtgagcaagccagttgggggagctgagggagtggaggtccccagatccccagtcctcctgtgcaagttggacctggacaagaggctgtcccaagagaagcagacctcagattctgacagcgtgggtgtgggtgacaactgttctacccttggccgccgggagacctgtgatcacggcaaagggaagaagagcagcctggcagaactgaagggctcaatgagcagggctgcgggccgcaagatcacccgtatcattggcttctccaagaagaagacactggccgatgacctgcagacgtcctccaccgaggaggaggttccctgctgtggctacctgaacgtgctggtgaaccagggctggaaggaacgctggtgccgcctgaagtgcaacactctgtatttccacaaggatcacatggacctgcgaacccatgtgaacgccatcgccctgcaaggctgtgaggtggccccgggctttgggccccgacacccatttgccttcaggatcctgcgcaaccggcaggaggtggccatcttggaggcaagctgttcagaggacatgggtcgctggctcgggctgctgctggtggagatgggctccagagtcactccggaggcgctgcactatgactacgtggatgtggagaccttaaccagcatcgtcagtgctgggcgcaactccttcctatatgcaagatcctgccagaatcagtggcctgagccccgagtctatgatgatgttccttatgaaaagatgcaggacgaggagcccgagcgccccacaggggcccaggtgaagcgtcacgcctcctcctgcagtgagaagtcccatcgtgtggacccgcaggtcaaagtcaaacgccacgcctccagtgccaatcaatacaagtatggcaagaaccgagccgaggaggatgcccggaggtacttggtagaaaaagagaagctggagaaagagaaagagacgattcggacagagctgatagcactgagacaggagaagagggaactgaaggaagccattcggagcagcccaggagcaaaattaaaggctctggaagaagccgtggccaccctggaagctcagtgtcgggcaaaggaggagcgccggattgacctggagctgaagctggtggctgtgaaggagcgcttgcagcagtccctggcaggagggccagccctggggctctccgtgagcagcaagcccaagagtggggaatgggaaatgaagaagacctaggaagaggatgaggatttcattccaaaggaaataccagcttgtccacctgaggaagaaatgcttttttcacaaggagacaccaagagaagac

SEQ ID NO: 638 - DNA, 3705 bp, Homo sapiens
  source 1..3705: mol_type = unassigned DNA
gagccgcgaggagcgcactccgtggccccgatggagcggtacaaagccctggaacagctgctgacagagttggatgacttcctcaagattcttgaccaggagaacctgagcagcacagcactggtgaagaagagctgcctggcggagctcctccggctttacaccaaaagcagcagctctgatgaggagtacatttatatgaacaaagtgaccatcaacaagcaacagaatgcagagtctcaaggcaaagcgcctgaggagcagggcctgctacccaatggggagcccagccagcactcctcggcccctcagaagagccttccagacctcccgccacccaagatgattccagaacggaaacagcttgccatcccaaagacggagtctccagagggctactatgaagaggctgagccatatgacacatccctcaatgaggacggagaggctgtgagcagctcctacgagtcctacgatgaagaggacggcagcaagggcaagtcggccccttaccagtggccctcgccggaggccggcatcgagctgatgcgtgacgcccgcatctgcgccttcctgtggcgcaagaagtggctgggacagtgggccaagcagctctgtgtcatcaaggacaacaggcttctgtgctacaaatcctccaaggaccacagccctcagctggacgtgaacctactgggcagcagcgtcattcacaaggagaagcaagtgcggaagaaggagcacaagctgaagatcacgccgatgaatgccgatgtgattgtgctgggcctgcagagcaaggaccaggctgagcagtggctcagggtcatccaggaagtgagcggcctgccttccgaaggagcatctgaaggaaaccagtacaccccggatgcccagcgctttaactgccagaaaccagatatagctgagaagtacctgtcggcttcagagtatgggagctccgtggatggccaccctgaggtcccagaaaccaaagacgtcaagaagaaatgttctgctggcctcaaactgagcaacctaatgaatctgggcaggaagaaatccacctcactggagcctgtggagaggtccctcgagacatccagttacctgaacgtgctggtgaacagccagtggaagtctcgctggtgctctgtcagggacaatcacctgcacttctaccaggaccggaaccggagcaaggtggcccagcaacccctcagcctggtgggctgcgaggtggtcccagaccccagccccgaccacctctactccttccgcatcctccacaagggcgaggagctggccaagcttgaggccaagtcttccgaggaaatgggccactggctgggtctcctgctctctgagtcaggctccaagacagacccagaagagttcacctacgactatgtggatgccgatagggtctcctgtattgtgagtgcggccaaaaactctctcttactgatgcagagaaagttctcagagcccaacacttacatcgatggcctgcctagccaggaccgccaggaggagctgtatgacgacgtggacctgtcagagctcacagctgcggtggagcctaccgaggaagccacccctgttgcagatgacccaaatgagagagaatctgaccgagtgtacctggacctcacacctgtcaagtcctttctgcatggccccagcagtgcacaggcccaggcctcctccccgacgttgtcctgcctggacaatgcaactgaggccctcccggcagactcaggcccaggtcccaccccagatgagccctgcataaagtgtccagagaacctgggagaacagcagctggagagtttggagccagaggatccttccctgagaatcaccaccgtcaaaatccagacggaacagcagagaatctccttcccaccgagctgcccggatgccgtggtggccaccccacctggtgccagcccacctgtgaaggacaggttgcgcgtgaccagtgcagagatcaagcttggcaagaatcggacagaagctgaggtgaagcggtacacagaggagaaggagaggcttgaaaagaagaaggaagaaatccgggggcacctggctcagctccggaaagagaaacgggagctaaaggaaaccctactgaaatgcacagacaaggaagtcctggcgagcctggagcagaagctgaaggaaattgacgaggagtgccggggcgaggagagcaggcgcgtggacctggagctcagcatcatggaggtgaaggacaacctgaagaaggctgaggcagggcctgtgacgttaggcaccaccgtggacaccacccacctggagaatgtgagcccccgccccaaagctgtcacacctgcctctgccccagactgtaccccagtcaactctgcaaccacactcaagaacaggcctctctcggtcgtggtcacaggcaaaggcactgtactccagaaagccaaggaatgggagaagaaaggagcaagttagaaaacaagcttcatctaaagactctcatgtcaatgtggaccttggtgacaatcctgctttgttaaagcaaaaactatgcgaaagggtgagtctgtttagaagaaaaagcaaagactgaggtactgtgaatggagagcttcagctaagaggaggctctgtcccttttcagagccaaaggaaataatacaacaaaaaggaggcttctttggagacctaagtctattggatgtaaacaagacgttgtatttagggatgttctgtgtttctttcttttttgaagttgtcatcaattgctttactaagatttttaaatagtgaaaacctcctgtttagactttggtggaagatgaatcaaggaagcagggccctgtcttatgggtcacgtgtctttggtgagtgagaagacctaaactcctggccatcatctcttatccaatacttagcagttggggattaaaccatccttgccttcagttctctccaatattaccaggcccaactcagtcttcagtgattttaaacagcattgacatcatctgtaaaaccatcatctgtaaaaccatctatgacatgagttttgagaaacaataatggggaaaatatttgggaccaagctgaagcactaatcccactaagttaaagacttctttccagtccaaggcaggcctgaatcaactgtctttaaataaaattttaagtgatgctgtattatatataggaaaaaatgcttaaaatcctgtcatttagaacagtgaaaagtatcttttgagattaaagtgactctttactgtaggaaaaatattactctgtgtttacagattcattgctgtggtcaggccatttttaagggaagagttatttaatataaatagtctctgattttaagttctgtttaatgttcattctccttccaagaacaaagtggtgatttttggttagggtgatcgccctcttaaaattggcagtgctgttccttgtgctgcccctgtcttttcctctgatggcatttttttttttttttttttaacacaggttgaaacatttcatctattatctctgcctcatttctggagggttgtgtatcagttctctaacacttgttcctgagaactaaatgtcttttttattcttatttcctctctcataaacatttggtgaccttttaccaagtggtgagttagttaggttttttaaaataaaatgttcattgtatttgaa

SEQ ID NO: 639 - DNA, 3964 bp, Homo sapiens
  source 1..3964: mol_type = unassigned DNA
gtgccaaggcggccgggggcggcgagcggggccgcgggcgcgcaccgactcaagagccgactgtcagcctcggcgggccggagttctccggcgctgggacaggggcgctgggacaggggcgctgggggcgagccctggcgggggccaggtccgaggaccctgggcgcggcggccccgccaggaggtccggccgcgagcgtgacctcacggggaggggccagcgcggcggcctgggcgctgagccgagcgccgggagagcagcgcagaagccgagccgcgaggagcgcactccgtggccccgatggagcggtacaaagccctggaacagctgctgacagagttggatgacttcctcaagattcttgaccaggagaacctgagcagcacagcactggtgaagaagagctgcctggcggagctcctccggctttacaccaaaagcagcagctctgatgaggagtacatttatatgaacaaagtgaccatcaacaagcaacagaatgcagagtctcaaggcaaagcgcctgaggagcagggcctgctacccaatggggagcccagccagcactcctcggcccctcagaagagccttccagacctcccgccacccaagatgattccagaacggaaacagcttgccatcccaaagacggagtctccagagggctactatgaagaggctgagccatatgacacatccctcaatgaggacggagaggctgtgagcagctcctacgagtcctacgatgaagaggacggcagcaagggcaagtcggccccttaccagtggccctcgccggaggccggcatcgagctgatgcgtgacgcccgcatctgcgccttcctgtggcgcaagaagtggctgggacagtgggccaagcagctctgtgtcatcaaggacaacaggcttctgtgctacaaatcctccaaggaccacagccctcagctggacgtgaacctactgggcagcagcgtcattcacaaggagaagcaagtgcggaagaaggagcacaagctgaagatcacgccgatgaatgccgatgtgattgtgctgggcctgcagagcaaggaccaggctgagcagtggctcagggtcatccaggaagtgagcggcctgccttccgaaggagcatctgaaggaaaccagtacaccccggatgcccagcgctttaactgccagaaaccagatatagctgagaagtacctgtcggcttcagagtatgggagctccgtggatggccaccctgaggtcccagaaaccaaagacgtcaagaagaaatgttctgctggcctcaaactgagcaacctaatgaatctgggcaggaagaaatccacctcactggagcctgtggagaggtccctcgagacatccagttacctgaacgtgctggtgaacagccagtggaagtctcgctggtgctctgtcagggacaatcacctgcacttctaccaggaccggaaccggagcaaggtggcccagcaacccctcagcctggtgggctgcgaggtggtcccagaccccagccccgaccacctctactccttccgcatcctccacaagggcgaggagctggccaagcttgaggccaagtcttccgaggaaatgggccactggctgggtctcctgctctctgagtcaggctccaagacagacccagaagagttcacctacgactatgtggatgccgatagggtctcctgtattgtgagtgcggccaaaaactctctcttactgatgcagagaaagttctcagagcccaacacttacatcgatggcctgcctagccaggaccgccaggaggagctgtatgacgacgtggacctgtcagagctcacagctgcggtggagcctaccgaggaagccacccctgttgcagatgacccaaatgagagagaatctgaccgagtgtacctggacctcacacctgtcaagtcctttctgcatggccccagcagtgcacaggcccaggcctcctccccgacgttgtcctgcctggacaatgcaactgaggccctcccggcagactcaggcccaggtcccaccccagatgagccctgcataaagtgtccagagaacctgggagaacagcagctggagagtttggagccagaggatccttccctgagaatcaccaccgtcaaaatccagacggaacagcagagaatctccttcccaccgagctgcccggatgccgtggtggccaccccacctggtgccagcccacctgtgaaggacaggttgcgcgtgaccagtgcagagatcaagcttggcaagaatcggacagaagctgaggtgaagcggtacacagaggagaaggagaggcttgaaaagaagaaggaagaaatccgggggcacctggctcagctccggaaagagaaacgggagctaaaggaaaccctactgaaatgcacagacaaggaagtcctggcgagcctggagcagaagctgaaggaaattgacgaggagtgccggggcgaggagagcaggcgcgtggacctggagctcagcatcatggaggtgaaggacaacctgaagaaggctgaggcagggcctgtgacgttaggcaccaccgtggacaccacccacctggagaatcccaaagctgtcacacctgcctctgccccagactgtaccccagtcaactctgcaaccacactcaagaacaggcctctctcggtcgtggtcacaggcaaaggcactgtactccagaaagccaaggaatgggagaagaaaggagcaagttagaaaacaagcttcatctaaagactctcatgtcaatgtggaccttggtgacaatcctgctttgttaaagcaaaaactatgcgaaagggtgagtctgtttagaagaaaaagcaaagactgaggtactgtgaatggagagcttcagctaagaggaggctctgtcccttttcagagccaaaggaaataatacaacaaaaaggaggcttctttggagacctaagtctattggatgtaaacaagacgttgtatttagggatgttctgtgtttctttcttttttgaagttgtcatcaattgctttactaagatttttaaatagtgaaaacctcctgtttagactttggtggaagatgaatcaaggaagcagggccctgtcttatgggtcacgtgtctttggtgagtgagaagacctaaactcctggccatcatctcttatccaatacttagcagttggggattaaaccatccttgccttcagttctctccaatattaccaggcccaactcagtcttcagtgattttaaacagcattgacatcatctgtaaaaccatcatctgtaaaaccatctatgacatgagttttgagaaacaataatggggaaaatatttgggaccaagctgaagcactaatcccactaagttaaagacttctttccagtccaaggcaggcctgaatcaactgtctttaaataaaattttaagtgatgctgtattatatataggaaaaaatgcttaaaatcctgtcatttagaacagtgaaaagtatcttttgagattaaagtgactctttactgtaggaaaaatattactctgtgtttacagattcattgctgtggtcaggccatttttaagggaagagttatttaatataaatagtctctgattttaagttctgtttaatgttcattctccttccaagaacaaagtggtgatttttggttagggtgatcgccctcttaaaattggcagtgctgttccttgtgctgcccctgtcttttcctctgatggcatttttttttttttttttttaacacaggttgaaacatttcatctattatctctgcctcatttctggagggttgtgtatcagttctctaacacttgttcctgagaactaaatgtcttttttattcttatttcctctctcataaacatttggtgaccttttaccaagtggtgagttagttaggttttttaaaataaaatgttcattgtatttgaa

SEQ ID NO: 640 - DNA, 3742 bp, Homo sapiens
  source 1..3742: mol_type = unassigned DNA
cagagggttcgagccctggaacagctgctgacagagttggatgacttcctcaagattcttgaccaggagaacctgagcagcacagcactggtgaagaagagctgcctggcggagctcctccggctttacaccaaaagcagcagctctgatgaggagtacatttatatgaacaaagtgaccatcaacaagcaacagaatgcagagtctcaaggcaaagcgcctgaggagcagggcctgctacccaatggggagcccagccagcactcctcggcccctcagaagagccttccagacctcccgccacccaagatgattccagaacggaaacagcttgccatcccaaagacggagtctccagagggctactatgaagaggctgagccatatgacacatccctcaatggtcactctggcggatttctccccactggagtccccagatgggtgcaggtgcccgaaggagtcatttatgccacgatcaccttggaggacggagaggctgtgagcagctcctacgagtcctacgatgaagaggacggcagcaagggcaagtcggccccttaccagtggccctcgccggaggccggcatcgagctgatgcgtgacgcccgcatctgcgccttcctgtggcgcaagaagtggctgggacagtgggccaagcagctctgtgtcatcaaggacaacaggcttctgtgctacaaatcctccaaggaccacagccctcagctggacgtgaacctactgggcagcagcgtcattcacaaggagaagcaagtgcggaagaaggagcacaagctgaagatcacgccgatgaatgccgatgtgattgtgctgggcctgcagagcaaggaccaggctgagcagtggctcagggtcatccaggaagtgagcggcctgccttccgaaggagcatctgaaggaaaccagtacaccccggatgcccagcgctttaactgccagaaaccagatatagctgagaagtacctgtcggcttcagagtatgggagctccgtggatggccaccctgaggtcccagaaaccaaagacgtcaagaagaaatgttctgctggcctcaaactgagcaacctaatgaatctgggcaggaagaaatccacctcactggagcctgtggagaggtccctcgagacatccagttacctgaacgtgctggtgaacagccagtggaagtctcgctggtgctctgtcagggacaatcacctgcacttctaccaggaccggaaccggagcaaggtggcccagcaacccctcagcctggtgggctgcgaggtggtcccagaccccagccccgaccacctctactccttccgcatcctccacaagggcgaggagctggccaagcttgaggccaagtcttccgaggaaatgggccactggctgggtctcctgctctctgagtcaggctccaagacagacccagaagagttcacctacgactatgtggatgccgatagggtctcctgtattgtgagtgcggccaaaaactctctcttactgatgcagagaaagttctcagagcccaacacttacatcgatggcctgcctagccaggaccgccaggaggagctgtatgacgacgtggacctgtcagagctcacagctgcggtggagcctaccgaggaagccacccctgttgcagatgacccaaatgagagagaatctgaccgagtgtacctggacctcacacctgtcaagtcctttctgcatggccccagcagtgcacaggcccaggcctcctccccgacgttgtcctgcctggacaatgcaactgaggccctcccggcagactcaggcccaggtcccaccccagatgagccctgcataaagtgtccagagaacctgggagaacagcagctggagagtttggagccagaggatccttccctgagaatcaccaccgtcaaaatccagacggaacagcagagaatctccttcccaccgagctgcccggatgccgtggtggccaccccacctggtgccagcccacctgtgaaggacaggttgcgcgtgaccagtgcagagatcaagcttggcaagaatcggacagaagctgaggtgaagcggtacacagaggagaaggagaggcttgaaaagaagaaggaagaaatccgggggcacctggctcagctccggaaagagaaacgggagctaaaggaaaccctactgaaatgcacagacaaggaagtcctggcgagcctggagcagaagctgaaggaaattgacgaggagtgccggggcgaggagagcaggcgcgtggacctggagctcagcatcatggaggtgaaggacaacctgaagaaggctgaggcagggcctgtgacgttaggcaccaccgtggacaccacccacctggagaatcccaaagctgtcacacctgcctctgccccagactgtaccccagtcaactctgcaaccacactcaagaacaggcctctctcggtcgtggtcacaggcaaaggcactgtactccagaaagccaaggaatgggagaagaaaggagcaagttagaaaacaagcttcatctaaagactctcatgtcaatgtggaccttggtgacaatcctgctttgttaaagcaaaaactatgcgaaagggtgagtctgtttagaagaaaaagcaaagactgaggtactgtgaatggagagcttcagctaagaggaggctctgtcccttttcagagccaaaggaaataatacaacaaaaaggaggcttctttggagacctaagtctattggatgtaaacaagacgttgtatttagggatgttctgtgtttctttcttttttgaagttgtcatcaattgctttactaagatttttaaatagtgaaaacctcctgtttagactttggtggaagatgaatcaaggaagcagggccctgtcttatgggtcacgtgtctttggtgagtgagaagacctaaactcctggccatcatctcttatccaatacttagcagttggggattaaaccatccttgccttcagttctctccaatattaccaggcccaactcagtcttcagtgattttaaacagcattgacatcatctgtaaaaccatcatctgtaaaaccatctatgacatgagttttgagaaacaataatggggaaaatatttgggaccaagctgaagcactaatcccactaagttaaagacttctttccagtccaaggcaggcctgaatcaactgtctttaaataaaattttaagtgatgctgtattatatataggaaaaaatgcttaaaatcctgtcatttagaacagtgaaaagtatcttttgagattaaagtgactctttactgtaggaaaaatattactctgtgtttacagattcattgctgtggtcaggccatttttaagggaagagttatttaatataaatagtctctgattttaagttctgtttaatgttcattctccttccaagaacaaagtggtgatttttggttagggtgatcgccctcttaaaattggcagtgctgttccttgtgctgcccctgtcttttcctctgatggcatttttttttttttttttttaacacaggttgaaacatttcatctattatctctgcctcatttctggagggttgtgtatcagttctctaacacttgttcctgagaactaaatgtcttttttattcttatttcctctctcataaacatttggtgaccttttaccaagtggtgagttagttaggttttttaaaataaaatgttcattgtatttg

SEQ ID NO: 641 - DNA, 961 bp, Homo sapiens
  source 1..961: mol_type = unassigned DNA
gcgaggagcgcactccgtggccccgatggagcggtacaaagcacaggggtgttgctgtctggtggtacagagaaggatccggcaggtttctgcgtccctggaacagctgctgacagagttggatgacttcctcaagattcttgaccaggagaacctgagcagcacagcactggtgaagaagagctgcctggcggagctcctccggctttacaccaaaagcagcagctctgatgaggagtacatttatatgaacaaagtgaccatcaacaagcaacagaatgcagagtctcaaggcaaagcgcctgaggagcagggcctgctacccaatggggagcccagccagcactcctcggcccctcagaagagccttccagacctcccgccacccaagatgattccagaacggaaacagcttgccatcccaaagacggagtctccagagggctactatgaagaggctgagccatatgacacatccctcaatgaggacggagaggctgtgagcagctcctacgagtcctacgatgaagaggacggcagcaagggcaagtcggccccttaccagtggccctcgccggaggccggcatcgagctgatgcgtgacgcccgcatctgcgccttcctgtggcgcaagaagtggctgggacagtgggccaagcagctctgtgtcatcaaggacaacaggcttctgtgctacaaatcctccaaggaccacagccctcagctggacgtgaacctactgggcagcagcgtcattcacaaggagaagcaagtgcggaagaaggagcacaagctgaagatcacgccgatgaatgccgatgtgattgtgctgggcctgcagagcaaggaccaggctgagcagtggctcagggtcatccaggaagtgagcggcctgccttccgaaggagcatctgaaggaaaccagtacaccccggatgcccagcgctttaactgccagaaa

SEQ ID NO: 642 - DNA, 4028 bp, Homo sapiens
  source 1..4028: mol_type = unassigned DNA
gtgccaaggcggccgggggcggcgagcggggccgcgggcgcgcaccgactcaagagccgactgtcagcctcggcgggccggagttctccggcgctgggacaggggcgctgggacaggggcgctgggggcgagccctggcgggggccaggtccgaggaccctgggcgcggcggccccgccaggaggtccggccgcgagcgtgacctcacggggaggggccagcgcggcggcctgggcgctgagccgagcgccgggagagcagcgcagaagccgagccgcgaggagcgcactccgtggccccgatggagcggtacaaagcacaggggtgttgctgtctggtggtacagagaaggatccggcaggtttctgcgtccctggaacagctgctgacagagttggatgacttcctcaagattcttgaccaggagaacctgagcagcacagcactggtgaagaagagctgcctggcggagctcctccggctttacaccaaaagcagcagctctgatgaggagtacatttatatgaacaaagtgaccatcaacaagcaacagaatgcagagtctcaaggcaaagcgcctgaggagcagggcctgctacccaatggggagcccagccagcactcctcggcccctcagaagagccttccagacctcccgccacccaagatgattccagaacggaaacagcttgccatcccaaagacggagtctccagagggctactatgaagaggctgagccatatgacacatccctcaatgaggacggagaggctgtgagcagctcctacgagtcctacgatgaagaggacggcagcaagggcaagtcggccccttaccagtggccctcgccggaggccggcatcgagctgatgcgtgacgcccgcatctgcgccttcctgtggcgcaagaagtggctgggacagtgggccaagcagctctgtgtcatcaaggacaacaggcttctgtgctacaaatcctccaaggaccacagccctcagctggacgtgaacctactgggcagcagcgtcattcacaaggagaagcaagtgcggaagaaggagcacaagctgaagatcacgccgatgaatgccgatgtgattgtgctgggcctgcagagcaaggaccaggctgagcagtggctcagggtcatccaggaagtgagcggcctgccttccgaaggagcatctgaaggaaaccagtacaccccggatgcccagcgctttaactgccagaaaccagatatagctgagaagtacctgtcggcttcagagtatgggagctccgtggatggccaccctgaggtcccagaaaccaaagacgtcaagaagaaatgttctgctggcctcaaactgagcaacctaatgaatctgggcaggaagaaatccacctcactggagcctgtggagaggtccctcgagacatccagttacctgaacgtgctggtgaacagccagtggaagtctcgctggtgctctgtcagggacaatcacctgcacttctaccaggaccggaaccggagcaaggtggcccagcaacccctcagcctggtgggctgcgaggtggtcccagaccccagccccgaccacctctactccttccgcatcctccacaagggcgaggagctggccaagcttgaggccaagtcttccgaggaaatgggccactggctgggtctcctgctctctgagtcaggctccaagacagacccagaagagttcacctacgactatgtggatgccgatagggtctcctgtattgtgagtgcggccaaaaactctctcttactgatgcagagaaagttctcagagcccaacacttacatcgatggcctgcctagccaggaccgccaggaggagctgtatgacgacgtggacctgtcagagctcacagctgcggtggagcctaccgaggaagccacccctgttgcagatgacccaaatgagagagaatctgaccgagtgtacctggacctcacacctgtcaagtcctttctgcatggccccagcagtgcacaggcccaggcctcctccccgacgttgtcctgcctggacaatgcaactgaggccctcccggcagactcaggcccaggtcccaccccagatgagccctgcataaagtgtccagagaacctgggagaacagcagctggagagtttggagccagaggatccttccctgagaatcaccaccgtcaaaatccagacggaacagcagagaatctccttcccaccgagctgcccggatgccgtggtggccaccccacctggtgccagcccacctgtgaaggacaggttgcgcgtgaccagtgcagagatcaagcttggcaagaatcggacagaagctgaggtgaagcggtacacagaggagaaggagaggcttgaaaagaagaaggaagaaatccgggggcacctggctcagctccggaaagagaaacgggagctaaaggaaaccctactgaaatgcacagacaaggaagtcctggcgagcctggagcagaagctgaaggaaattgacgaggagtgccggggcgaggagagcaggcgcgtggacctggagctcagcatcatggaggtgaaggacaacctgaagaaggctgaggcagggcctgtgacgttaggcaccaccgtggacaccacccacctggagaatgtgagcccccgccccaaagctgtcacacctgcctctgccccagactgtaccccagtcaactctgcaaccacactcaagaacaggcctctctcggtcgtggtcacaggcaaaggcactgtactccagaaagccaaggaatgggagaagaaaggagcaagttagaaaacaagcttcatctaaagactctcatgtcaatgtggaccttggtgacaatcctgctttgttaaagcaaaaactatgcgaaagggtgagtctgtttagaagaaaaagcaaagactgaggtactgtgaatggagagcttcagctaagaggaggctctgtcccttttcagagccaaaggaaataatacaacaaaaaggaggcttctttggagacctaagtctattggatgtaaacaagacgttgtatttagggatgttctgtgtttctttcttttttgaagttgtcatcaattgctttactaagatttttaaatagtgaaaacctcctgtttagactttggtggaagatgaatcaaggaagcagggccctgtcttatgggtcacgtgtctttggtgagtgagaagacctaaactcctggccatcatctcttatccaatacttagcagttggggattaaaccatccttgccttcagttctctccaatattaccaggcccaactcagtcttcagtgattttaaacagcattgacatcatctgtaaaaccatcatctgtaaaaccatctatgacatgagttttgagaaacaataatggggaaaatatttgggaccaagctgaagcactaatcccactaagttaaagacttctttccagtccaaggcaggcctgaatcaactgtctttaaataaaattttaagtgatgctgtattatatataggaaaaaatgcttaaaatcctgtcatttagaacagtgaaaagtatcttttgagattaaagtgactctttactgtaggaaaaatattactctgtgtttacagattcattgctgtggtcaggccatttttaagggaagagttatttaatataaatagtctctgattttaagttctgtttaatgttcattctccttccaagaacaaagtggtgatttttggttagggtgatcgccctcttaaaattggcagtgctgttccttgtgctgcccctgtcttttcctctgatggcatttttttttttttttttttaacacaggttgaaacatttcatctattatctctgcctcatttctggagggttgtgtatcagttctctaacacttgttcctgagaactaaatgtcttttttattcttatttcctctctcataaacatttggtgaccttttaccaagtggtgagttagttaggttttttaaaataaaatgttcattgtatttg

SEQ ID NO: 643 - DNA, 2932 bp, Homo sapiens
  source 1..2932: mol_type = unassigned DNA
gagcagcgcagaagccgagccgcgaggagcgcactccgtggccccgatggagcggtacaaagccctggaacagctgctgacagagttggatgacttcctcaagattcttgaccaggagaacctgagcagcacagcactggtgaagaagagctgcctggcggagctcctccggctttacaccaaaagcagcagctctgatgaggagtacatttatatgaacaaagtgaccatcaacaagcaacagaatgcagagtctcaaggcaaagcgcctgaggagcagggcctgctacccaatggggagcccagccagcactcctcggcccctcagaagagccttccagacctcccgccacccaagatgagaatcctgaccttgggccagatctcgggtgcccagagcttttctccagatgggacccacctgacgggaacggagtttcttggaggctggagctggaggcccagccagatcaggctgatgagccctgggacccactggggagaccttactgccacagagattccagaacggaaacagcttgccatcccaaagacggagtctccagagggctactatgaagaggctgagccatatgacacatccctcaatgaggacggagaggctgtgagcagctcctacgagtcctacgatgaagaggacggcagcaagggcaagtcggccccttaccagtggccctcgccggaggccggcatcgagctgatgcgtgacgcccgcatctgcgccttcctgtggcgcaagaagtggctgggacagtgggccaagcagctctgtgtcatcaaggacaacaggcttctgtgctacaaatcctccaaggaccacagccctcagctggacgtgaacctactgggcagcagcgtcattcacaaggagaagcaagtgcggaagaaggagcacaagctgaagatcacgccgatgaatgccgatgtgattgtgctgggcctgcagagcaaggaccaggctgagcagtggctcagggtcatccaggaagtgagcggcctgccttccgaaggagcatctgaaggaaaccagtacaccccggatgcccagcgctttaactgccagaaaccagatatagctgagaagtacctgtcggcttcagagtatgggagctccgtggatggccaccctgaggtcccagaaaccaaagacgtcaagaagaaatgttctgctggcctcaaactgagcaacctaatgaatctgggcaggaagaaatccacctcactggagcctgtggagaggtccctcgagacatccagttacctgaacgtgctggtgaacagccagtggaagtctcgctggtgctctgtcagggacaatcacctgcacttctaccaggaccggaaccggagcaaggtggcccagcaacccctcagcctggtgggctgcgaggtggtcccagaccccagccccgaccacctctactccttccgcatcctccacaagggcgaggagctggccaagcttgaggccaagtcttccgaggaaatgggccactggctgggtctcctgctctctgagtcaggctccaagacagacccagaagagttcacctacgactatgtggatgccgatagggtctcctgtattgtgagtgcggccaaaaactctctcttactgatgcagagaaagttctcagagcccaacacttacatcgatggcctgcctagccaggaccgccaggaggagctgtatgacgacgtggacctgtcagagctcacagctgcggtggagcctaccgaggaagccacccctgttgcagatgacccaaatgagagagaatctgaccgagtgtacctggacctcacacctgtcaagtcctttctgcatggccccagcagtgcacaggcccaggcctcctccccgacgttgtcctgcctggacaatgcaactgaggccctcccggcagactcaggcccaggtcccaccccagatgagccctgcataaagtgtccagagaacctgggagaacagcagctggagagtttggagccagaggatccttccctgagaatcaccaccgtcaaaatccagacggaacagcagagaatctccttcccaccgagctgcccggatgccgtggtggccaccccacctggtgccagcccacctgtgaaggacaggttgcgcgtgaccagtgcagagatcaagcttggcaagaatcggacagaagctgaggtgaagcggtacacagaggagaaggagaggcttgaaaagaagaaggaagaaatccgggggcacctggctcagctccggaaagagaaacgggagctaaaggaaaccctactgaaatgcacagacaaggaagtcctggcgagcctggagcagaagctgaaggaaattgacgaggagtgccggggcgaggagagcaggcgcgtggacctggagctcagcatcatggaggtgaaggacaacctgaagaaggctgaggcagggcctgtgacgttaggcaccaccgtggacaccacccacctggagaatgtgagcccccgccccaaagctgtcacacctgcctctgccccagactgtaccccagtcaactctgcaaccacactcaagaacaggcctctctcggtcgtggtcacaggcaaaggcactgtactccagaaagccaaggaatgggagaagaaaggagcaagttagaaaacaagcttcatctaaagactctcatgtcaatgtggaccttggtgacaatcctgctttgttaaagcaaaaactatgcgaaagggtgagtctgtttagaagaaaaagcaaagactgaggtactgtgaatggagagcttcagctaagaggaggctctgtcccttttcagagccaaaggaaataatacaacaaaaaggaggcttctttggagacctaagtctattggatgtaaacaagacgttgtatttagggatgttctgtgtttctttc

SEQ ID NO: 644 - DNA, 1413 bp, Homo sapiens
  source 1..1413: mol_type = unassigned DNA
cctctggggttttatattgctctggtattcatgccaaagacacaccagccctcagtcactgggagaagaacctctcataccctcggtgctccagtccccagctcactcagccacacacaccatgtgtgaagaggagaccaccgcgctcgtgtgtgacaatggctctggcctgtgcaaggcaggcttcgcaggagatgatgccccccgggctgtcttcccctccattgtgggccgccctcgccaccagatctggcaccactccttctacaatgagctgcgtgtagcacctgaagagcaccccaccctgctcacagaggctcccctaaatcccaaggccaacagggaaaagatgacccagatcatgtttgaaaccttcaatgtccctgccatgtacgtcgccattcaagctgtgctctccctctatgcctctggccgcacgacaggcatcgtcctggattcaggtgatggcgtcacccacaatgtccccatctatgaaggctatgccctgccccatgccatcatgcgcctggacttggctggccgtgacctcacggactacctcatgaagatcctcacagagagaggctattcctttgtgaccacagctgagagagaaattgtgcgagacatcaaggagaagctgtgctatgtggccctggattttgagaatgagatggccacagcagcttcctcttcctccctggagaagagctatgagctgccagatgggcaggttatcaccattggcaatgagcgcttccgctgccctgagaccctcttccagccttcctttattggcatggagtccgctggaattcatgagacaacctacaattccatcatgaagtgtgacattgacatccgtaaggacttatatgccaacaatgtcctctctgggggcaccaccatgtaccctggcattgctgacaggatgcagaaggagatcacagccctggcccccagcaccatgaagatcaagattattgctcccccagagcggaagtactcagtctggatcgggggctctatcctggcctctctctccaccttccagcagatgtggatcagcaagcctgagtatgatgaggcagggccctccattgtccacaggaagtgcttctaaagtcagaacaggttctccaaggatcccctcgagactactctgttaccagtcatgaaacattaaaacctacaagccttacttctctgtgtggggctcttttttcctgggctatgtctcatacacagtgctaaggacttttcacacattacttttaatccatgcaatagtgctgtaaggtaggtgctatcattatacccatattacagatgaggaaattgaggctcagagaagtcaaggacttgcgaagatcacacagattccagattaaaattcaagtatctgactgcaaa

SEQ ID NO: 645 - DNA, 1565 bp, Homo sapiens
  source 1..1565: mol_type = unassigned DNA
gtcctccgcccgcgcccgacggagcctgttcgcgtcgactgcccagagtccgcgaatcctccgctccgagcccgtccggactcccccgatcccagctttctctcctttgaaaacactaagaataatgtcactgcatcagtttttactagagccaatcacctgtcatgcctggaacagggatcgtactcagattgccctcagtcccaataatcacgaagtgcacatctataagaagaacgggagccagtgggtgaaagctcatgaactcaaggagcacaacggacacatcacaggtattgactgggctcccaagagcgaccgcattgtcacttgtggggcagaccgcaatgcctatgtctggagtcagaaagatggtgtttggaagccaaccctggtgatcctgagaattaatcgcgcagctacttttgtgaagtggtcccccctagagaacaaatttgctgtgggaagtggagcacgactcatttctgtttgttactttgagtctgaaaatgactggtgggtgagcaagcacattaaaaagccgattcgctccacagtcctcagcttggattggcatcccaacaacgttttgctggcagcaggatcatgtgacttcaaatgcagagtgttttctgcctacattaaagaagtggatgaaaagccagccagcacgccctggggcagcaagatgccttttgggcagctgatgtcagagtttggtggcagtggcactggtggctgggtccacggggtaagcttctctgccagtgggagccgcctggcctgggtcagccacgacagcaccgtgtctgttgctgatgcctcaaaaagtgtgcaggtctcgactctgaagacagagttcctgccgctcctaagtgtgtcatttgtctcagagaacagcgtcgtggctgctggccatgactgctgcccaatgctctttaactacgatgaccgcggctgcctgaccttcgtctccaagttagatattccaaaacagagcatccaacgcaacatgtctgccatggaacgcttccgcaacatggacaagagagccacaactgaggaccgcaacacggccttggagacgctgcaccagaatagcatcactcaagtctctatttatgaggtggacaagcaagattgtcgcaaattttgcactactggcatcgatggagccatgacaatttgggatttcaagaccctcgagtcttccatccagggcctccggataatgtgaagctgagtgagcctccgccatccagcatgacaaactgtggccgaccgcagctgtgccgtggcacgatggcgaggaagccagccccaaggaaacactgaaaacacatatcacgccaatgccgtgtggttttgtttgaatataaaattggtgaaagtgttggtttttttaaggcagtaatttttttgtttgtttttttgcgatttcattccattcttgaccaaagcttctctttaagtagtttattatggaaaattgtcacactaacttaaaagacagggtgagggagatatgtaaattgtccactagaaaattaaataaaagaactgaa

SEQ ID NO: 646 - DNA, 1702 bp, Homo sapiens
  source 1..1702: mol_type = unassigned DNA
ctctgggcttccgtcctccgcccgcgcccgacggagcctgttcgcgtcgactgcccagagtccgcgaatcctccgctccgagcccgtccggactcccccgatcccagctttctctcctttgaaaacactaagaataatgtcactgcatcagtttttactagagccaatcacctgtcatgcctggaacagggatcgtactcgaccagtctgtcttgattactatagcttggtgagattgccctcagtcccaataatcacgaagtgcacatctataagaagaacgggagccagtgggtgaaagctcatgaactcaaggagcacaacggacacatcacagggtatgcatatctgcagtgcagtgttgccaggcctcatcagattgccatcattcccacctgtcctgtatgagagtgctcattttcccacaccccgccacatacttgagatgggaagactgaagaatgcatgaaaggttcatccattgcttctgtattgactgggctcccaagagcgaccgcattgtcacttgtggggcagaccgcaatgcctatgtctggagtcagaaagatggtgtttggaagccaaccctggtgatcctgagaattaatcgcgcagctacttttgtgaagtggtcccccctagagaacaaatttgctgtgggaagtggagcacgactcatttctgtttgttactttgagtctgaaaatgactggtgggtgagcaagcacattaaaaagccgattcgctccacagtcctcagcttggattggcatcccaacaacgttttgctggcagcaggatcatgtgacttcaaatgcagagtgttttctgcctacattaaagaagtggatgaaaagccagccagcacgccctggggcagcaagatgccttttgggcagctgatgtcagagtttggtggcagtggcactggtggctgggtccacggggtaagcttctctgccagtgggagccgcctggcctgggtcagccacgacagcaccgtgtctgttgctgatgcctcaaaaagtgtgcaggtctcgactctgaagacagagttcctgccgctcctaagtgtgtcatttgtctcagagaacagcgtcgtggctgctggccatgactgctgcccaatgctctttaactacgatgaccgcggctgcctgaccttcgtctccaagttagatattccaaaacagagcatccaacgcaacatgtctgccatggaacgcttccgcaacatggacaagagagccacaactgaggaccgcaacacggccttggagacgctgcaccagaatagcatcactcaagtctctatttatgaggtggacaagcaagattgtcgcaaattttgcactactggcatcgatggagccatgacaatttgggatttcaaggagccaagccgccatggcctaccacagcttcctggtggagcccatcagctgccacgcctggaacaaggaccgcacccagattgccatctgccccaacaaccatgaggtgcatatctatgaaaagagcggtgccaaatggaccaaggtgcacgagctcaaggagcacaacgggcaggtgacaggcatcgactgggcccccgagagtaaccgtattgtgacctgcggcacagaccgcaacgcctacgtgtggacgctgaagggccgcacatggaagcccacgctggtcatcctgcggatcaaccgggctg

SEQ ID NO: 647 - DNA, 1551 bp, Homo sapiens
  source 1..1551: mol_type = unassigned DNA
ggcaggccccgccccccgcccacgaggaagtggctgctgctccggcgcggagcccagagccggttcggcgcgtcgactgcccagagtccgcggccggggcgcgggaggagccaagccgccatggcctaccacagcttcctggtggagcccatcagctgccacgcctggaacaaggaccgcacccagattgccatctgccccaacaaccatgaggtgcatatctatgaaaagagcggtgccaaatggaccaaggtgcacgagctcaaggagcacaacgggcaggtgacaggcatcgactgggcccccgagagtaaccgtattgtgacctgcggcacagaccgcaacgcctacgtgtggacgctgaagggccgcacatggaagcccacgctggtcatcctgcggatcaaccgggctgcccgctgcgtgcgctgggcccccaacgagaacaagtttgctgtgggcagcggctctcgtgtgatctccatctgttatttcgagcaggagaatgactggtgggtttgcaagcacatcaagaagcccatccgctccaccgtcctcagcctggactggcaccccaacaatgtgctgctggctgccggctcctgtgacttcaagtgtcggatcttttcagcctacatcaaggaggtggaggaacggccggcacccaccccgtggggctccaagatgccctttggggaactgatgttcgaatccagcagtagctgcggctgggtacatggcgtctgtttctcagccagcgggagccgcgtggcctgggtaagccacgacagcaccgtctgcctggctgatgccgacaagaagatggccgtcgcgactctggcctctgaaacactaccactgctggcgctgaccttcatcacagacaacagcctggtggcagcgggccacgactgcttcccggtgctgttcacctatgacgccgccgcggggatgctgagcttcggcgggcggctggacgttcctaagcagagctcgcagcgtggcttgacggcccgcgagcgcttccagaacctggacaagaaggcgagctccgagggtggcacggctgcgggcgcgggcctagactcgctgcacaagaacagcgtcagccagatctcggtgctcagcggcggcaaggccaagtgctcgcagttctgcaccactggcatggatggcggcatgagtatctgggatgtgaagagcttggagtcagccttgaaggacctcaagatcaaatgacctgtgaggaatatgttgccttcatcctagctgctggggaagcggggagaggggtcagggaggctaatggttgctttgctgaatgtttctggggtaccaatacgagttcccataggggctgctccctcaaaaagggaggggacagatggggagcttttcttacctattcaaggaatacgtgcctttttcttaaatgctttcatttattgaaaaaaaaaaaaaatgcccccaaagcactatgctggtcatgaactgcttcaaaatgtggaggtaataaaatgcaactgtgtaaaaaaaaaaaaaaaaaaaaaa

SEQ ID NO: 648 - DNA, 572 bp, Homo sapiens
  source 1..572: mol_type = unassigned DNA
acagttggcgcccaccggcatcagcgtgaagggagctcctcgctggctgccgacggggctgcagggctcgctagccgctcacctgcgtgtgagcgcggagcccgcagtacccgccgtccgggctcagaggacgtgactccccgaccctgcgcccggcagtccccgggggccgtgcgcccggcccaggctcggaggtccagcccagcggcggctcaggctgcgcgcctggctcccagcctcagtttccccattggagccaagccgccatggcctaccacagcttcctggtggagcccatcagctgccacgcctggaacaaggaccgcacccagattgccatctgccccaacaaccatgaggtgcatatctatgaaaagagcggtgccaaatggaccaaggtgcacgagctcaaggagcacaacgggcaggtgacaggcatcgactgggcccccgagagtaaccgtattgtgacctgcggcacagaccgcaacgcctacgtgtggacgctgaagggccgcacatggaagcccacgctggtcatcctgcggatcaaccgggctgcccgctgcgtg

SEQ ID NO: 649 - DNA, 559 bp, Homo sapiens
  source 1..559: mol_type = unassigned DNA
agagccggttcggcgcgtcgactgcccagagtccgcggccggggcgcgggagtgtcttgttctgttgcccaggctggagtgtggtgacactaccttgactcactgcagcatctgcctcccgggttccagtgattctcctgcctcagcctctcaggagccaagccgccatggcctaccacagcttcctggtggagcccatcagctgccacgcctggaacaaggaccgcacccagattgccatctgccccaacaaccatgaggtgcatatctatgaaaagagcggtgccaaatggaccaaggtgcacgagctcaaggagcacaacgggcaggtgacaggcatcgactgggcccccgagagtaaccgtattgtgacctgcggcacagaccgcaacgcctacgtgtggacgctgaagggccgcacatggaagcccacgctggtcatcctgcggatcaaccgggctgcccgctgcgtgcgctgggcccccaacgagaacaagtttgctgtgggcagcggctctcgtgtgatctccatctgttatttcgagcaggagaatgactg

SEQ ID NO: 650 - DNA, 593 bp, Homo sapiens
  source 1..593: mol_type = unassigned DNA
cagagccggttcggcgcgtcgactgcccagagtccgcggccggggcgcgggaggtgaacctaacttcctggcctccaagatttggggtcagagtcccaagctgcgtcatttagtagaagccgagtgactttgaacaaatcgttgcttttgtctgagcctgggtttcctcctgtacaaactgaagtgtcttgttctgttgcccaggctggagtgtggtgacactaccttgactcactgcagcatctgcctcccgggttccagtgattctcctgcctcagcctctcaggtagctgggattacaggtacatgccaatatgcccggctaatttttagagccaagccgccatggcctaccacagcttcctggtggagcccatcagctgccacgcctggaacaaggaccgcacccagattgccatctgccccaacaaccatgaggtgcatatctatgaaaagagcggtgccaaatggaccaaggtgcacgagctcaaggagcacaacgggcaggtgacaggcatcgactgggcccccgagagtaaccgtattgtgacctgcggcacagaccgcaacgcctacgtgtggacgctgaaggg

SEQ ID NO: 651 - DNA, 545 bp, Homo sapiens
  source 1..545: mol_type = unassigned DNA
agagccggttcggcgcgtcgactgcccagagtccgcggccggggcgcgggaggctggagtgtggtgacactaccttgactcactgcagcatctgcctcccgggttccagtgattctcctgcctcagcctctcaggagccaagccgccatggcctaccacagcttcctggtggagcccatcagctgccacgcctggaacaaggaccgcacccagattgccatctgccccaacaaccatgaggtgcatatctatgaaaagagcggtgccaaatggaccaaggtgcacgagctcaaggagcacaacgggcaggtgacaggcatcgactgggcccccgagagtaaccgtattgtgacctgcggcacagaccgcaacgcctacgtgtggacgctgaagggccgcacatggaagcccacgctggtcatcctgcggatcaaccgggctgcccgctgcgtgcgctgggcccccaacgagaacaagtttgctgtgggcagcggctctcgtgtgatctccatctgttatttcgagcaggagaatgactggtgggt

SEQ ID NO: 652 - DNA, 348 bp, Homo sapiens
  source 1..348: mol_type = unassigned DNA
agagccggttcggcgcgtcgactgcccagagtccgcggccggggcgcgggaggctggagtgtggtgacactaccttgactcactgcagcatctgcctcccgggttccagtgattctcctgcctcagcctctcaggtagctgggattacaggtccctgtgatgctgggaaactgagtcacggaggcggggagagatgtgtttgaggaattgggctgagaccgtgatctcacccccgtcaggcctggtgggctcctttgacactcagcggcaggagccaagccgccatggcctaccacagcttcctggtggagcccatcagctgccacgcctggaacaaggaccgcaccc

SEQ ID NO: 653 - DNA, 581 bp, Homo sapiens
  source 1..581: mol_type = unassigned DNA
agagccggttcggcgcgtcgactgcccagagtccgcggccggggcgcgggagtgtcttgttctgttgcccaggctggagtgtggtgacactaccttgactcactgcagcatctgcctcccgggttccagtgattctcctgcctcagcctctcaggtagctgggattacaggagccaagccgccatggcctaccacagcttcctggtggagcccatcagctgccacgcctggaacaaggaccgcacccagattgccatctgccccaacaaccatgaggtgcatatctatgaaaagagcggtgccaaatggaccaaggtgcacgagctcaaggagcacaacgggcaggtgacaggcatcgactgggcccccgagagtaaccgtattgtgacctgcggcacagaccgcaacgcctacgtgtggacgctgaagggccgcacatggaagcccacgctggtcatcctgcggatcaaccgggctgcccgctgcgtgcgctgggcccccaacgagaacaagtttgctgtgggcagcggctctcgtgtgatctccatctgttatttcgagcaggagaatgactggtgggt

SEQ ID NO: 654 - DNA, 669 bp, Homo sapiens
  source 1..669: mol_type = unassigned DNA
cagggcctgcacagttggcgcccaccggcatcagcgtgaagggagctcctcgctggctgccgacggggctgcagggctcgctagccgctcacctgcgtgtgagcgcggagcccgcagtacccgccgtccgggctcagaggacgtgactccccgaccctgcgcccggcagtccccgggggccgtgcgcccggcccaggctcggaggtccagcccagcggcggctcaggctgcgcgcctggctcccagcctcagtttccccattggtaaagcattgacggtggttgcggacggcttctgcggacagagccttgggctccgacgtctgcgcgggagccaagccgccatggcctaccacagcttcctggtggagcccatcagctgccacgcctggaacaaggaccgcacccagattgccatctgccccaacaaccatgaggtgcatatctatgaaaagagcggtgccaaatggaccaaggtgcacgagctcaaggagcacaacgggcaggtgacaggcatcgactgggcccccgagagtaaccgtattgtgacctgcggcacagaccgcaacgcctacgtgtggacgctgaagggccgcacatggaagcccacgctggtcatcctgcggatcaaccgggctgcccgctgcgtgcgctgggcccccaacgagaa

SEQ ID NO: 655 - DNA, 1715 bp, Homo sapiens
  source 1..1715: mol_type = unassigned DNA
agagccggttcggcgcgtcgactgcccagagtccgcggccggggcgcgggagtgttcccccaggtgaacctaacttcctggcctccaagatttggggtcagagtcccaagctgcgtcatttagtagaagccgagtgactttgaacaaatcgttgcttttgtctgagcctgggtttcctcctgtacaaactgaagtgtcttgttctgttgcccaggctggagtgtggtgacactaccttgactcactgcagcatctgcctcccgggttccagtgattctcctgcctcagcctctcaggagccaagccgccatggcctaccacagcttcctggtggagcccatcagctgccacgcctggaacaaggaccgcacccagattgccatctgccccaacaaccatgaggtgcatatctatgaaaagagcggtgccaaatggaccaaggtgcacgagctcaaggagcacaacgggcaggtgacaggcatcgactgggcccccgagagtaaccgtattgtgacctgcggcacagaccgcaacgcctacgtgtggacgctgaagggccgcacatggaagcccacgctggtcatcctgcggatcaaccgggctgcccgctgcgtgcgctgggcccccaacgagaacaagtttgctgtgggcagcggctctcgtgtgatctccatctgttatttcgagcaggagaatgactggtgggtttgcaagcacatcaagaagcccatccgctccaccgtcctcagcctggactggcaccccaacaatgtgctgctggctgccggctcctgtgacttcaagtgtcggatcttttcagcctacatcaaggaggtggaggaacggccggcacccaccccgtggggctccaagatgccctttggggaactgatgttcgaatccagcagtagctgcggctgggtacatggcgtctgtttctcagccagcgggagccgcgtggcctgggtaagccacgacagcaccgtctgcctggctgatgccgacaagaagatggccgtcgcgactctggcctctgaaacactaccactgctggcgctgaccttcatcacagacaacagcctggtggcagcgggccacgactgcttcccggtgctgttcacctatgacgccgccgcggggatgctgagcttcggcgggcggctggacgttcctaagcagagctcgcagcgtggcttgacggcccgcgagcgcttccagaacctggacaagaaggcgagctccgagggtggcacggctgcgggcgcgggcctagactcgctgcacaagaacagcgtcagccagatctcggtgctcagcggcggcaaggccaagtgctcgcagttctgcaccactggcatggatggcggcatgagtatctgggatgtgaagagcttggagtcagccttgaaggacctcaagatcaaatgacctgtgaggaatatgttgccttcatcctagctgctggggaagcggggagaggggtcagggaggctaatggttgctttgctgaatgtttctggggtaccaatacgagttcccataggggctgctccctcaaaaagggaggggacagatggggagcttttcttacctattcaaggaatacgtgcctttttcttaaatgctttcatttattgaaaaaaaaaaaaaatgcccccaaagcactatgctggtcatgaactgcttcaaaatgtggaggtaataaaatgcaactg

SEQ ID NO: 656 - DNA, 580 bp, Homo sapiens
  source 1..580: mol_type = unassigned DNA
gctgctgctccggcgcggagcccagagccggttcggcgcgtcgactgcccagagtccgcggccggggcgcgggagacagtgtcttgttctgttgcccaggctggagtgtggtgacactaccttgactcactgcagcatctgcctcccgggttccagtgattctcctgcctcagcctctcaggagccaagccgccatggcctaccacagcttcctggtggagcccatcagctgccacgcctggaacaaggaccgcacccagattgccatctgccccaacaaccatgaggtgcatatctatgaaaagagcggtgccaaatggaccaaggtgcacgagctcaaggagcacaacgggcaggtgacaggcatcgactgggcccccgagagtaaccgtattgtgacctgcggcacagaccgcaacgcctacgtgtggacgctgaagggccgcacatggaagcccacgctggtcatcctgcggatcaaccgggctgcccgctgcgtgcgctgggcccccaacgagaacaagtttgctgtgggcagcggctctcgtgtgatctccatctgttatttcgagcaggagaa

SEQ ID NO: 657 - DNA, 561 bp, Homo sapiens
  source 1..561: mol_type = unassigned DNA
agagccggttcggcgcgtcgactgcccagagtccgcggccggggcgcgggaggctggagtgtggtgacactaccttgactcactgcagcatctgcctcccgggttccagtgattctcctgcctcagcctctcaggtagctgggattacaggagccaagccgccatggcctaccacagcttcctggtggagcccatcagctgccacgcctggaacaaggaccgcacccagattgccatctgccccaacaaccatgaggtgcatatctatgaaaagagcggtgccaaatggaccaaggtgcacgagctcaaggagcacaacgggcaggtgacaggcatcgactgggcccccgagagtaaccgtattgtgacctgcggcacagaccgcaacgcctacgtgtggacgctgaagggccgcacatggaagcccacgctggtcatcctgcggatcaaccgggctgcccgctgcgtgcgctgggcccccaacgagaacaagtttgctgtgggcagcggctctcgtgtgatctccatctgttatttcgagcaggagaatgactggtgggt

SEQ ID NO: 658 - DNA, 1605 bp, Homo sapiens
  source 1..1605: mol_type = unassigned DNA
gcggcggcggcggctcggcaggcgggttcaggcttcgggggccaggtcggttgggtgggtgggtgtctccacagtctgcgtgcgtgggccagcgcgttcgtcttacccttccctccaccccggcccctctccccttctcccctaacctcctaccccacccagccccactcagggggcagcagggccgctccctccgtccttgcctcccttacccaccctcaccggcccttgtttctccttcccctgggggcagccgccgccatgatcctgctggaggtgaacaaccgcatcatcgaggagacgctcgcgctcaagttcgagaacgcggccgccggaaacaaaccggaagcagtagaagtaacatttgcagatttcgatggggtcctctatcatatttcaaatcctaatggagacaaaacaaaagtgatggtcagtatttctttgaaattctacaaggaacttcaggcacatggtgctgatgagttattaaagagggtgtacgggagtttcttggtaaatccagaatcaggatacaatgtctctttgctatatgaccttgaaaatcttccggcatccaaggattccattgtgcatcaagctggcatgttgaagcgaaattgttttgcctctgtctttgaaaaatacttccaattccaagaagagggcaaggaaggagagaacagggcagttatccattatagggatgatgagaccatgtatgttgagtctaaaaaggacagagtcacagtagtcttcagcacagtgtttaaggatgacgacgatgtggtcattggaaaggtgttcatgcaggagttcaaagaaggacgcagagccagccacacagccccacaggtcctctttagccacagggaacctcctctggagctgaaagacacagacgccgctgtgggtgacaacattggctacattacctttgtgctgttccctcgtcacaccaatgccagtgctcgagacaacaccatcaacctgatccacacgttccgggactacctgcactaccacatcaagtgctctaaggcctatattcacacacgtatgcgggcgaaaacgtctgacttcctcaaggtgctgaaccgcgcacgcccagatgccgagaaaaaagaaatgaaaacaatcacggggaagacgttttcatcccgctaatcttgggaataagaggaggaagcggctggcaactgaaggctggaacacttgctactggataatcgtagcttttaatgttgcgcctcttcaggttcttaagggattctccgttttggttccattttgtacacgtttggaaaataatctgcagaaacgagctgtgcttgcaaagacttcatagttcccaagaattaaaaaaaaaaaaaaaagaattccacttgatcaacttaattccttttctttatcttccctccctcacttcccttttctcccaccctcttttccaagctgtttcgctttgcaatatattactggtaatgagttgcaggataatgcagtcataacttgttttctcctaagtatttgagttcaaaactcctgtatctaaagaaatacggttggggtcattaataaagaaaatctttctatcttacatgagaa

SEQ ID NO: 659 - DNA, 1505 bp, Homo sapiens
  source 1..1505: mol_type = unassigned DNA
ggcgccgcggggccgcgcgtccaggcggcgagcggaagtgggtgtgagagcggaagtggccggctagagccgggggctgggcggggaccgggcttgtcggtgaagcggcagtggcggcggcggcggcggctcggcaggcgggttcaggcttcgggggccagccgccgccatgatcctgctggaggtgaacaaccgcatcatcgaggagacgctcgcgctcaagttcgagaacgcggccgccggaaacaaaccggaagcagtagaagtaacatttgcagatttcgatggggtcctctatcatatttcaaatcctaatggagacaaaacaaaagtgatggtcagtatttctttgaaattctacaaggaacttcaggcacatggtgctgatgagttattaaagagggtgtacgggagtttcttggtaaatccagaatcaggatacaatgtctctttgctatatgaccttgaaaatcttccggcatccaaggattccattgtgcatcaagctggcatgttgaagcgaaattgttttgcctctgtctttgaaaaatacttccaattccaagaagagggcaaggaaggagagaacagggcagttatccattatagggatgatgagaccatgtatgttgagtctaaaaaggacagagtcacagtagtcttcagcacagtgtttaaggatgacgacgatgtggtcattggaaaggtgttcatgcaggagttcaaagaaggacgcagagccagccacacagccccacaggtcctctttagccacagggaacctcctctggagctgaaagacacagacgccgctgtgggtgacaacattggctacattacctttgtgctgttccctcgtcacaccaatgccagtgctcgagacaacaccatcaacctgatccacacgttccgggactacctgcactaccacatcaagtgctctaaggcctatattcacacacgtatgcgggcgaaaacgtctgacttcctcaaggtgctgaaccgcgcacgcccagatgccgagaaaaaagaaatgaaaacaatcacggggaagacgttttcatcccgctaatcttgggaataagaggaggaagcggctggcaactgaaggctggaacacttgctactggataatcgtagcttttaatgttgcgcctcttcaggttcttaagggattctccgttttggttccattttgtacacgtttggaaaataatctgcagaaacgagctgtgcttgcaaagacttcatagttcccaagaattaaaaaaaaaaaaaaaagaattccacttgatcaacttaattccttttctttatcttccctccctcacttcccttttctcccaccctcttttccaagctgtttcgctttgcaatatattactggtaatgagttgcaggataatgcagtcataacttgttttctcctaagtatttgagttcaaaactcctgtatctaaagaaatacggttggggtcattaataaagaaaatctttctatctta

SEQ ID NO: 660 - DNA, 482 bp, Homo sapiens
  source 1..482: mol_type = unassigned DNA
gagcggaagtggccggctagagccgggggctgggcggggaccgggcttgtcggtgaagcggcagtggcggcggcggcggcggctcggcaggcgggttcaggcttcgggggccagccccactcagggggcagcagggccgctccctccgtccttgcctcccttacccaccctcaccggcccttgtttctccttcccctgggggcagccgccgccatgatcctgctggaggtgaacaaccgcatcatcgaggagacgctcgcgctcaagttcgagaacgcggccgccggaaacaaaccggaagcagtagaagtaacatttgcagatttcgatggggtcctctatcatatttcaaatcctaatggagacaaaacaaaagtgatggtcagtatttctttgaaattctacaaggaacttcaggcacatggtgctgatgagttattaaagagggtgtacgggagtttcttggtaaatccagaatcagg

SEQ ID NO: 661 - DNA, 1221 bp, Homo sapiens
  source 1..1221: mol_type = unassigned DNA
accgcagcggacagcgccaagtgaagcctcgcttcccctccgcggcgaccagggcccgagccgagagtagcagttgtagctacccgcccagaaactagacacaatgtgcgacgaagacgagaccaccgccctcgtgtgcgacaatggctccggcctggtgaaagccggcttcgccggggatgacgcccctagggccgtgttcccgtccatcgtgggccgcccccgacaccagggcgtcatggtcggtatgggtcagaaagattcctacgtgggcgacgaggctcagagcaagagaggtatcctgaccctgaagtaccctatcgagcacggcatcatcaccaactgggatgacatggagaagatctggcaccacaccttctacaacgagcttcgcgtggctcccgaggagcaccccaccctgctcaccgaggcccccctcaatcccaaggccaaccgcgagatcgtgcgcgacatcaaggagaagctgtgctacgtggccctggacttcgagaacgagatggcgacggccgcctcctcctcctccctggaaaagagctacgagctgccagacgggcaggtcatcaccatcggcaacgagcgcttccgctgcccggagacgctcttccagccctccttcatcggtatggagtcggcgggcattcacgagaccacctacaacagcatcatgaagtgtgacatcgacatcaggaaggacctgtatgccaacaacgtcatgtcggggggcaccacgatgtaccctgggatcgctgaccgcatgcagaaagagatcaccgcgctggcacccagcaccatgaagatcaagatcatcgccccgccggagcgcaaatactcggtgtggatcggcggctccatcctggcctcgctgtccaccttccagcagatgtggatcaccaagcaggagtacgacgaggccggcccttccatcgtccaccgcaaatgcttctagacacactccacctccagcacgcgacttctcaggacgacgaatcttctcaatgggggggcggctgagctccagccaccccgcagtcactttctttgtaacaacttccgttgctgccatcgtaaactgacacagtgtttataacgtgtacatacattaacttattacctcattttgttatttttcgaaacaaagccctgtggaagaaaatggaaaacttgaagaagcattaaagtcattctgttaagctgcgtaaa

SEQ ID NO: 662 - DNA, 762 bp, Homo sapiens
  source 1..762: mol_type = unassigned DNA
atgtgcgacgaagacgagaccaccgccctcgtgtgcgacaatggctccggcctggtgaaagccggcttcgccggggatgacgcccctagggccgtgttcccgtccatcgtgggccgcccccgacaccagggcgtcatggtcggtatgggtcagaaagattcctacgtgggcgacgaggctcagagcaagagaggtatcctgaccctgaagtaccctatcgagcacggcatcatcaccaactgggatgacatggagaagatctggcaccacaccttctacaacgagcttcgcgtggctcccgaggagcaccccaccctgctcaccgaggcccccctcaatcccaaggccaaccgcgagaagatgacccagatcatgtttgagaccttcaacgtgcccgccatgtacgtggccatccaggccgtgctgtccctctacgcctccggcaggaccaccggcatcgtgctggactccggcgacggcatcatgaagtgtgacatcgacatcaggaaggacctgtatgccaacaacgtcatgtcggggggcaccacgatgtaccctgggatcgctgaccgcatgcagaaagagatcaccgcgctggcacccagcaccatgaagatcaagatcatcgccccgccggagcgcaaatactcggtgtggatcggcggctccatcctggcctcgctgtccaccttccagcagatgtggatcaccaagcaggagtacgacgaggccggcccttccatcgtccaccgcaaatgcttc

SEQ ID NO: 663 - DNA, 1381 bp, Homo sapiens
  source 1..1381: mol_type = unassigned DNA
accgcagcggacagcgccaagtgaagcctcgcttcccctccgcggcgaccagggcccgagccgagagtagcagttgtagctacccgcccagaaactagacacaatgtgcgacgaagacgagaccaccgccctcgtgtgcgacaatggctccggcctggtgaaagccggcttcgccggggatgacgcccctagggccgtgttcccgtccatcgtgggccgcccccgacaccagggcgtcatggtcggtatgggtcagaaagattcctacgtgggcgacgaggctcagagcaagagaggtatcctgaccctgaagtaccctatcgagcacggcatcatcaccaaggccaaccgcgagaagatgacccagatcatgtttgagaccttcaacgtgcccgccatgtacgtggccatccaggccgtgctgtccctctacgcctccggcaggaccaccggcatcgtgctggactccggcgacggcgtcacccacaacgtgcccatttatgagggctacgcgctgccgcacgccatcatgcgcctggacctggcgggccgcgatctcaccgactacctgatgaagatcctcactgagcgtggctactccttcgtgaccacagctgagcgcgagatcgtgcgcgacatcaaggagaagctgtgctacgtggccctggacttcgagaacgagatggcgacggccgcctcctcctcctccctggaaaagagctacgagctgccagacgggcaggtcatcaccatcggcaacgagcgcttccgctgcccggagacgctcttccagccctccttcatcggtatggagtcggcgggcattcacgagaccacctacaacagcatcatgaagtgtgacatcgacatcaggaaggacctgtatgccaacaacgtcatgtcggggggcaccacgatgtaccctgggatcgctgaccgcatgcagaaagagatcaccgcgctggcacccagcaccatgaagatcaagatcatcgccccgccggagcgcaaatactcggtgtggatcggcggctccatcctggcctcgctgtccaccttccagcagatgtggatcaccaagcaggagtacgacgaggccggcccttccatcgtccaccgcaaatgcttctagacacactccacctccagcacgcgacttctcaggacgacgaatcttctcaatgggggggcggctgagctccagccaccccgcagtcactttctttgtaacaacttccgttgctgccatcgtaaactgacacagtgtttataacgtgtacatacattaacttattacctcattttgttatttttcgaaacaaagccctgtggaagaaaatggaaaacttgaagaagcattaaagtcattctgttaagctgc

SEQ ID NO: 664 - DNA, 1227 bp, Homo sapiens
  source 1..1227: mol_type = unassigned DNA
ggccaccgcagcggacagcgccaagtgaagcctcgcttcccctccgcggcgaccagggcccgagccgagagtagcagttgtagctacccgcccagaaactagacacaatgtgcgacgaagacgagaccaccgccctcgtgtgcgacaatggctccggcctggtgaaagccggcttcgccggggatgacgcccctagggccgtgttcccgtccatcgtgggccgcccccgacaccagggcgtcatggtcggtatgggtcagaaagattcctacgtgggcgacgaggctcagagcaagagaggtatcctgaccctgaagtaccctatcgagcacggcatcatcaccaactgggatgacatggagaagatctggcaccacaccttctacaacgagcttcgcgtggctcccgaggagcaccccaccctgctcaccgaggcccccctcaatcccaaggccaaccctgagcgcgagatcgtgcgcgacatcaaggagaagctgtgctacgtggccctggacttcgagaacgagatggcgacggccgcctcctcctcctccctggaaaagagctacgagctgccagacgggcaggtcatcaccatcggcaacgagcgcttccgctgcccggagacgctcttccagccctccttcatcggtatggagtcggcgggcattcacgagaccacctacaacagcatcatgaagtgtgacatcgacatcaggaaggacctgtatgccaacaacgtcatgtcggggggcaccacgatgtaccctgggatcgctgaccgcatgcagaaagagatcaccgcgctggcacccagcaccatgaagatcaagatcatcgccccgccggagcgcaaatactcggtgtggatcggcggctccatcctggcctcgctgtccaccttccagcagatgtggatcaccaagcaggagtacgacgaggccggcccttccatcgtccaccgcaaatgcttctagacacactccacctccagcacgcgacttctcaggacgacgaatcttctcaatgggggggcggctgagctccagccaccccgcagtcactttctttgtaacaacttccgttgctgccatcgtaaactgacacagtgtttataacgtgtacatacattaacttattacctcattttgttatttttcgaaacaaagccctgtggaagaaaatggaaaacttgaagaagcattaaagtcattctgttaagctgcg

SEQ ID NO: 665 - DNA, 1491 bp, Homo sapiens
  source 1..1491: mol_type = unassigned DNA
accgcagcggacagcgccaagtgaagcctcgcttcccctccgcggcgaccagggcccgagccgagagtagcagttgtagctacccgcccagaaactagacacaatgtgcgacgaagacgagaccaccgccctcgtgtgcgacaatggctccggcctggtgaaagccggcttcgccggggatgacgcccctagggccgtgttcccgtccatcgtgggccgcccccgacaccagggcgtcatggtcggtatgggtcagaaagattcctacgtgggcgacgaggctcagagcaagagaggtatcctgaccctgaagtaccctatcgagcacggcatcatcaccaactgggatgacatggagaagatctggcaccacaccttctacaacgagcttcgcgtggctcccgaggagcaccccaccctgctcaccgaggcccccctcaatcccaaggccaaccgcgagaagatgacccagatcatgtttgagaccttcaacgtgcccgccatgtacgtggccatccaggccgtgctgtccctctacgcctccggcaggaccaccggcatcgtgctggactccggcgacggcgtcacccacaacgtgcccatttatgagggctacgcgctgccgcacgccatcatgcgcctggacctggcgggccgcgatctcaccgactacctgatgaagatcctcactgagcgtggctactccttcgtgaccacagctgagcgcgagatcgtgcgcgacatcaaggagaagctgtgctacgtggccctggacttcgagaacgagatggcgacggccgcctcctcctcctccctggaaaagagctacgagctgccagacgggcaggtcatcaccatcggcaacgagcgcttccgctgcccggagacgctcttccagccctccttcatcggtatggagtcggcgggcattcacgagaccacctacaacagcatcatgaagtgtgacatcgacatcaggaaggacctgtatgccaacaacgtcatgtcggggggcaccacgatgtaccctgggatcgctgaccgcatgcagaaagagatcaccgcgctggcacccagcaccatgaagatcaagatcatcgccccgccggagcgcaaatactcggtgtggatcggcggctccatcctggcctcgctgtccaccttccagcagatgtggatcaccaagcaggagtacgacgaggccggcccttccatcgtccaccgcaaatgcttctagacacactccacctccagcacgcgacttctcaggacgacgaatcttctcaatgggggggcggctgagctccagccaccccgcagtcactttctttgtaacaacttccgttgctgccatcgtaaactgacacagtgtttataacgtgtacatacattaacttattacctcattttgttatttttcgaaacaaagccctgtggaagaaaatggaaaacttgaagaagcattaaagtcattctgttaagctgcgtaaa

SEQ ID NO: 666 - DNA, 2755 bp, Homo sapiens
  source 1..2755: mol_type = unassigned DNA
cacactcattttagccagtgtccaggctatcagcagagaaagacaggtgggcagcatggctccgggcgaaaaggaaagcggggagggcccagccaagagcgccctccggaagatacgcacagccaccctggtcatcagcttggcccgaggttggcagcagtgggcgaatgagaacagcatcaggcaggcccaggagcctacaggctggctgccgggagggacccaggactcacctcaagctcctaaaccaatcacaccccctacttcacaccagaaagctcagagtgccccaaagtcgccaccccgcctgccagaaggacatggagatggacaaagctcagagaaagcccctgaggtttctcacatcaaaaagaaagaggtgtccaaaacggtggtcagcaagacttatgagagaggaggggacgtgagccacctcagccacaggtacgagagggatgctggtgtgcttgaacctgggcagccagagaatgacattgacagaatcctccacagccacggctccccaacgcggaggagaaaatgtgccaacctggtgtctgagctaaccaagggctggagagtgatggagcaggaggagcccacatggaggagtgacagcgtagacacagaggacagcggctatggaggagaggctgaggagaggcccgagcaggatggagtgcaggtggctgtggtcaggatcaagcgccccttgccctcccaggtaaacagatttacagagaaactcaactgcaaagcccaacagaaatatagcccagtgggcaacttgaaagggagatggcagcagtgggctgatgaacacatacaatcccagaagctcaatcctttcagtgaagagtttgattacgagctggccatgtccacccgcctacacaaaggagatgagggctatggccgccccaaagaaggaaccaaaactgctgaaagggccaagcgtgctgaggagcacatctacagggaaatgatggacatgtgcttcattatctgcacaatggctcgccacagacgagatggcaagatccaggttacttttggagatctctttgacagatacgttcgtatttcagataaagtagtgggcattctcatgcgtgccaggaaacatggactggtagactttgaaggagagatgctatggcaaggccgagatgaccatgttgtgattacgctactcaagtgaaccttcaaaaacaaaagccaaatttggcccactatggtcttaatgctaaatgctcatgtaggtaaaatgaaaatgcaaactctctgtaataagttagtaaatattaaacaatttttacataaacgactttctggcattctatttctatctagaatgaggaattttggagattttgagaaggcacaaagcatttcagaaagcacatagaatgttaatgtataataatagtattaatagttgaaattccacagggtgtttttgtttttgttttgagacagattctctttatgtcaccaaagctggtcttttaactcctggcctcaagtgatcctctcacctcagcctcccaagtagctgggattataggcatgagcaacagcacccagccacttgtatattttaggcaaaatatttagctagtcattgtagaaactactatagatttttaattaaacattacatctaagaagaatgctgacttgagataaatatcagtagaacatataataatgtgtctttatttggaaaaaagaaaataccattaagtttggtaaaactaaacttaaaattttttcagaagcttgactttgtattattgtttatatcatagcatcacttacaaaacaagcacatatataaaaagttgtcaagatgttgctgaaattgttgaagttcctctgtgggcttggattctaacaggtttccagtaagagttcaccttcctcttgtttgatttcagcaaatcacataaaaacagacacttcctgtcttagtaccaacaaaggaaggcacaccctcactaaaagtagagcagaggtgagagattcagatttacttgcctttgtaggacttcttggagaagtttattgtttcattacatgtcagcatataacgagtcaagctgcttgcattaacatcaatgcaatgatatgtatttctccaacaatggagaaatacagaaaatctatgaagtggaatgttcagtattagaaaaatcccatagaatcattggtgaattaaaaacagatttgagacagtttaatgttcctcatactgtaacaaagaaaactttatgaaatgtttaagtcataaaactgcaatattagttctgccaaagtaaaaaatatacaatgatgatggcaaggagaaaatcattggacattaatgtgcctatgtgatcttaaaaacaaatggaatggaatgtgagattgcaattcttactggattcaatgaaattactaaaatgcattgatagtatagcactttggtgttaaatgtaaaaattaatgtctaaatatgatacctcaaaataataggtattagactgctataagaattatatttgttttcatgtatgagtctctttcaaactgaaggttctggtatcttaagaaagtatgcgtattttgtttccataccgtatttataaagctataagttaatgaccaatatttctaagtaggatttcatgtaagatgcacacttctattacaagtgaaacctacgccaaatgttaaagacaaatagcataagaataaaagatgttttcttgta

SEQ ID NO: 667 - DNA, 4863 bp, Homo sapiens
  source 1..4863: mol_type = unassigned DNA
gcttcgcccgagacccagcgcccaggcgtgtcgccccgagaggagccgcgcgaaggtcaccccgcgcccgccgcccgccgcccgccgcctccgtgggtccgtttgccagtcagcccgtgcgtccgagcccctcgcgccccgccgcagccccggccaaccgagcgccatgaaccagatagagcccggcgtgcagtacaactacgtgtacgacgaggatgagtacatgatccaggaggaggagtgggaccgcgacctgctcctggacccagcctgggagaagcagcagaggaagaccttcactgcctggtgtaactcccacctaaggaaagccggcacccagattgagaacatcgaggaagacttcaggaatggccttaagctcatgctgcttttggaagtcatctcaggggaaaggctgcccaaacctgaccggggaaaaatgcggttccacaaaattgctaatgtcaacaaagctttggattacatagccagcaaaggggtgaaactggtgtccattggcgctgaagaaattgttgatggcaacgtgaaaatgaccctgggtatgatctggaccatcatccttcgctttgctattcaggatatttcggttgaagaaacatctgccaaagaaggtctgctgctttggtgtcagaggaaaactgctccttatagaaatgtgaacattcagaacttccatactagctggaaagatggccttggactctgtgccctcatccaccgacaccggcctgacctcattgactactcaaagcttaacaaggatgaccccataggaaatattaacctggccatggaaatcgctgagaagcacctggatattcctaaaatgttggatgctgaagacatcgtgaacacccctaaacccgatgaaagagccatcatgacgtacgtctcttgcttctaccacgcttttgcgggcgcggagcaggccgagacagcggctaacaggatatgtaaggttcttgctgtgaatcaagagaatgagaggctgatggaagaatatgagaggctagcgagtgagcttttggaatggattcgtcgcacgatcccctggctggagaaccggactcccgagaagaccatgcaagccatgcagaagaagctggaggacttccgggattaccgccggaagcacaagccacccaaggtgcaggagaaatgccagctggagatcaacttcaacacgctgcagaccaagctgcggatcagcaaccgtcctgccttcatgccctccgagggcaagatggtgtcggatattgctggtgcctggcagaggctggagcaggctgagaagggttacgaggagtggttgctcaatgagattcggagactggagcgcttggaacacctggctgagaagttcaggcagaaggcctcaacgcacgagacttgggcttatggcaaagagcagatcttgctgcagaaggattacgagtcggcgtcgctgacagaggtgcgggctctgctgcggaagcacgaggcgttcgagagcgacctggcagcgcaccaggaccgcgtggagcagatcgcagccatcgcgcaggagctcaatgaactggactatcacgacgctgtgaatgtcaatgatcggtgccagaaaatttgtgaccagtgggaccgactgggaacgcttactcagaagaggagagaagccctagagagaatggagaaattgctagaaaccattgatcagcttcacctggagtttgccaagagggctgctcctttcaacaattggatggagggcgctatggaggatctgcaagatatgttcattgtccacagcattgaggagatccagagtctgatcactgcgcatgagcagttcaaggccacgctgcccgaggcggacggagagcggcagtccatcatggccatccagaacgaggtggagaaggtgattcagagctacaacatcagaatcagctcaagcaacccgtacagcactgtcaccatggatgagctccggaccaagtgggacaaggtgaagcaactcgtgcccatccgcgatcaatccctgcaggaggagctggctcgccagcatgctaacgagcgtctgaggcgccagtttgctgcccaagccaatgccattgggccctggatccagaacaagatggaggagattgcccggagctccatccagatcacaggagccctggaagaccagatgaaccagctgaagcagtatgagcacaacatcatcaactataagaacaacatcgacaagctggagggagaccatcagctcatccaggaggcccttgtctttgacaacaagcacacgaactacacgatggagcacattcgtgttggatgggagctgctgctgacaaccatcgccagaaccatcaatgaggtggagactcagatcctgacgagagatgcgaagggcatcacccaggagcagatgaatgagttcagagcctccttcaaccactttgacaggaggaagaatggcctgatggatcatgaggatttcagagcctgcctgatttccatgggttatgacctgggtgaagccgaatttgcccgcattatgaccctggtagatcccaacgggcaaggcaccgtcaccttccaatccttcatcgacttcatgactagagagacggctgacaccgacactgccgagcaggtcatcgcctccttccggatcctggcttctgataagccatacatcctggcggaggagctgcgtcgggagctgcccccggatcaggcccagtactgcatcaagaggatgcccgcctactcgggcccaggcagtgtgcctggtgcactggattacgctgcgttctcttccgcactctacggggagagcgatctgtgatgctgagcttctgtaatcactcatcccatcagaatgcaataaaagcggaagtcacagtttgtttcctggaaactttgacaagctttattaagttgagagagagagaggggaaaaaaaaaagcctttcgtagttcagtaattgccagcaatataacacggctaaaatgaagtttttacagtatatgacatagtgcgcttcataaataggtttatttctgagtttttagcaaaatgtaatgaaatatcaggttgatttctttgattaaacagaacaaattacttgagtaataggaaattaggaggatctagggacagaaggaaagtgaaaaatgtgaaaatacaaaatacccaagatttaagaccggggggaaaaaaccacaaattggtaaataaaggtttgctatttgtaaaaaatttcatttatctctaatatgcttatgtgattgcccctaggggagtatatttgggattctaatgttttattttcatgcttatccaaagattactattgtatcttcaaatgaatttaatattgtgagatggaactgccggggattaaaaagactacccaaaagatttttggcacttacaatttttaaaatagtttatgtcatctcttcattatttagggctggatggtcaactcagtcagtgattttttgatgcttctcttatcctccagaatagagacctaaggacacgtggaagtcagtttaattgccagagagaaggatgcaatcactaggtaaaatgaggtttttaggattatttattgattccaggttcccatgctttttgttagagcttattagtacaggttctcaagagatgaccacataaaagtgctctgtttataaataagcaggtttctgtagtactgactggttcatcacaaggcaagtcagaaaccagtatccttctagctctccagtcaggacttccttatgcctctagttttatgaccggttaaggagaagccagagttagagtaggagaggactaattctcagcagcagtggaggtgagttctttcttttgcggaagctttacatatgttttgtgtagtaggaataactagatattttagctagtgtgcggtgtgtgttcacccctgggattggacagtgtatcctaacaagtcccatgtctggttctgtgtctaaaggcctgctccatgacacaggatgctacatgcactcctgctagcacatcttgatctgttgaatgttcattctttctttttgctcatactgctgtaggctataattcccccctgtttttccatcttgttgacagcttgtagagaataaagcaggaattctttttatatctgagtccttaatgatcaggaaatggattacaaacaaacaaaaacagttgcaaacagcaattaaagcattactagagaagcagtaacatgtctgttacctacagtctgtttgctcagatttttatagatttccaccaacagctggaaatgtaatatttccattccaagctgtctgacagcttgactcttcttcctacactgggccatttagaaccttcaacctttatgaatttcacttaatttgcttcattattaagtaattggtagtttccagattcctgaaatatttgaatccttgagtttaatgccaaacacttttggggtggtttagatgaactctgactctattttatttcaagtaggtgctatatcccggccataaacccctatagaaaagccagaaagttgtgcttcctttgaggctattagggggctctgtggtgttttaggatgggtgtgggtaactcatctacctaaacttttaatttctttacaacattcagcaagagagggggtcagtagtctctatctgctaataaatgaagaaaggaagtaaactctgaaaaataataaacatgtttatactctcattttaggtattatttttatttctgaagctggatgctcaaaaattaaaacgtttataagtttctaaattaaacttaatttataaaagaaaaaa

SEQ ID NO: 668 - DNA, 2905 bp, Homo sapiens
  source 1..2905: mol_type = unassigned DNA
gacgggcggcgcggctattaagccgcgcggcagctgctcgcagccggagctggtgcttcgcccgagacccagcgcccaggcgtgtcgccccgagaggagccgcgcgaaggtcaccccgcgcccgccgcccgccgcccgccgcctccgtgggtccgtttgccagtcagcccgtgcgtccgagcccctcgcgccccgccgcagccccggccaaccgagcgccatgaaccagatagagcccggcgtgcagtacaactacgtgtacgacgaggatgagtacatgatccaggaggaggagtgggaccgcgacctgctcctggacccagcctgggagaagcagcagaggaagaccttcactgcctggtgtaactcccacctaaggaaagccggcacccagattgagaacatcgaggaagacttcaggaatggccttaagctcatgctgcttttggaagtcatctcaggggaaaggctgcccaaacctgaccggggaaaaatgcggttccacaaaattgctaatgtcaacaaagctttggattacatagccagcaaaggggtgaaactggtgtccattggcgctgaagaaattgttgatggcaacgtgaaaatgaccctgggtatgatctggaccatcatccttcgctttgctattcaggatatttcggttgaagaaacatctgccaaagaaggtctgctgctttggtgtcagaggaaaactgctccttatagaaatgtgaacattcagaacttccatactagctggaaagatggccttggactctgtgccctcatccaccgacaccggcctgacctcattgactactcaaagcttaacaaggatgaccccataggaaatattaacctggccatggaaatcgctgagaagcacctggatattcctaaaatgttggatgctgaagatttagtatacactgccagacccgatgaaagagccataatgacttatgtttcctgttactatcatgcttttgctggtgcacagaaggccgagacagcggctaacaggatatgtaaggttcttgctgtgaatcaagagaatgagaggctgatggaagaatatgagaggctagcgagtgagcttttggaatggattcgtcgcacgatcccctggctggagaaccggactcccgagaagaccatgcaagccatgcagaagaagctggaggacttccgggattaccgccggaagcacaagccacccaaggtgcaggagaaatgccagctggagatcaacttcaacacgctgcagaccaagctgcggatcagcaaccgtcctgccttcatgccctccgagggcaagatggtgtcggatattgctggtgcctggcagaggctggagcaggctgagaagggttacgaggagtggttgctcaatgagattcggagactggagcgcttggaacacctggctgagaagttcaggcagaaggcctcaacgcacgagacttgggcttatggcaaagagcagatcttgctgcagaaggattacgagtcggcgtcgctgacagaggtgcgggctctgctgcggaagcacgaggcgttcgagagcgacctggcagcgcaccaggaccgcgtggagcagatcgcagccatcgcgcaggagctcaatgaactggactatcacgacgctgtgaatgtcaatgatcggtgccagaaaatttgtgaccagtgggaccgactgggaacgcttactcagaagaggagagaagccctagagagaatggagaaattgctagaaaccattgatcagcttcacctggagtttgccaagagggctgctcctttcaacaattggatggagggcgctatggaggatctgcaagatatgttcattgtccacagcattgaggagatccagagtctgatcactgcgcatgagcagttcaaggccacgctgcccgaggcggacggagagcggcagtccatcatggccatccagaacgaggtggagaaggtgattcagagctacaacatcagaatcagctcaagcaacccgtacagcactgtcaccatggatgagctccggaccaagtgggacaaggtgaagcaactcgtgcccatccgcgatcaatccctgcaggaggagctggctcgccagcatgctaacgagcgtctgaggcgccagtttgctgcccaagccaatgccattgggccctggatccagaacaagatggaggagattgcccggagctccatccagatcacaggagccctggaagaccagatgaaccagctgaagcagtatgagcacaacatcatcaactataagaacaacatcgacaagctggagggagaccatcagctcatccaggaggcccttgtctttgacaacaagcacacgaactacacgatggagcacattcgtgttggatgggagctgctgctgacaaccatcgccagaaccatcaatgaggtggagactcagatcctgacgagagatgcgaagggcatcacccaggagcagatgaatgagttcagagcctccttcaaccactttgacaggaggaagaatggcctgatggatcatgaggatttcagagcctgcctgatttccatgggttatgacctgggtgaagccgaatttgcccgcattatgaccctggtagatcccaacgggcaaggcaccgtcaccttccaatccttcatcgacttcatgactagagagacggctgacaccgacactgccgagcaggtcatcgcctccttccggatcctggcttctgataagccatacatcctggcggaggagctgcgtcgggagctgcccccggatcaggcccagtactgcatcaagaggatgcccgcctactcgggcccaggcagtgtgcctggtgcactggattacgctgcgttctcttccgcactctacggggagagcgatctgtga

SEQ ID NO: 669 - DNA, 3631 bp, Homo sapiens
  source 1..3631: mol_type = unassigned DNA
agcacactcagctctgtggaaggacctccagaaagttctacatgttcatatcaggagatgaggaggtcttcagtgaattcaagtgcaatggccgagacagcggctaacaggatatgtaaggttcttgctgtgaatcaagagaatgagaggctgatggaagaatatgagaggctagcgagtgagcttttggaatggattcgtcgcacgatcccctggctggagaaccggactcccgagaagaccatgcaagccatgcagaagaagctggaggacttccgggattaccgccggaagcacaagccacccaaggtgcaggagaaatgccagctggagatcaacttcaacacgctgcagaccaagctgcggatcagcaaccgtcctgccttcatgccctccgagggcaagatggtgtcggatattgctggtgcctggcagaggctggagcaggctgagaagggttacgaggagtggttgctcaatgagattcggagactggagcgcttggaacacctggctgagaagttcaggcagaaggcctcaacgcacgagacttgggcttatggcaaagagcagatcttgctgcagaaggattacgagtcggcgtcgctgacagaggtgcgggctctgctgcggaagcacgaggcgttcgagagcgacctggcagcgcaccaggaccgcgtggagcagatcgcagccatcgcgcaggagctcaatgaactggactatcacgacgctgtgaatgtcaatgatcggtgccagaaaatttgtgaccagtgggaccgactgggaacgcttactcagaagaggagagaagccctagagagaatggagaaattgctagaaaccattgatcagcttcacctggagtttgccaagagggctgctcctttcaacaattggatggagggcgctatggaggatctgcaagatatgttcattgtccacagcattgaggagatccagagtctgatcactgcgcatgagcagttcaaggccacgctgcccgaggcggacggagagcggcagtccatcatggccatccagaacgaggtggagaaggtgattcagagctacaacatcagaatcagctcaagcaacccgtacagcactgtcaccatggatgagctccggaccaagtgggacaaggtgaagcaactcgtgcccatccgcgatcaatccctgcaggaggagctggctcgccagcatgctaacgagcgtctgaggcgccagtttgctgcccaagccaatgccattgggccctggatccagaacaagatggaggagattgcccggagctccatccagatcacaggagccctggaagaccagatgaaccagctgaagcagtatgagcacaacatcatcaactataagaacaacatcgacaagctggagggagaccatcagctcatccaggaggcccttgtctttgacaacaagcacacgaactacacgatggagcacattcgtgttggatgggagctgctgctgacaaccatcgccagaaccatcaatgaggtggagactcagatcctgacgagagatgcgaagggcatcacccaggagcagatgaatgagttcagagcctccttcaaccactttgacaggaggaagaatggcctgatggatcatgaggatttcagagcctgcctgatttccatgggttatgacctgggtgaagccgaatttgcccgcattatgaccctggtagatcccaacgggcaaggcaccgtcaccttccaatccttcatcgacttcatgactagagagacggctgacaccgacactgccgagcaggtcatcgcctccttccggatcctggcttctgataagccatacatcctggcggaggagctgcgtcgggagctgcccccggatcaggcccagtactgcatcaagaggatgcccgcctactcgggcccaggcagtgtgcctggtgcactggattacgctgcgttctcttccgcactctacggggagagcgatctgtgatgctgagcttctgtaatcactcatcccatcagaatgcaataaaagcggaagtcacagtttgtttcctggaaactttgacaagctttattaagttgagagagagagaggggaaaaaaaaaagcctttcgtagttcagtaattgccagcaatataacacggctaaaatgaagtttttacagtatatgacatagtgcgcttcataaataggtttatttctgagtttttagcaaaatgtaatgaaatatcaggttgatttctttgattaaacagaacaaattacttgagtaataggaaattaggaggatctagggacagaaggaaagtgaaaaatgtgaaaatacaaaatacccaagatttaagaccggggggaaaaaaccacaaattggtaaataaaggtttgctatttgtaaaaaatttcatttatctctaatatgcttatgtgattgcccctaggggagtatatttgggattctaatgttttattttcatgcttatccaaagattactattgtatcttcaaatgaatttaatattgtgagatggaactgccggggattaaaaagactacccaaaagatttttggcacttacaatttttaaaatagtttatgtcatctcttcattatttagggctggatggtcaactcagtcagtgattttttgatgcttctcttatcctccagaatagagacctaaggacacgtggaagtcagtttaattgccagagagaaggatgcaatcactaggtaaaatgaggtttttaggattatttattgattccaggttcccatgctttttgttagagcttattagtacaggttctcaagagatgaccacataaaagtgctctgtttataaataagcaggtttctgtagtactgactggttcatcacaaggcaagtcagaaaccagtatccttctagctctccagtcaggacttccttatgcctctagttttatgaccggttaaggagaagccagagttagagtaggagaggactaattctcagcagcagtggaggtgagttctttcttttgcggaagctttacatatgttttgtgtagtaggaataactagatattttagctagtgtgcggtgtgtgttcacccctgggattggacagtgtatcctaacaagtcccatgtctggttctgtgtctaaaggcctgctccatgacacaggatgctacatgcactcctgctagcacatcttgatctgttgaatgttcattctttctttttgctcatactgctgtaggctataattcccccctgtttttccatcttgttgacagcttgtagagaataaagcaggaattctttttatatctgagtccttaatgatcaggaaatggattacaaacaaacaaaaacagttgcaaacagcaattaaagcattactagagaagcagtaacatgtctgttacctacagtctgtttgctcagatttttatagatttccaccaacagctggaaatgtaatatttccattccaagctgtctgacagcttgactcttcttcctacactgggccatttagaaccttcaacctttatgaatttcacttaatttgcttcattattaagtaattggtagtttccagattcctgaaatatttgaatccttgagtttaatgcc

SEQ ID NO: 670 - DNA, 1994 bp, Homo sapiens
  source 1..1994: mol_type = unassigned DNA
tattaacctggccatggaaatcgctgagaagcacctggatattcctaaaatgttggatgctgaagatttagtatacactgccagacccgatgaaagagccataatgacttatgtttcctgttactatcatgcttttgctggtgcacagaaggccgagacagcggctaacaggatatgtaaggttcttgctgtgaatcaagagaatgagaggctggagcaggctgagaagggttacgaggagtggttgctcaatgagattcggagactggagcgcttggaacacctggctgagaagttcaggcagaaggcctcaacgcacgagacttgggcttatggcaaagagcagatcttgctgcagaaggattacgagtcggcgtcgctgacagaggtgcgggctctgctgcggaagcacgaggcgttcgagagcgacctggcagcgcaccaggaccgcgtggagcagatcgcagccatcgcgcaggagctcaatgaactggactatcacgacgctgtgaatgtcaatgatcggtgccagaaaatttgtgaccagtgggaccgactgggaacgcttactcagaagaggagagaagccctagagagaatggagaaattgctagaaaccattgatcagcttcacctggagtttgccaagagggctgctcctttcaacaattggatggagggcgctatggaggatctgcaagatatgttcattgtccacagcattgaggagatccagagtctgatcactgcgcatgagcagttcaaggccacgctgcccgaggcggacggagagcggcagtccatcatggccatccagaacgaggtggagaaggtgattcagagctacaacatcagaatcagctcaagcaacccgtacagcactgtcaccatggatgagctccggaccaagtgggacaaggtgaagcaactcgtgcccatccgcgatcaatccctgcaggaggagctggctcgccagcatgctaacgagcgtctgaggcgccagtttgctgcccaagccaatgccattgggccctggatccagaacaagatggaggagattgcccggagctccatccagatcacaggagccctggaagaccagatgaaccagctgaagcagtatgagcacaacatcatcaactataagaacaacatcgacaagctggagggagaccatcagctcatccaggaggcccttgtctttgacaacaagcacacgaactacacgatggagcacattcgtgttggatgggagctgctgctgacaaccatcgccagaaccatcaatgaggtggagactcagatcctgacgagagatgcgaagggcatcacccaggagcagatgaatgagttcagagcctccttcaaccactttgacaggaggaagaatggcctgatggatcatgaggatttcagagcctgcctgatttccatgggttatgacctgggtgaagccgaatttgcccgcattatgaccctggtagatcccaacgggcaaggcaccgtcaccttccaatccttcatcgacttcatgactagagagacggctgacaccgacactgccgagcaggtcatcgcctccttccggatcctggcttctgataagccatacatcctggcggaggagctgcgtcgggagctgcccccggatcaggcccagtactgcatcaagaggatgcccgcctactcgggcccaggcagtgtgcctggtgcactggattacgctgcgttctcttccgcactctacggggagagcgatctgtgatgctgagcttctgtaatcactcatcccatcagaatgcaataaaagcggaagtcacagtttgtttcctggaaactttgacaagctttattaagttgagagagagagaggggaaaaaaaaaagcctttcgtagttcagtaattgccagcaatataacacggctaaaatgaagtttttacagtatatgacatagtgcgcttcataaataggtttatttctgagtttttagca

SEQ ID NO: 671 - DNA, 1440 bp, Homo sapiens
  source 1..1440: mol_type = unassigned DNA
agaatggagataagattcagaggttgaggatggggtgtcctggtggactgaaggtagcctactagctgtacatgggtgacaacttgaaacttcagaaccctgaagtttaaaaaattctaaaggtgcctgtcatctcagagagtgacgtaagtgttctttctttatttgggggaagtccaggagaacatattacagacatgtttaatccacatgcattagatgttcctgctgtaatttttgacaatggttcaggactctgcaaagcaggcctgtctggagagattggaccccgccatgtcatcagctccgtcttgggacattgtaaattcaatgtgcctttagcaagacttaatcagaagtacttcgtggggcaagaagccctgtacaagtatgaggccctacatttgcactaccccattgagcgtggactggtaacaggatgggatgacatggagaaactctggaaacatctctttgagcgggagcttggagtaaaacccagccaacagcctgtacttatgaccgagccctctttgaatcctagggaaattcgagaaaagctagcagaaatgatgtttgagaccttcagtgtgcctggtttctacctgtctaatcatgcggtggcagcgctctatgcctctgcctgtgtcacaggcctggtggtggacagtggagatggggtcacttgcactgtccccatctttgagggttactccctgcctcacgcagtcaccaaactctgtatggcagggagggacatcacagagcacctcacccggctcctctttgctagcgggtttaacttcccttgcatactcaacaaggccgtggtaaataacatcaaagagaagttgtgctacatcgccttggagccagagaaagagctacgcaagagccggggagaggtcctgggagcatacagactgccagatggacatgtcatccactttggggatgagctgtaccaagtgcccgaggttctttttgcacctgaccagctgggcatccacagcccaggactctcaaaaatggtctccagcagcatcatgaagtgtgacactgacatccagaataaactttatgcagacattgtactctccgggggcaccactctcctccctgggctggaggaaaggctcatgaaggaagtggaacagctggcttccaaaggtactcccatcaagatcacagcttctcctgatagatgcttctctgcatggattggtgcatccatcatgacctctatgagcagtttcaagcagatgtgggtcacctcggcagacttcaaggagtatgggacatctgtggttcaaagaaggtgcttttaaagatccttgagcagaggagacatcttgaagtgtcagattacaggagtaccagtgggagatggcattttcttctgggcttcagcatgatgttcaataaaagttttgccatttc

SEQ ID NO: 672 - DNA, 1420 bp, Homo sapiens
  source 1..1420: mol_type = unassigned DNA
tggaagaggcctcagcaggcccaggccacctggagggagagcagacctgcggctgaggatgcagggctcccgggcacggtgctagccctgccttgagacaccccgagagctgtgggaagagctgtgggatcccctattgcatcacaaagcggccctggagggctggtctttattttgatgaggctgagaagggaaggctgcgggcatgtttaatccgcacgctttagactccccggctgtgatttttgacaatggctcggggttctgcaaagcgggcctgtctggggagtttggaccccggcacatggtcagctccatcgtggggcacctgaaattccaggctccctcagcagaggccaaccagaagaagtactttgtgggggaggaggccctgtacaagcaggaggccctgcagctgcactcccctttcgagcgtggcctgatcacagggtgggatgacgtggagagactctggaagcacctctttgagtgggagctaggcgtgaaacccagcgaccagcccctgcttgcaacggagccctccctgaaccccagggagaaccgtgagaagatggcagaagtcatgttcgagaacttcggcgtgcccgctttctacctgtcggaccaggcggtgctggctctctacgcctctgcctgtgtcacgggcctggtggtggacagcggggatgcggtcacctgcactgtccccatctttgagggttactccctgccccacgcagtcaccaagctccacgtggcgggcagggacatcacggagctcctcatgcagctgctcctggccagcggccacaccttcccctgccagctggacaagggtctcgtggacgacatcaaaaagaagctgtgctacgtggccttggagcccgagaaggagctttcccggaggccggaggaggtcctgagggagtacaagctgcccgacgggaacatcatcagcctcggggacccgctgcaccaggcgcccgaggccctgttcgtgccccagcagctgggcagccagagccccgggctctcgaatatggtctccagcagcatcaccaagtgtgataccgacatccagaagatcctctttggggagattgtgctgtcggggggcactaccctgttccacgggctggatgaccggcttctcaaggagctggagcagctggcctccaaggacacccccatcaagatcacggctccccccgaccggtggttctccacctggattggagcctccatcgtcacctctctgagtagcttcaagcagatgtgggtcaccgccgcagacttcaaggagtttgggacctccgtggtgcagagaagatgcttctgaaggccgcttctcgttgggtaccgtggggggtgaaccctagccccagctttgggaggatgttcaataaaggaccaatgccgg

SEQ ID NO: 673 - DNA, 987 bp, Homo sapiens
  source 1..987: mol_type = unassigned DNA
atgtttaatccgcacgctttagactccccggctgtgatttttgacaatggctcggggttctgcaaagcgggcctgtctggggagtttggaccccggcacatggtcagctccatcgtggggcacctgaaattccaggctccctcagcagaggccaaccagaagaagtactttgtgggggaggaggccctgtacaagcaggaggccctgcagctgcactcccctttcgagcgtggcctgatcacagggtgggatgacgtggagagactctggaagcacctctttgagtgggagctaggcgtgaaacccagcgaccagcccctgcttgcaacggagccctccctgaaccccagggagaaccgtgagaagatggcagaagtcatgttcgagaacttcggcgtgcccgctttctacctgtcggaccaggcggtgctggctctctacgcctctgcctgtgtcacgggcctggtggtggacagcggggatgcggtcacctgcactgtccccatctttgagggttactccctgccccacgcagtcaccaagctccacgtggcgggcagggacatcacggagctcctcatgcagctgctcctggccagcggccacaccttcccctgccagctggacaagggtctcgtggacgacatcaaaaagaagctgtgctacgtggccttggagcccgagaaggagctttcccggaggccggaggaggtcctgagggagtacaagctgcccgacgggaacatcatcagcctcggggacccgctgcaccaggcgcccgaggccctgttcgtgccccagcagctgggcagccagagccccgggctctcgaatatggtctccagcagcatcaccaagtgtgataccgacatccagaagatcctctttggggagattgtgctgtcggggggcactaccctgttccacgggctggatgaccggcttctccacctggattggagcctccatcgtcacctctctgagtag

SEQ ID NO: 674 - DNA, 4701 bp, Homo sapiens
  source 1..4701: mol_type = unassigned DNA
agagcagcccggagaccgctgccgccgctgccgctgctaccaccgctgccacctgaggagacccgccgcccccccgtcgccgcctcctgcgagtccttcttagcacctggcgtttcatgcacattgccactgccattattattatcattccaatacaaggaaaataaaagaagataccagcgaaaagaaccgcttacacctttccgaattactcaagtgtctcctggaaacagagggtcgttgtccccggaggagcagccgaagggcccgtgggctggtgttgaccgggagggaggaggagttgggggcattgcgtggtggaaagttgcgtgcggcagagaaccgaaggtgcagcgccacagcccaggggacggtgtgtctgggagaagacgctgcccctgcgtcgggacccgccagcgcgcgggcaccgcggggcccgggacgacgccccctcctgcggcgtggactccgtcagtggcccaccaagaaggaggaggaatatggaatccaagggggccagttcctgccgtctgctcttctgcctcttgatctccgccaccgtcttcaggccaggccttggatggtatactgtaaattcagcatatggagataccattatcataccttgccgacttgacgtacctcagaatctcatgtttggcaaatggaaatatgaaaagcccgatggctccccagtatttattgccttcagatcctctacaaagaaaagtgtgcagtacgacgatgtaccagaatacaaagacagattgaacctctcagaaaactacactttgtctatcagtaatgcaaggatcagtgatgaaaagagatttgtgtgcatgctagtaactgaggacaacgtgtttgaggcacctacaatagtcaaggtgttcaagcaaccatctaaacctgaaattgtaagcaaagcactgtttctcgaaacagagcagctaaaaaagttgggtgactgcatttcagaagacagttatccagatggcaatatcacatggtacaggaatggaaaagtgctacatccccttgaaggagcggtggtcataatttttaaaaaggaaatggacccagtgactcagctctataccatgacttccaccctggagtacaagacaaccaaggctgacatacaaatgccattcacctgctcggtgacatattatggaccatctggccagaaaacaattcattctgaacaggcagtatttgatatttactatcctacagagcaggtgacaatacaagtgctgccaccaaaaaatgccatcaaagaaggggataacatcactcttaaatgcttagggaatggcaaccctcccccagaggaatttttgttttacttaccaggacagcccgaaggaataagaagctcaaatacttacacactgacggatgtgaggcgcaatgcaacaggagactacaagtgttccctgatagacaaaaaaagcatgattgcttcaacagctatcacagttcactatttggatttgtccttaaacccaagtggagaagtgactagacagattggtgatgccctacccgtgtcatgcacaatatctgctagcaggaatgcaactgtggtatggatgaaagataacatcaggcttcgatctagcccgtcattttctagtcttcattatcaggatgctggaaactatgtctgcgaaactgctctgcaggaggttgaaggactaaagaaaagagagtcattgactctcattgtagaaggcaaacctcaaataaaaatgacaaagaaaactgatcccagtggactatctaaaacaataatctgccatgtggaaggttttccaaagccagccattcaatggacaattactggcagtggaagcgtcataaaccaaacagaggaatctccttatattaatggcaggtattatagtaaaattatcatttcccctgaagagaatgttacattaacttgcacagcagaaaaccaactggagagaacagtaaactccttgaatgtctctgctataagtattccagaacacgatgaggcagacgagataagtgatgaaaacagagaaaaggtgaatgaccaggcaaaactaattgtgggaatcgttgttggtctcctccttgctgcccttgttgctggtgtcgtctactggctgtacatgaagaagtcaaagactgcatcaaaacatgtaaacaaggacctcggtaatatggaagaaaacaaaaagttagaagaaaacaatcacaaaactgaagcctaagagagaaactgtcctagttgtccagagataaaaatcatatagaccaattgaagcatgaacgtggattgtatttaagacataaacaaagacattgacagcaattcatggttcaagtattaagcagttcattctaccaagctgtcacaggttttcagagaattatctcaagtaaaacaaatgaaatttaattacaaacaataagaacaagttttggcagccatgataataggtcatatgttgtgtttggttcaattttttttccgtaaatgtctgcactgaggatttctttttggtttgccttttatgtaaattttttacgtagctatttttatacactgtaagctttgttctgggagttgctgttaatctgatgtataatgtaatgtttttatttcaattgtttatatggataatctgagcaggtacatttctgattctgattgctatcagcaatgccccaaactttctcataagcacctaaaacccaaaggtggcagcttgtgaagattggggacactcatattgccctaattaaaaactgtgatttttatcacaagggaggggaggccgagagtcagactgatagacaccataggagccgactctttgatatgccaccagcgaactctcagaaataaatcacagatgcatatagacacacatacataatggtactcccaaactgacaattttacctattctgaaaaagacataaaacagaatttggtagcacttacctctacagacacctgctaataaattattttctgtcaaaagaaaaaacacaagcatgtgtgagagacagtttggaaaaatcatggtcaacattcccattttcatagatcacaatgtaaatcactataattacaaattggtgttaaatcctttgggttatccactgccttaaaattatacctatttcatgtttaaaaagatatcaatcagaattggagtttttaacagtggtcattatcaaagctgtgttattttccacagaatatagaatatatatttttttcgtgtgtgtttttgttaactaccctacagatattgaatgcaccttgagataatttagtgtttttaactgatacataatttatcaagcagtacatgaaagtgtaataataaaatgtctatgtatctttagttacattcaaatttgtaactttataaacatgttttatgcttgaggaaatttttaaggtggtagtataaatggaaactttttgaagtagaccagatatgggctacttgtgactagacttttaaactttgctctttcaagcagaagcctggtttctgggagaacactgcacagcgatttctttcccaggatttacacaactttaaagggaagataaatgaacatcagatttctaggtatagaactatgttattgaaaggaaaaggaaaactggtgtttgtttcttagactcatgaaataaaaaattatgaaggcaatgaaaaataaattgaaaattaaagtcagatgagaataggaataatactttgccacttctgcattatttagaaacatacgttattgtacatttgtaaaccatttactgtctgggcaatagtgactccgtttaataaaagcttccgtagtgcattggtatggattaaatgcataaaatattcttagactcgatgctgtataaaatattatgggaaaaaaagaaaatacgttattttgcctctaaacttttattgaagttttatttggcaggaaaaaaaattgaatcttggtcaacatttaaaccaaagtaaaaggggaaaaaccaaagttatttgttttgcatggctaagccattctgttatctctgtaaatactgtgatttcttttttattttctctttagaattttgttaaagaaattctaaaatttttaaacacctgctctccacaataaatcacaaacactaaaataaaattacttccatataaatattattttctcttttggtgtgggagatcaaaggtttaaagtctaacttctaagatatatttgcagaaagaagcaacatgacaatagagagagttatgctacaattatttcttggtttccacttgcaatggttaattaagtccaaaaacagctgtcagaacctcgagagcagaacatgagaaactcagagctctggaccgaaagcagaaagtttgccgggaaaaaaaaagacaacattattaccatcgattcagtgcctggataaagaggaaagcttacttgtttaatggcagccacatgcacgaagatgctaagaagaaaaagaattccaaatcctcaacttttgaggtttcggctctccaatttaactctttggcaacaggaaacaggttttgcaagttcaaggttcactccctatatgtgattataggaattgtttgtggaaatggattaacatacccgtctatgcctaaaagataataaaactgaaatatgtcttca

SEQ ID NO: 675 - DNA, 2496 bp, Homo sapiens
  source 1..2496: mol_type = unassigned DNA
gttgggtgactgcatttcagaagacagttatccagatggcaatatcacatggtacaggaatggaaaagtgctacatccccttgaaggagcggtggtcataatttttaaaaaggaaatggacccagtgactcagctctataccatgacttccaccctggagtacaagacaaccaaggctgacatacaaatgccattcacctgctcggtgacatattatggaccatctggccagaaaacaattcattctgaacaggcagtatttgatatttactatttggatttgtccttaaacccaagtggagaagtgactagacagattggtgatgccctacccgtgtcatgcacaatatctgctagcaggaatgcaactgtggtatggatgaaagataacatcaggcttcgatctagcccgtcattttctagtcttcattatcaggatgctggaaactatgtctgcgaaactgctctgcaggaggttgaaggactaaagaaaagagagtcattgactctcattgtagaaggcaaacctcaaataaaaatgacaaagaaaactgatcccagtggactatctaaaacaataatctgccatgtggaaggttttccaaagccagccattcaatggacaattactggcagtggaagcgtcataaaccaaacagaggaatctccttatattaatggcaggtattatagtaaaattatcatttcccctgaagagaatgttacattaacttgcacagcagaaaaccaactggagagaacagtaaactccttgaatgtctctgctataagtattccagaacacgatgaggcagacgagataagtgatgaaaacagagaaaaggtgaatgaccaggcaaaactaattgtgggaatcgttgttggtctcctccttgctgcccttgttgctggtgtcgtctactggctgtacatgaagaagtcaaagactgcatcaaaacatgtaaacaaggacctcggtaatatggaagaaaacaaaaagttagaagaaaacaatcacaaaactgaagcctaagagagaaactgtcctagttgtccagagataaaaatcatatagaccaattgaagcatgaacgtggattgtatttaagacataaacaaagacattgacagcaattcatggttcaagtattaagcagttcattctaccaagctgtcacaggttttcagagaattatctcaagtaaaacaaatgaaatttaattacaaacaataagaacaagttttggcagccatgataataggtcatatgttgtgtttggttcaattttttttccgtaaatgtctgcactgaggatttctttttggtttgccttttatgtaaattttttacgtagctatttttatacactgtaagctttgttctgggagttgctgttaatctgatgtataatgtaatgtttttatttcaattgtttatatggataatctgagcaggtacatttctgattctgattgctatcagcaatgccccaaactttctcataagcacctaaaacccaaaggtggcagcttgtgaagattggggacactcatattgccctaattaaaaactgtgatttttatcacaagggaggggaggccgagagtcagactgatagacaccataggagccgactctttgatatgccaccagcgaactctcagaaataaatcacagatgcatatagacacacatacataatggtactcccaaactgacaattttacctattctgaaaaagacataaaacagaatttggtagcacttacctctacagacacctgctaataaattattttctgtcaaaagaaaaaacacaagcatgtgtgagagacagtttggaaaaatcatggtcaacattcccattttcatagatcacaatgtaaatcactataattacaaattggtgttaaatcctttgggttatccactgccttaaaattatacctatttcatgtttaaaaagatatcaatcagaattggagtttttaacagtggtcattatcaaagctgtgttattttccacagaatatagaatatatatttttttcgtgtgtgtttttgttaactaccctacagatattgaatgcaccttgagataatttagtgtttttaactgatacataatttatcaagcagtacatgaaagtgtaataataaaatgtctatgtatctttagttacattcaaatttgtaactttataaacatgttttatgcttgaggaaatttttaaggtggtagtataaatggaaactttttgaagtagaccagatatgggctacttgtgactagacttttaaactttgctctttcaagcagaagcctggtttctgggagaacactgcacagcgatttctttcccaggatttacacaactttaaagggaagataaatgaacatcagatttctaggtatagaactatgttattgaaaggaaaaggaaaactggtgtttgtttcttagactcatgaaataaaaaattatgaaggcaatg

SEQ ID NO: 676 - DNA, 2496 bp, Homo sapiens; identical to SEQ ID NO: 675
  source 1..2496: mol_type = unassigned DNA

SEQ ID NO: 677 - DNA, 4189 bp, Homo sapiens
  source 1..4189: mol_type = unassigned DNA
gcccgggacgacgccccctcctgcggcgtggactccgtcagtggcccaccaagaaggaggaggaatatggaatccaagggggccagttcctgccgtctgctcttctgcctcttgatctccgccaccgtcttcaggccaggccttggatggtatactgtaaattcagcatatggagataccattatcataccttgccgacttgacgtacctcagaatctcatgtttggcaaatggaaatatgaaaagcccgatggctccccagtatttattgccttcagatcctctacaaagaaaagtgtgcagtacgacgatgtaccagaatacaaagacagattgaacctctcagaaaactacactttgtctatcagtaatgcaaggatcagtgatgaaaagagatttgtgtgcatgctagtaactgaggacaacgtgtttgaggcacctacaatagtcaaggtgttcaagcaaccatctaaacctgaaattgtaagcaaagcactgtttctcgaaacagagcagctaaaaaagttgggtgactgcatttcagaagacagttatccagatggcaatatcacatggtacaggaatggaaaagtgctacatccccttgaaggagcggtggtcataatttttaaaaaggaaatggacccagtgactcagctctataccatgacttccaccctggagtacaagacaaccaaggctgacatacaaatgccattcacctgctcggtgacatattatggaccatctggccagaaaacaattcattctgaacaggcagtatttgatatttactatcctacagagcaggtgacaatacaagtgctgccaccaaaaaatgccatcaaagaaggggataacatcactcttaaatgcttagggaatggcaaccctcccccagaggaatttttgttttacttaccaggacagcccgaaggaataagaagctcaaatacttacacactgacggatgtgaggcgcaatgcaacaggagactacaagtgttccctgatagacaaaaaaagcatgattgcttcaacagctatcacagttcactatttggatttgtccttaaacccaagtggagaagtgactagacagattggtgatgccctacccgtgtcatgcacaatatctgctagcaggaatgcaactgtggtatggatgaaagataacatcaggcttcgatctagcccgtcattttctagtcttcattatcaggatgctggaaactatgtctgcgaaactgctctgcaggaggttgaaggactaaagaaaagagagtcattgactctcattgtagaaggcaaacctcaaataaaaatgacaaagaaaactgatcccagtggactatctaaaacaataatctgccatgtggaaggttttccaaagccagccattcaatggacaattactggcagtggaagcgtcataaaccaaacagaggaatctccttatattaatggcaggtattatagtaaaattatcatttcccctgaagagaatgttacattaacttgcacagcagaaaaccaactggagagaacagtaaactccttgaatgtctctgctaatgaaaacagagaaaaggtgaatgaccaggcaaaactaattgtgggaatcgttgttggtctcctccttgctgcccttgttgctggtgtcgtctactggctgtacatgaagaagtcaaagactgcatcaaaacatgtaaacaaggacctcggtaatatggaagaaaacaaaaagttagaagaaaacaatcacaaaactgaagcctaagagagaaactgtcctagttgtccagagataaaaatcatatagaccaattgaagcatgaacgtggattgtatttaagacataaacaaagacattgacagcaattcatggttcaagtattaagcagttcattctaccaagctgtcacaggttttcagagaattatctcaagtaaaacaaatgaaatttaattacaaacaataagaacaagttttggcagccatgataataggtcatatgttgtgtttggttcaattttttttccgtaaatgtctgcactgaggatttctttttggtttgccttttatgtaaattttttacgtagctatttttatacactgtaagctttgttctgggagttgctgttaatctgatgtataatgtaatgtttttatttcaattgtttatatggataatctgagcaggtacatttctgattctgattgctatcagcaatgccccaaactttctcataagcacctaaaacccaaaggtggcagcttgtgaagattggggacactcatattgccctaattaaaaactgtgatttttatcacaagggaggggaggccgagagtcagactgatagacaccataggagccgactctttgatatgccaccagcgaactctcagaaataaatcacagatgcatatagacacacatacataatggtactcccaaactgacaattttacctattctgaaaaagacataaaacagaatttggtagcacttacctctacagacacctgctaataaattattttctgtcaaaagaaaaaacacaagcatgtgtgagagacagtttggaaaaatcatggtcaacattcccattttcatagatcacaatgtaaatcactataattacaaattggtgttaaatcctttgggttatccactgccttaaaattatacctatttcatgtttaaaaagatatcaatcagaattggagtttttaacagtggtcattatcaaagctgtgttattttccacagaatatagaatatatatttttttcgtgtgtgtttttgttaactaccctacagatattgaatgcaccttgagataatttagtgtttttaactgatacataatttatcaagcagtacatgaaagtgtaataataaaatgtctatgtatctttagttacattcaaatttgtaactttataaacatgttttatgcttgaggaaatttttaaggtggtagtataaatggaaactttttgaagtagaccagatatgggctacttgtgactagacttttaaactttgctctttcaagcagaagcctggtttctgggagaacactgcacagcgatttctttcccaggatttacacaactttaaagggaagataaatgaacatcagatttctaggtatagaactatgttattgaaaggaaaaggaaaactggtgtttgtttcttagactcatgaaataaaaaattatgaaggcaatgaaaaataaattgaaaattaaagtcagatgagaataggaataatactttgccacttctgcattatttagaaacatacgttattgtacatttgtaaaccatttactgtctgggcaatagtgactccgtttaataaaagcttccgtagtgcattggtatggattaaatgcataaaatattcttagactcgatgctgtataaaatattatgggaaaaaaagaaaatacgttattttgcctctaaacttttattgaagttttatttggcaggaaaaaaaattgaatcttggtcaacatttaaaccaaagtaaaaggggaaaaaccaaagttatttgttttgcatggctaagccattctgttatctctgtaaatactgtgatttcttttttattttctctttagaattttgttaaagaaattctaaaatttttaaacacctgctctccacaataaatcacaaacactaaaataaaattacttccatataaatattattttctcttttggtgtgggagatcaaaggtttaaagtctaacttctaagatatatttgcagaaagaagcaacatgacaatagagagagttatgctacaattatttcttggtttccacttgcaatggttaattaagtccaaaaacagctgtcagaacctcgagagcagaacatgagaaactcagagctctggaccgaaagcagaaagtttgccgggaaaaaaaaagacaacattattaccatcgattcagtgcctggataaagaggaaagcttacttgtttaatggcagccacatgcacgaagatgctaagaagaaaaagaattccaaatcctcaacttttgaggtttcggctctccaatttaactctttggcaacaggaaacaggttttgcaagttcaaggttcactccctatatgtgattataggaattgtttgtggaaatggattaacatacccg

SEQ ID NO: 678 - DNA, 1501 bp, Homo sapiens
  source 1..1501: mol_type = unassigned DNA
ctttctaccctcaatgccgagcacagaacctggggcagtgtttccactgtgcttccagtcccgagcatttcggatgaatgaatgatgaacaaacgacagaacgcagggcgagcagctcagcaaaggtcatgcaggagatagagaagcgctgtgtcatgagtattggatcattatggatttttttctttctcattgtgcagatctattcgcacaactctatcttcaaccagtttgccaggcccaccggaggtgcccagtaaaattttgtcaaacaaatactgatgatgaagtatcctgggacttggccctgtcagggcataattggaatatcatttggagaaagtgtcatggaagttctgcgtccacagcttataagaattgatggccggaattacaggaagaatccagtccaagaacagacctatcaacatgaagaagatgaagaggacttctatcaaggctccatggagtgtgctgatgagccctgtgatgcctacgaggtggagcagaccccacaaggattccggtctactttgagggcccccagcttgctctataagcatatagttggaaagagaggggacactaggaagaaaatagaaatggagaccaaaacttctattagcattcctaaacctggacaagacggggaaattgtaatcactggccagcatcgaaatggtgtaatttcagcccgaacacggattgatgttcttttggacacttttcgaagaaagcagcccttcactcacttccttgcctttttcctcaatgaagttgaggttcaggaaggattcctgagattccaggaggaagtactggcgaagtgctccatggatcatggggttgacagcagcattttccagaatcctaaaaagcttcatctaactattgggatgttggtgcttttgagtgaggaagagatccagcagacatgtgagatgctacagcagtgtaaagaggaattcattaatgatatttctgggggtaaacccctagaagtggagatggcagggatagaatacatgaatgatgatcctggcatggtggatgttctttacgccaaagtccatatgaaagatggctccaacaggctacaagaattagttgatcgagtgctggaacgttttcaggcatctggactaatagtgaaagagtggaatagtgtgaaactgcatgctacagttatgaatacactattcaggaaagaccccaatgctgaaggcaggtacaatctctacacagcggaaggcaaatatatcttcaaggaaagagaatcatttgatggccgaaatattttaaagttgtttgagaacttctactttggctccctaaagctgaattcaattcacatctctcagaggttcaccgtagacagctttggaaactacgcttcctgtggacaaattgacttctcctgaggtggatcttggaaagcactagaaactaaacatcttcaccaggtgctgaagaaaagtgtcttcgttttaattgccaagca

SEQ ID NO: 679 - DNA, 2002 bp, Homo sapiens
  source 1..2002: mol_type = unassigned DNA
ctggggaaatttcctatcgcacgtctgctgcagcagtctcctgtttctcctcctaccttctccatttttctagtccctgcagggcataattggaatatcatttggagaaagtgtcatggaagttctgcgtccacagcttataagaattgatggccggaattacaggaagaatccagtccaagaacagacctatcaacatgaagaagatgaagaggacttctatcaaggctccatggagtgtgctgatgagccctgtgatgcctacgaggtggagcagaccccacaaggattccggtctactttgagggcccccagcttgctctataagcatatagttggaaagagaggggacactaggaagaaaatagaaatggagaccaaaacttctattagcattcctaaacctggacaagacggggaaattgtaatcactggccagcatcgaaatggtgtaatttcagcccgaacacggattgatgttcttttggacacttttcgaagaaagcagcccttcactcacttccttgcctttttcctcaatgaagttgaggttcaggaaggattcctgagattccaggaggaagtactggcgaagtgctccatggatcatggggttgacagcagcattttccagaatcctaaaaagcttcatctaactattgggatgttggtgcttttgagtgaggaagagatccagcagacatgtgagatgctacagcagtgtaaagaggaattcattaatgatatttctgggggtaaacccctagaagtggagatggcagggatagaatacatgaatgatgatcctggcatggtggatgttctttacgccaaagtccatatgaaagatggctccaacaggctacaagaattagttgatcgagtgctggaacgttttcaggcatctggactaatagtgaaagagtggaatagtgtgaaactgcatgctacagttatgaatacactattcaggaaagaccccaatgctgaaggcaggtacaatctctacacagcggaaggcaaatatatcttcaaggaaagagaatcatttgatggccgaaatattttaaagttgtttgagaacttctactttggctccctaaagctgaattcaattcacatctctcagaggttcaccgtagacagctttggaaactacgcttcctgtggacaaattgacttctcctgaggtggatcttggaaagcactagaaactaaacatcttcaccaggtgctgaagaaaagtgtcttcgttttaattgccaagcagggatgtggacatttggatggtgactttcctgggtggttccccatagattcaccattgcctctaatggtgtctacacccgtcatactaccagctgagatggtggtgggcataaggagaatttgtgcctataacccttagtgtgttctggttttttttcttttaatttttaaattgtcgtaaaatactcataaaacatactgtcttcaccatttttaagtgcacagttcagtaacgttaactgttaatacattcataatgctgtgtggccgtcaccgccgtccatctccataggcttctcagcttgtaaaatggaaactgtacccattaaacagtaattcccactcctcccagcccccgcagccaccattctgctttctgtctctctggttttgactattctcagtatctcatataagtggaatcatacagtgacttgtctttttgtgactggcttatttcacttagcataatgtcctcaaggttcatccatgttgtgtcaggtgacaggatttccttcctgtattatacatataatggaatgttccgttacatgtgcgtaccacactctgttcctccatcagtgaacacttggcttgcttcctcttgactattgggagtagtgctaatacagacacgggggtgcaaatatctctttgagactctgcctttaattcctttaccacccagagttttatctttagcaaaataaccattaaagttgtttgcctttta

SEQ ID NO: 680 - DNA, 2270 bp, Homo sapiens
  source 1..2270: mol_type = unassigned DNA
ctatcgcacgtctgctgcagcagtctcctgtttctcctcctaccttctccatttttctagtccctgcagggcataattggaatatcatttggagaaagtgtcatggaagttctgcgtccacagcttataagaattgatggccggaattacaggaagaatccagtccaagaacagacctatcaacatgaagaagatgaagaggacttctatcaaggctccatggagtgtgctgatgagccctgtgatgcctacgaggtggagcagaccccacaaggattccggtctactttgagggcccccagcttgctctataatctcattcacttgaacacatcaaacgactgtgggttccagaagataactttggattgtcagaatatttatacttggaagtccaggcatatagttggaaagagaggggacactaggaagaaaatagaaatggagaccaaaacttctattagcattcctaaacctggacaagacggggaaattgtaatcactggccagcatcgaaatggtgtaatttcagcccgaacacggattgatgttcttttggacacttttcgaagaaagcagcccttcactcacttccttgcctttttcctcaatgaagttgaggttcaggaaggattcctgagattccaggaggaagtactggcgaagtgctccatggatcatggggttgacagcagcattttccagaatcctaaaaagcttcatctaactattgggatgttggtgcttttgagtgaggaagagatccagcagacatgtgagatgctacagcagtgtaaagaggaattcattaatgatatttctgggggtaaacccctagaagtggagatggcagggatagaatacatgaatgatgatcctggcatggtggatgttctttacgccaaagtccatatgaaagatggctccaacaggctacaagaattagttgatcgagtgctggaacgttttcaggcatctggactaatagtgaaagagtggaatagtgtgaaactgcatgctacagttatgaatacactattcaggaaagaccccaatgctgaaggcaggtacaatctctacacagcggaaggcaaatatatcttcaaggaaagagaatcatttgatggccgaaatattttaaagagctttgccttgttgcccaggctggagtacaatgatgcaatctccgctcactgcaacctgtgcctcccgggttcaagtgattctcctgcctcagcctcccaagtagctgggattacaggtgtctctgatgcatattctcagagcctaccaggaaaatcctagaatcgagaagggcttgggacacagagagctagtggttgtttgagaacttctactttggctccctaaagctgaattcaattcacatctctcagaggttcaccgtagacagctttggaaactacgcttcctgtggacaaattgacttctcctgaggtggatcttggaaagcactagaaactaaacatcttcaccaggtgctgaagaaaagtgtcttcgttttaattgccaagcagggatgtggacatttggatggtgactttcctgggtggttccccatagattcaccattgcctctaatggtgtctacacccgtcatactaccagctgagatggtggtgggcataaggagaatttgtgcctataacccttagtgtgttctggttttttttcttttaatttttaaattgtcgtaaaatactcataaaacatactgtcttcaccatttttaagtgcacagttcagtaacgttaactgttaatacattcataatgctgtgtggccgtcaccgccgtccatctccataggcttctcagcttgtaaaatggaaactgtacccattaaacagtaattcccactcctcccagcccccgcagccaccattctgctttctgtctctctggttttgactattctcagtatctcatataagtggaatcatacagtgacttgtctttttgtgactggcttatttcacttagcataatgtcctcaaggttcatccatgttgtgtcaggtgacaggatttccttcctgtattatacatataatggaatgttccgttacatgtgcgtaccacactctgttcctccatcagtgaacacttggcttgcttcctcttgactattgggagtagtgctaatacagacacgggggtgcaaatatctctttgagactctgcctttaattcctttaccacccagagttttatctttagcaaaataaccattaaagttgtttgcctttta

SEQ ID NO: 681 - DNA, 2308 bp, Homo sapiens
  source 1..2308: mol_type = unassigned DNA
gagacggagtttccctcttgttgcccaggctggaaatggcgcgatctcggctcacagcaacctctgcctcccggatttaagcgattctcctgcttcagcctcccgagtagctgggattacaggcatgcaccaccatgcctggctaattttgtatttctagtagagatggggtttctccatgttggtcaggctggtcttgaactcccgacctcaggtgatccacctgccttggcctcccaaagtgctgggattacaggcgtgagccactgcacctgcagccgcctagtcctcttctccttctctttgatgattcagggcctcggcttccctcacgatattgcagaaagacacagctttcctcttcctctccaaaccacctcgaagcaggggcataattggaatatcatttggagaaagtgtcatggaagttctgcgtccacagcttataagaattgatggccggaattacaggaagaatccagtccaagaacagacctatcaacatgaagaagatgaagaggacttctatcaaggctccatggagtgtgctgatgagccctgtgatgcctacgaggtggagcagaccccacaaggattccggtctactttgagggcccccagcttgctctataagcatatagttggaaagagaggggacactaggaagaaaatagaaatggagaccaaaacttctattagcattcctaaacctggacaagacggggaaattgtaatcactggccagcatcgaaatggtgtaatttcagcccgaacacggattgatgttcttttggacacttttcgaagaaagcagcccttcactcacttccttgcctttttcctcaatgaagttgaggttcaggaaggattcctgagattccaggaggaagtactggcgaagtgctccatggatcatggggttgacagcagcattttccagaatcctaaaaagcttcatctaactattgggatgttggtgcttttgagtgaggaagagatccagcagacatgtgagatgctacagcagtgtaaagaggaattcattaatgatatttctgggggtaaacccctagaagtggagatggcagggatagaatacatgaatgatgatcctggcatggtggatgttctttacgccaaagtccatatgaaagatggctccaacaggctacaagaattagttgatcgagtgctggaacgttttcaggcatctggactaatagtgaaagagtggaatagtgtgaaactgcatgctacagttatgaatacactattcaggaaagaccccaatgctgaaggcaggtacaatctctacacagcggaaggcaaatatatcttcaaggaaagagaatcatttgatggccgaaatattttaaagttgtttgagaacttctactttggctccctaaagctgaattcaattcacatctctcagaggttcaccgtagacagctttggaaactacgcttcctgtggacaaattgacttctcctgaggtggatcttggaaagcactagaaactaaacatcttcaccaggtgctgaagaaaagtgtcttcgttttaattgccaagcagggatgtggacatttggatggtgactttcctgggtggttccccatagattcaccattgcctctaatggtgtctacacccgtcatactaccagctgagatggtggtgggcataaggagaatttgtgcctataacccttagtgtgttctggttttttttcttttaatttttaaattgtcgtaaaatactcataaaacatactgtcttcaccatttttaagtgcacagttcagtaacgttaactgttaatacattcataatgctgtgtggccgtcaccgccgtccatctccataggcttctcagcttgtaaaatggaaactgtacccattaaacagtaattcccactcctcccagcccccgcagccaccattctgctttctgtctctctggttttgactattctcagtatctcatataagtggaatcatacagtgacttgtctttttgtgactggcttatttcacttagcataatgtcctcaaggttcatccatgttgtgtcaggtgacaggatttccttcctgtattatacatataatggaatgttccgttacatgtgcgtaccacactctgttcctccatcagtgaacacttggcttgcttcctcttgactattgggagtagtgctaatacagacacgggggtgcaaatatctctttgagactctgcctttaattcctttaccacccagagttttatctttagcaaaataaccattaaagttgtttgcctttta

SEQ ID NO: 682 - DNA, 1311 bp, Homo sapiens
  source 1..1311: mol_type = unassigned DNA
aatttcctatcgcacgtctgctgcagcagtctcctgtttctcctcctaccttctccatttttctagtccctgcagggcataattggaatatcatttggagaaagtgtcatggaagttctgcgtccacagcttataagaattgatggccggaattacaggaagaatccagtccaagaacagacctatcaacatgaagaagatgaagaggacttctatcaaggctccatggagtgtgctgatgagccctgtgatgcctacgaggtggagcagaccccacaaggattccggtctactttgagggcccccagcttgctctataatctcattcacttgaacacatcaaacgactgtgggttccagaagataactttggattgtcagaatatttatacttggaagtccaggcatatagttggaaagagaggggacactaggaagaaaatagaaatggagaccaaaacttctattagcattcctaaacctggacaagacggggaaattgtaatcactggccagcatcgaaatggtgtaatttcagcccgaacacggattgatgttcttttggacacttttcgaagaaagcagcccttcactcacttccttgcctttttcctcaatgaagttgaggttcaggaaggattcctgagattccaggaggaagtactggcgaagtgctccatggatcatggggttgacagcagcattttccagaatcctaaaaagcttcatctaactattgggatgttggtgcttttgagtgaggaagagatccagcagacatgtgagatgctacagcagtgtaaagaggaattcattaatgatatttctgggggtaaacccctagaagtggagatggcagggatagaatacatgaatgatgatcctggcatggtggatgttctttacgccaaagtccatatgaaagatggctccaacaggctacaagaattagttgatcgagtgctggaacgttttcaggcatctggactaatagtgaaagagtggaatagtgtgaaactgcatgctacagttatgaatacactattcaggaaagaccccaatgctgaaggcaggtacaatctctacacagcggaaggcaaatatatcttcaaggaaagagaatcatttgatggccgaaatattttaaagagctttgccttgttgcccaggctggagtacaatgatgcaatctccgctcactgcaacctgtgcctcccgggttcaagtgattctcctgcctcagcctcccaagtagctgggattacaggtgtctctgatgcatattctcagagcctaccaggaaaatcctag

SEQ ID NO: 683 - DNA, 2076 bp, Homo sapiens
  source 1..2076: mol_type = unassigned DNA
ggaattccgggtcctcctcctcgccctaccttggtttacctgcagccgcctagtcctcttctccttctctttgatgattcagggcctcggcttccctcacgatattgcagaaagacacagctttcctcttcctctccaaaccacctcgaagcaggggcataattggaatatcatttggagaaagtgtcatggaagttctgcgtccacagcttataagaattgatggccggaattacaggaagaatccagtccaagaacagacctatcaacatgaagaagatgaagaggacttctatcaaggctccatggagtgtgctgatgagccctgtgatgcctacgaggtggagcagaccccacaaggattccggtctactttgagggcccccagcttgctctataagcatatagttggaaagagaggggacactaggaagaaaatagaaatggagaccaaaacttctattagcattcctaaacctggacaagacggggaaattgtaatcactggccagcatcgaaatggtgtaatttcagcccgaacacggattgatgttcttttggacacttttcgaagaaagcagcccttcactcacttccttgcctttttcctcaatgaagttgaggttcaggaaggattcctgagattccaggaggaagtactggcgaagtgctccatggatcatggggttgacagcagcattttccagaatcctaaaaagcttcatctaactattgggatgttggtgcttttgagtgaggaagagatccagcagacatgtgagatgctacagcagtgtaaagaggaattcattaatgatatttctgggggtaaacccctagaagtggagatggcagggatagaatacatgaatgatgatcctggcatggtggatgttctttacgccaaagtccatatgaaagatggctccaacaggctacaagaattagttgatcgagtgctggaacgttttcaggcatctggactaatagtgaaagagtggaatagtgtgaaactgcatgctacagttatgaatacactattcaggaaagaccccaatgctgaaggcaggtacaatctctacacagcggaaggcaaatatatcttcaaggaaagagaatcatttgatggccgaaatattttaaagttgtttgagaacttctactttggctccctaaagctgaattcaattcacatctctcagaggttcaccgtagacagctttggaaactacgcttcctgtggacaaattgacttctcctgaggtggatcttggaaagcactagaaactaaacatcttcaccaggtgctgaagaaaagtgtcttcgttttaattgccaagcagggatgtggacatttggatggtgactttcctgggtggttccccatagattcaccattgcctctaatggtgtctacacccgtcatactaccagctgagatggtggtgggcataaggagaatttgtgcctataacccttagtgtgttctggttttttttcttttaatttttaaattgtcgtaaaatactcataaaacatactgtcttcaccatttttaagtgcacagttcagtaacgttaactgttaatacattcataatgctgtgtggccgtcaccgccgtccatctccataggcttctcagcttgtaaaatggaaactgtacccattaaacagtaattcccactcctcccagcccccgcagccaccattctgctttctgtctctctggttttgactattctcagtatctcatataagtggaatcatacagtgacttgtctttttgtgactggcttatttcacttagcataatgtcctcaaggttcatccatgttgtgtcaggtgacaggatttccttcctgtattatacatataatggaatgttccgttacatgtgcgtaccacactctgttcctccatcagtgaacacttggcttgcttcctcttgactattgggagtagtgctaatacagacacgggggtgcaaatatctctttgagactctgcctttaattcctttaccacccagagttttatctttagcaaaataaccattaaagttgtttgccttttac

SEQ ID NO: 684 - DNA, 1798 bp, Homo sapiens
  source 1..1798: mol_type = unassigned DNA
ctataagcatatagttggaaagagaggggacactaggaagaaaatagaaatggagaccaaaacttctattagcattcctaaacctggacaagacggggaaattgtaatcactggccagcatcgaaatggtgtaatttcagcccgaacacggattgatgttcttttggacacttttcgaagaaagcagcccttcactcacttccttgcctttttcctcaatgaagttgaggttcaggaaggattcctgagattccaggaggaagtactggcgaagtgctccatggatcatggggttgacagcagcattttccagaatcctaaaaagcttcatctaactattgggatgttggtgcttttgagtgaggaagagatccagcagacatgtgagatgctacagcagtgtaaagaggaattcattaatgatatttctgggggtaaacccctagaagtggagatggcagggatagaatacatgaatgatgatcctggcatggtggatgttctttacgccaaagtccatatgaaagatggctccaacaggctacaagaattagttgatcgagtgctggaacgttttcaggcatctggactaatagtgaaagagtggaatagtgtgaaactgcatgctacagttatgaatacactattcaggaaagaccccaatgctgaaggcaggtacaatctctacacagcggaaggcaaatatatcttcaaggaaagagaatcatttgatggccgaaatattttaaagagctttgccttgttgcccaggctggagtacaatgatgcaatctccgctcactgcaacctgtgcctcccgggttcaagtgattctcctgcctcagcctcccaagtagctgggattacagttgtttgagaacttctactttggctccctaaagctgaattcaattcacatctctcagaggttcaccgtagacagctttggaaactacgcttcctgtggacaaattgacttctcctgaggtggatcttggaaagcactagaaactaaacatcttcaccaggtgctgaagaaaagtgtcttcgttttaattgccaagcagggatgtggacatttggatggtgactttcctgggtggttccccatagattcaccattgcctctaatggtgtctacacccgtcatactaccagctgagatggtggtgggcataaggagaatttgtgcctataacccttagtgtgttctggttttttttcttttaatttttaaattgtcgtaaaatactcataaaacatactgtcttcaccatttttaagtgcacagttcagtaacgttaactgttaatacattcataatgctgtgtggccgtcaccgccgtccatctccataggcttctcagcttgtaaaatggaaactgtacccattaaacagtaattcccactcctcccagcccccgcagccaccattctgctttctgtctctctggttttgactattctcagtatctcatataagtggaatcatacagtgacttgtctttttgtgactggcttatttcacttagcataatgtcctcaaggttcatccatgttgtgtcaggtgacaggatttccttcctgtattatacatataatggaatgttccgttacatgtgcgtaccacactctgttcctccatcagtgaacacttggcttgcttcctcttgactattgggagtagtgctaatacagacacgggggtgcaaatatctctttgagactctgcctttaattcctttaccacccagagttttatctttagcaaaataaccattaaagttgtttgcctttt

SEQ ID NO: 685 - DNA, 2823 bp, Homo sapiens
  source 1..2823: mol_type = unassigned DNA
agatgctgcatttgctgtctccgcgacaactgcctgttcttccggagctcgtggtctgagggcccgactttcatcttagtctgtttttgtggggaacattttttttttaagcttttcctttgaaagtcttttttcgttgagaactttagaggcctcggggaataggccactgggttgtgatgtcatcgagtattgctaatgatgtgcccttttcctccatccatgtcggtttaccttctgtgttgttatttctcacgaaacctcttcttggttctgtaagcgcacaactcatcaattattattttatttatttttttgagacgaagtctcgctctgtcgcccaggctggagtgcagtggcgcgatctcagctcactgcaacctccgcctctcaggcttaagccattctcgtgcctcagctttcccagtagttgggactacaggcgcccgccaccacacccggctactttctgtattttcagtagagacggggtttcatcatgttggcctggctggtctcgaactcctggcctcagatgatccgcctcggcctcctaaagtgctgggattacagacgtgagccaccgcgcccacgttggcttgaacattagtgtatttagtaaggatcaacttgttttctttggaacttttaagtattttgggcttcaagactatctaagctgtacgtggtaggaatattggttgaatttaacctcagctagcctgtaaggaacctttgtttcctaaattattgattcattaagtgatgtgaccagaagcttggcttcgcagtgagcgatgtgcattttgttgggcagtggcctgtggaaattggattccccccttcagcagtatgttggtctgagaaccatattggttaagttgttattttaactgtgctttaacagacaactggaactgattgtttggtatgaatttctagcacctctaaaagtacttaggggcttttttttttctggatggttaagtgtattaaatatccctcattgtcttaattatcttgctagataggcatatagttggaaagagaggggacactaggaagaaaatagaaatggagaccaaaacttctattagcattcctaaacctggacaagacggggaaattgtaatcactggccagcatcgaaatggtgtaatttcagcccgaacacggattgatgttcttttggacacttttcgaagaaagcagcccttcactcacttccttgcctttttcctcaatgaagttgaggttcaggaaggattcctgagattccaggaggaagtactggcgaagtgctccatggatcatggggttgacagcagcattttccagaatcctaaaaagcttcatctaactattgggatgttggtgcttttgagtgaggaagagatccagcagacatgtgagatgctacagcagtgtaaagaggaattcattaatgatatttctgggggtaaacccctagaagtggagatggcagggatagaatacatgaatgatgatcctggcatggtggatgttctttacgccaaagtccatatgaaagatggctccaacaggctacaagaattagttgatcgagtgctggaacgttttcaggcatctggactaatagtgaaagagtggaatagtgtgaaactgcatgctacagttatgaatacactattcaggaaagaccccaatgctgaaggcaggtacaatctctacacagcggaaggcaaatatatcttcaaggaaagagaatcatttgatggccgaaatattttaaagagctttgccttgttgcccaggctggagtacaatgatgcaatctccgctcactgcaacctgtgcctcccgggttcaagtgattctcctgcctcagcctcccaagtagctgggattacagttgtttgagaacttctactttggctccctaaagctgaattcaattcacatctctcagaggttcaccgtagacagctttggaaactacgcttcctgtggacaaattgacttctcctgaggtggatcttggaaagcactagaaactaaacatcttcaccaggtgctgaagaaaagtgtcttcgttttaattgccaagcagggatgtggacatttggatggtgactttcctgggtggttccccatagattcaccattgcctctaatggtgtctacacccgtcatactaccagctgagatggtggtgggcataaggagaatttgtgcctataacccttagtgtgttctggttttttttcttttaatttttaaattgtcgtaaaatactcataaaacatactgtcttcaccatttttaagtgcacagttcagtaacgttaactgttaatacattcataatgctgtgtggccgtcaccgccgtccatctccataggcttctcagcttgtaaaatggaaactgtacccattaaacagtaattcccactcctcccagcccccgcagccaccattctgctttctgtctctctggttttgactattctcagtatctcatataagtggaatcatacagtgacttgtctttttgtgactggcttatttcacttagcataatgtcctcaaggttcatccatgttgtgtcaggtgacaggatttccttcctgtattatacatataatggaatgttccgttacatgtgcgtaccacactctgttcctccatcagtgaacacttggcttgcttcctcttgactattgggagtagtgctaatacagacacgggggtgcaaatatctctttgagactctgcctttaattcctttaccacccagagttttatctttagcaaaataaccattaaagttgtttgcctttt

SEQ ID NO: 686 - DNA, 581 bp, Homo sapiens
  source 1..581: mol_type = unassigned DNA
atgcgcactcggtcaaacccggcctggggaaatttcctatcgcacgtctgctgcagcagtctcctgtttctcctcctaccttctccatttttctagtccctgcagggcctcggcttccctcacgatattgcagaaagacacagctttcctcttcctctccaaaccacctcgaagcaggggcataattggaatatcatttggagaaagtgtcatggaagttctgcgtccacagcttataagaattgatggccggaattacaggaagaatccagtccaagaacagacctatcaacatgaagaagatgaagaggacttctatcaaggctccatggagtgtgctgatgagccctgtgatgcctacgaggtggagcagaccccacaaggattccggtctactttgagggcccccagcttgctctataagcatatagttggaaagagaggggacactaggaagaaaatagaaatggagaccaaaacttctattagcattcctaaacctggacaagacggggaaattgtaatcactggccagcatcgaaatggtgtaatttcagcccgaacacggattgatgttcttt

SEQ ID NO: 687 - DNA, 540 bp, Homo sapiens
  source 1..540: mol_type = unassigned DNA
gacgcgaggaggggagcagagaacgcgctcgcgtagaggaattccgggtcctcctcctcgccctaccttggtttacctgcagccgcctagtcctcttctccttctctttgatgattcagggcctcggcttccctcacgatattgcagaaagacacagctttcctcttcctctccaaaccacctcgaagcagggttaaggcataattggaatatcatttggagaaagtgtcatggaagttctgcgtccacagcttataagaattgatggccggaattacaggaagaatccagtccaagaacagacctatcaacatgaagaagatgaagaggacttctatcaaggctccatggagtgtgctgatgagccctgtgatgcctacgaggtggagcagaccccacaaggattccggtctactttgagggcccccagcttgctctataagcatatagttggaaagagaggggacactaggaagaaaatagaaatggagaccaaaacttctattagcattcctaaacctggacaagacggggaaattg

SEQ ID NO: 688 - DNA, 580 bp, Homo sapiens
  source 1..580: mol_type = unassigned DNA
cctatcgcacgtctgctgcagcagtctcctgtttctcctcctaccttctccatttttctagtccctgcagatggtaattatatttttcagggcataattggaatatcatttggagaaagtgtcatggaagttctgcgtccacagcttataagaattgatggccggaattacaggaagaatccagtccaagaacagacctatcaacatgaagaagatgaagaggacttctatcaaggctccatggagtgtgctgatgagccctgtgatgcctacgaggtggagcagaccccacaaggattccggtctactttgagggcccccagcttgctctataagcatatagttggaaagagaggggacactaggaagaaaatagaaatggagaccaaaacttctattagcattcctaaacctggacaagacggggaaattgtaatcactggccagcatcgaaatggtgtaatttcagcccgaacacggattgatgttcttttggacacttttcgaagaaagcagcccttcactcacttccttgcctttttcctcaatgaagttgaggttcaggaaggattcctgagat

SEQ ID NO: 689 - DNA, 599 bp, Homo sapiens
  source 1..599: mol_type = unassigned DNA
ctatcgcacgtctgctgcagcagtctcctgtttctcctcctaccttctccatttttctagtccctgcagccccacccccaggaccagcctgagtggctgcgctcaccacgacgaggaccgcggcgtgttcgccccccaacagacggagccagcggcgaaggcggcgtgcgcgcgcccgtgccgtggtgggcgtggccggggcggagacgcgaggaggggagcagagaacgcgctcgcgtagaggaattccgggtcctcctcctcgccctaccttggtttacctgcagccgcctagtcctcttctccttctctttgatgattcagggcctcggcttccctcacgatattgcagaaagacacagctttcctcttcctctccaaaccacctcgaagcaggggcataattggaatatcatttggagaaagtgtcatggaagttctgcgtccacagcttataagaattgatggccggaattacaggaagaatccagtccaagaacagacctatcaacatgaagaagatgaagaggacttctatcaaggctccatggagtgtgctgatgagccctgtgatgcctacgaggtggagcagaccccac

SEQ ID NO: 690 - DNA, 1501 bp, Homo sapiens; identical to SEQ ID NO: 678
  source 1..1501: mol_type = unassigned DNA

SEQ ID NO: 691 - DNA, 2793 bp, Homo sapiens
  source 1..2793: mol_type = unassigned DNA
agtttgaccccggaagtgcgggcgctcagggagctgtcaccgtggtcggcggcggcggcggcggcggcggcacagagccggtggtggagccgccgaggagggtcacgcagcacaatgccagctctgcccctggaccaactccagatcacccacaaggacccgaagacaggaaagctgaggacttcaccagcgctgcaccccgagcagaaggcagaccggtattttgtgttatacaaaccgccccctaaagacaacattcccgccctagtggaggagtacctggaacgcgccaccttcgtagccaatgacctcgactggctcctggccttgcctcacgataaattctggtgccaggtgatctttgacgagactctacagaagtgcctggactcctacctgcgctatgtcccccgcaaattcgacgagggggtggcctcagcccctgaggttgttgacatgcagaagcgcctccatcgaagtgtttttctcaccttcctccgcatgtccactcacaaggaatccaaagatcacttcatttccccttctgcgtttggagaaatcctctacaataacttcctctttgacattccaaagatcctggacctctgcgtgctctttggaaaaggcaactcaccactgctccagaagatgataggaaacatctttacacagcagccaagttactacagtgacctggatgaaaccctgcctaccatccttcaggtcttcagcaatatcctccagcactgtggtttgcaaggggacggggccaataccacaccccagaagcttgaggagaggggccgattgacccccagtgacatgcctctcctggaattaaaggacattgttctctacctttgtgatacctgcaccacactttgggcctttctggatatcttccctttggcttgccagaccttccagaagcacgacttttgttacagactagcttccttctacgaagcagcaattcccgaaatggagtctgcaattaagaagaggaggcttgaagatagcaagcttcttggtgacctgtggcagaggctctcccattccaggaagaagctaatggagattttccacatcatcctgaaccagatctgcctccttcccatcctagaaagcagctgtgacaacattcagggcttcatcgaagagttccttcagatcttcagctccttgctgcaggagaagaggttcctccgggactatgatgcactcttccccgtggccgaagacatcagcttgctgcagcaggcctcatcagtcttggacgagacgcggactgcctacatcctccaggcagtcgagagtgcatgggaaggggtggacagacggaaagccacagatgctaaagacccatcggtgattgaggagcctaatggggagcctaacggggtcacggtgacagcagaggcagtcagtcaagcatcatcacatccggagaactcggaggaagaggagtgcatgggagcagccgcggctgtgggccctgccatgtgtggggtggaactggactctctcatctcccaagtgaaggacctgctgccagaccttggtgagggcttcatcctggcctgcctggagtactaccactacgacccagagcaggtgatcaacaatatcctggaggagcggctggcccccaccctcagccagctggaccgcaacctagacagagaaatgaaaccagaccctacacccctgctgacgtctcgccacaacgtcttccagaatgacgagtttgatgtgttcagcagggactcagtagacctgagccgggtgcacaagggcaagagcaccaggaaggaggaaaacacgcggagtttgctgaacgacaagcgtgcagtggcggcacagcggcagcgctacgagcagtacagcgtggtggtggaggaggtgccactgcagccaggcgagagcctgccctaccacagtgtctactacgaggatgagtacgatgacacatacgatggcaaccaggtgggcgccaatgatgcagactctgatgacgagctcatcagccgcaggccattcaccatccctcaggtgctgagaaccaaagtgcctagagaagggcaggaggaggatgacgacgatgaggaagacgatgctgacgaggaggctcccaagcccgaccattttgttcaggaccctgcagtgctgagagagaaggcagaagccaggcgcatggcctttctcgccaagaaagggtaccggcatgacagctcaacagcagtggccggcagcccccgaggccatgggcagagccgcgagacaacccaggaacgcaggaagaaggaagccaacaaggcgacaagagccaaccacaaccggagaaccatggccgaccgcaagaggagcaaaggcatgatcccatcctgagacctggtgcagggccagtggggaggcagcggcaccagactcaccaggccgtgctcccatcgcctggggcctcctcactaggggccccaagttcaactcaacccctcaacagcctcagctttgcagcccctgagaaggccgcctctcatctaccagccagccatgagcgccttcctgcagaacacacagtgccttatgccacagccgaagaatccgtggggccggcaagcaggcaccttcccccagctgcgctagcgggaaagagatggggatggagtcccaaggcaagcgccccaaacctcgggccacaagacaccacttcccctttaccctggacagcaggaaacctgtatattcaaaaacacaaaaagtcctgctaataaaatttttgaccctttcaaacga

SEQ ID NO: 692 - DNA, 2823 bp, Homo sapiens
  source 1..2823: mol_type = unassigned DNA
gcagtttgaccccggaagtgcgggcgctcagggagctgtcaccgtggtcggcggcggcggcggcggcggcggcacagagccggtggtggagccgccgaggccacctcgtgtatgcagagaccatgtgtgtctgatctgctgggatcctagagctggaacaggagggtcacgcagcacaatgccagctctgcccctggaccaactccagatcacccacaaggacccgaagacaggaaagctgaggacttcaccagcgctgcaccccgagcagaaggcagaccggtattttgtgttatacaaaccgccccctaaagacaacattcccgccctagtggaggagtacctggaacgcgccaccttcgtagccaatgacctcgactggctcctggccttgcctcacgataaattctggtgccaggtgatctttgacgagactctacagaagtgcctggactcctacctgcgctatgtcccccgcaaattcgacgagggggtggcctcagcccctgaggttgttgacatgcagaagcgcctccatcgaagtgtttttctcaccttcctccgcatgtccactcacaaggaatccaaagatcacttcatttccccttctgcgtttggagaaatcctctacaataacttcctctttgacattccaaagatcctggacctctgcgtgctctttggaaaaggcaactcaccactgctccagaagatgataggaaacatctttacacagcagccaagttactacagtgacctggatgaaaccctgcctaccatccttcaggtcttcagcaatatcctccagcactgtggtttgcaaggggacggggccaataccacaccccagaagcttgaggagaggggccgattgacccccagtgacatgcctctcctggaattaaaggacattgttctctacctttgtgatacctgcaccacactttgggcctttctggatatcttccctttggcttgccagaccttccagaagcacgacttttgttacagactagcttccttctacgaagcagcaattcccgaaatggagtctgcaattaagaagaggaggcttgaagatagcaagcttcttggtgacctgtggcagaggctctcccattccaggaagaagctaatggagattttccacatcatcctgaaccagatctgcctccttcccatcctagaaagcagctgtgacaacattcagggcttcatcgaagagttccttcagatcttcagctccttgctgcaggagaagaggttcctccgggactatgatgcactcttccccgtggccgaagacatcagcttgctgcagcaggcctcatcagtcttggacgagacgcggactgcctacatcctccaggcagtcgagagtgcatgggaaggggtggacagacggaaagccacagatgctaaagacccatcggtgattgaggagcctaatggggagcctaacggggtcacggtgacagcagaggcagtcagtcaagcatcatcacatccggagaactcggaggaagaggagtgcatgggagcagccgcggctgtgggccctgccatgtgtggggtggaactggactctctcatctcccaagtgaaggacctgctgccagaccttggtgagggcttcatcctggcctgcctggagtactaccactacgacccagagcaggtgatcaacaatatcctggaggagcggctggcccccaccctcagccagctggaccgcaacctagacagagaaatgaaaccagaccctacacccctgctgacgtctcgccacaacgtcttccagaatgacgagtttgatgtgttcagcagggactcagtagacctgagccgggtgcacaagggcaagagcaccaggaaggaggaaaacacgcggagtttgctgaacgacaagcgtgcagtggcggcacagcggcagcgctacgagcagtacagcgtggtggtggaggaggtgccactgcagccaggcgagagcctgccctaccacagtgtctactacgaggatgagtacgatgacacatacgatggcaaccaggtgggcgccaatgatgcagactctgatgacgagctcatcagccgcaggccattcaccatccctcaggtgctgagaaccaaagtgcctagagaagggcaggaggaggatgacgacgatgaggaagacgatgctgacgaggaggctcccaagcccgaccattttgttcaggaccctgcagtgctgagagagaaggcagaagccaggcgcatggcctttctcgccaagaaagggtaccggcatgacagctcaacagcagtggccggcagcccccgaggccatgggcagagccgcgagacaacccaggaacgcaggaagaaggaagccaacaaggcgacaagagccaaccacaaccggagaaccatggccgaccgcaagaggagcaaaggcatgatcccatcctgagacctggtgcagggccagtggggaggcagcggcaccagactcaccaggccgtgctcccatcgcctggggcctcctcactaggggccccaagttcaactcaacccctcaacagcctcagctttgcagcccctgagaaggccgcctctcatctaccagccagccatgagcgccttcctgcagaacacacagtgccttatgccacagccgaagaatccgtggggccggcaagcaggcaccttcccccagctgcgctagcgggaaagagatggggatggagtcccaaggcaagcgccccaaacctcgggccacaagacaccacttcccctttaccctggacagcaggaaacctgtatattcaaaaacacaaaaag

SEQ ID NO: 693 - DNA, 873 bp, Homo sapiens
  source 1..873: mol_type = unassigned DNA
gccacctcgtgtatgcagagaccatgtgtgtctgatctgctgggatcctagagctggaacaggccaagtgatattgtgaaaagaacactggacagcaagacaggagaccttggatctgccactcactgactgtgaggagggtcacgcagcacaatgccagctctgcccctggaccaactccagatcacccacaaggacccgaagacaggaaagctgaggacttcaccagcgctgcaccccgagcagaaggcagaccggtattttgtgttatacaaaccgccccctaaagacaacattcccgccctagtggaggagtacctggaacgcgccaccttcgtagccaatgacctcgactggctcctggccttgcctcacgataaattctggtgccaggtgatctttgacgagactctacagaagtgcctggactcctacctgcgctatgtcccccgcaaattcgacgagggggtggcctcagcccctgaggttgttgacatgcagaagcgcctccatcgaagtgtttttctcaccttcctccgcatgtccactcacaaggaatccaaagatcacttcatttccccttctgcgtttggagaaatcctctacaataacttcctctttgacattccaaagatcctggacctctgcgtgctctttggaaaaggcaactcaccactgctccagaagatgataggaaacatctttacacagcagccaagttactacagtgacctggatgaaaccctgcctaccatccttcaggtcttcagcaatatcctccagcactgtggtttgcaaggggacggggccaataccacaccccagaagcttgaggagaggggccgattgacccccagtgacatgcctctcctg

SEQ ID NO: 694 - DNA, 2291 bp, Homo sapiens
  source 1..2291: mol_type = unassigned DNA
agtttgaccccggaagtgcgggcgctcagggagctgtcaccgtggtcggcggcggcggcggcggcggcggcacagagccggtggtggagccgccgaggagggtcacgcagcacaatgccagctctgcccctggaccaactccagatcacccacaaggacccgaagacaggaaagctgaggacttcaccagcgctggtgatctttgacgagactctacagaagtgcctggactcctacctgcgctatgtcccccgcaaattcgacgagggggtggcctcagcccctgaggttgttgacatgcagaagcgcctccatcgaagtgtttttctcaccttcctccgcatgtccactcacaaggaatccaaaatcctggacctctgcgtgctctttggaaaaggcaactcaccactgctccagaagatgataggaaacatctttacacagcagccaagttactacagtgacctggatgaaaccctgcctaccatccttcaggtcttcagcaatatcctccagcactgtggtttgcaaggggacggggccaataccacaccccagaagcttgaggagaggggccgattgacccccagtgacatgcctctcctggaattaaaggacattgttctctacctttgtgatacctgcaccacactttgggcctttctggatatcttccctttggcttgccagaccttccagaagcacgacttttgttacagactagcttccttctacgaagcagcaattcccgaaatggagtctgcaattaagaagaggaggcttgaagatagcaagcttcttggtgacctgtggcagaggctctcccattccaggaagaagctaatggagattttccacatcatcctgaaccagatctgcctccttcccatcctagaaagcagctgtgacaacattcagggcttcatcgaagagttccttcagatcttcagctccttgctgcaggagaagaggttcctccgggactatgatgcactcttccccgtggccgaagacatcagcttgctgcagcaggcctcatcagtcttggacgagacgcggactgcctacatcctccaggcagtcgagagtgcatgggaaggggtggacagacggaaagccacagatgctaaagacccatcggtgattgaggagcctaatggggagcctaacggggtcacggtgacagcagaggcagtcagtcaagcatcatcacatccggagaactcggaggaagaggagtgcatgggagcagccgcggctgtgggccctgccatgtgtggggtggaactggactctctcatctcccaagtgaaggacctgctgccagaccttggtgagggcttcatcctggcctgcctggagtactaccactacgacccagagcaggtgatcaacaatatcctggaggagcggctggcccccaccctcagccagctggaccgcaacctagacagagaaatgaaaccagaccctacacccctgctgacgtctcgccacaacgtcttccagaatgacgagtttgatgtgttcagcagggactcagtagacctgagccgggtgcacaagggcaagagcaccaggaaggaggaaaacacgcggagtttgctgaacgacaagcgtgcagtggcggcacagcggcagcgctacgagcagtacagcgtggtggtggaggaggtgccactgcagccaggcgagagcctgccctaccacagtgtctactacgaggatgagtacgatgacacatacgatggcaaccaggtgggcgccaatgatgcagactctgatgacgagctcatcagccgcaggccattcaccatccctcaggtgctgagaaccaaagtgcctagagaagggcaggaggaggatgacgacgatgaggaagacgatgctgacgaggaggctcccaagcccgaccattttgttcaggaccctgcagtgctgagagagaaggcagaagccaggcgcatggcctttctcgccaagaaagggtaccggcatgacagctcaacagcagtggccggcagcccccgaggccatgggcagagccgcgagacaacccaggaacgcaggaagaaggaagccaacaaggcgacaagagccaaccacaaccggagaaccatggccgaccgcaagaggagcaaaggcatgatcccatcctgagacctggtgcagggccagtggggaggcagcggcaccagactcaccaggccgtgctcccatcgcctggggcctcctcactaggggccccaagttcaactcaacccctcaacagcctcagctttgcagcccct

SEQ ID NO: 695 - DNA, 852 bp, Homo sapiens
  source 1..852: mol_type = unassigned DNA
gtaggccggcgccagctccactctgtccctcctcgccgggtctgtgcgtctttgcgtctgtctgtctgactgatggtcctcacacgcggttccctgtgactgggcgcgaccccggcaagcgcggcttggagggcggacggggcgcggcgatacagctgcccgctcgcatctttggccctgcgctcagctcctcacccggcgtgggaagttaaagtaaaaccgaaagggaagaaggcgcggtggcaggagctgacagagtgatgggaaacgcgtgagccaggccgagaggtttcttgctgtatggatcactgattgaataatagatggctttacctcgtctcacaggagccttgcgttccttttcaaatgtcaccaagcaagataattataatgaagaagtggctgacttaaagataaagcgatctaaacttcatgaacaagttttagatttgggcctgacatggaagaagataataaaatttttgaatgaaaaactggagaagagtaaaatgcaaagtataaatgaagacttaaaagatatattacatgctgcaaagcagatagttggaactgataatgggagagaagcaattgaaagtggggctgcatttctcttcatgacatttcacttgaaggactctgttggtcacaaggaaacaaaggctatcaaacagatgtttggcccctttccttcatcatctgccactgcagcttgtaatgctactaatcgaattatttctcattttagtcaagatgatcttactgctcttgtgcagatgacagaaaaagaacatggcgatagggttttttttggtaaaaatttagcattttcatttgacatgcatgatttgg

SEQ ID NO: 696 - DNA, 3433 bp, Homo sapiens
  source 1..3433: mol_type = unassigned DNA
gggtctgtgcgtctttgcgtctgtctgtctgactgatggtcctcacacgcggttccctgtgactgggcgcgaccccggcaagcgcggcttggagggcggacggggcgcggcgatacagctgcccgctcgcatctttggccctgcgctcagctcctcacccggcgtgggaagttaaagtaaaaccgaaagggaagaaggcgcggtggcaggagctgacagagtgatgggaaacgcgtgagccaggccgagagtttcaggtttcttgctgtatggatcactgattgaataatagatggctttacctcgtctcacaggagccttgcgttccttttcaaatgtcaccaagcaagataattataatgaagaagtggctgacttaaagataaagcgatctaaacttcatgaacaagttttagatttgggcctgacatggaagaagataataaaatttttgaatgaaaaactggagaagagtaaaatgcaaagtataaatgaagacttaaaagatatattacatgctgcaaagcagatagaagtgaattgtccattccagaagaggaggctggatggaaaagaggaggatgagaagatgagcagagcttctgacagattcagaggactaagatgacaaaaatgactaaaatggacaaaagaagaaatagaaaatctgaatatttgactattaaaggaatttaatctgtaattaaaaaccttaagtacaaagaaatctatatgctatgatggctttaatggagaatgtcataatgtcatttaaaaaggtatgagagtactattgtagattaaaagaggttaaaggcatataataatcaaaatgtaatgtatgatccttgattgactcttgaatcagaaaaaaattacgtatttttggggccgttggagaaatctgaatatgggctggacatcattaggtaatattagatctcaggtgtgataatgttgtggctatgtaagaggatatcctaaatctcaggagaagcatactgcagtatatatagtggtatctcatgaagattaaaatgtactgtcaaatgtgtcagcaaaagaaatacacatgatgtgtgtgtgtgatcaagtgtttataatgagtggattaataaatatgagaagatagggtgatttgttgtaaagtaataaaggtttaaaaattacatgattcagtagagaaaaagcattttatgaatatctaacattacttatgataaaaaatctcagcaaactaggaatagaaggggattttgttaatctgataagctgtagctataaaaaacttggagaaaacatacttaatgctacaaagttagaagcttccctgaggtacggaattagacacaaatgcctgttaccacttctgtttctcactgtattaaaaatccttgctaacataatatggcaagaaaaagtaagggcataaagactggaaaaaaaaacttttccatttttcacatgactgtacctgtagaaaatgaatttaacaaggttaatataaaaatcaattttatttctacttactagaagcacattaaaaattacacttatctttatgtaacgtaatacattttaccttaaattttaaaattttaatttattttacgtttacaaaagcatcataaacatcaaatacgtaggagtaaatttaacaaaaaataagcaagacttcatggaaaactaaaatattgagagaatttaaagaagatctaaataaacagagggatataccaagaattggaagactcactattataatgatatattttttacccaaattgatctgtagattcagtgctatcccaggcacagtcttatgtttgagggtgtgtgtgtgtgtgtgtgtgtatgtgtgcatgtgtgtgtgtggaaattgacaagggtaatatgaaagttatatggaaattcaaaggcaaagagcagcctggttaactttgaaaaataaaaagggagaacttactctagtagatcttaaaacttattataaagataagtatacagtgtggtgttggtccaagaataggcaaatggactagtatgacagaatatagcccagaaacaaacctacggatagaaatatacttgatttataatgaaggccaaacaatagtgagacaaggctattttttcagtatatggtgctgggtcaactgcatatacagatgaaaaaaagtacctattttacaaataattttaaacagcctacagaattaagcatgatacacaaaacaatacatcttctaaaagatgtaaaagagtgtcttcaggatctttgtatgtgcgaaaatttatcaaacagagaacaaaaagtacaaagggaatgattaagttggactgtagtaaaattaataccttctatttattaagagtaaaaaggcaaaacatggagtgggagaatatagcttcaagatatataaccaaaaagagagcttttatccaggttaaatacgagctcctacaaatcaataaggaaaggacagataatcctatatgaacatgagtaagagctttgaacaaggacttcacaagagatagttgaccagtaaacatgaaaagggcttcagcttcattggtagtcaaggatatgccactgcatgcccattagaatggttaaaatgtaaaagactgacatacctattgttaggatcaagaatgtgaactagaatttttgtctactgctgctagagtttacaattggtacaaccactttgagtaactgtttgacagtgtctactattacctactgtggttggacaagtgaaattttaaatcttaggacataaatatccaataaaaatgcttgtacatacatgtatatcaaaaataggtgcattcattgcaacattatttgtgatagccttaatgtagaaacaacccagttcattgttaaaaagcttaagttgtagtatgtagactgccttatagcagtaacggattacagctatgtataacattgtaagtgaatcttataatgttgacaaaagaagccatacaacacatattatgattccattaatatgaaactgaaaactaggcatgaccagtctctggttttagaagtcaggatagtggctgcttttgaggaaggaggtagtgactaggagtgaatatgagggaggtttctggggagctgataatgttctgattcttgaagtagttaaccagattacacaggtgtgttcgttttttgataattctttgaactgtatgtgtactgtatattttcttgttatattcaataaaaagaattactatgatttttatattacatagattaaataagaagtatttcagattgataagtaacacatgcttgtgtatttatttagcttaaggtttggctatcatggtgagaactcctatgtaccctgctcaggtcctggtaaacagtatcataagtataataaattggtgtttttcattctca

SEQ ID NO: 697 - DNA, 8146 bp, Homo sapiens
  source 1..8146: mol_type = unassigned DNA
agcggggcggtgacgtgtaggccggcgccagctccactctgtccctcctcgccgggtctgtgcgtctttgcgtctgtctgtctgactgatggtcctcacacgcggttccctgtgactgggcgcgaccccggcaagcgcggcttggagggcggacggggcgcggcgatacagctgcccgctcgcatctttggccctgcgctcagctcctcacccggcgtgggaagttaaagtaaaaccgaaagggaagaaggcgcggtggcaggagctgacagagtgatgggaaacgcgtgagccaggccgagagtttcaggtttcttgctgtatggatcactgattgaataatagatggctttacctcgtctcacaggagccttgcgttccttttcaaatgtcaccaagcaagataattataatgaagaagtggctgacttaaagataaagcgatctaaacttcatgaacaagttttagatttgggcctgacatggaagaagataataaaatttttgaatgaaaaactggagaagagtaaaatgcaaagtataaatgaagacttaaaagatatattacatgctgcaaagcagatagttggaactgataatgggagagaagcaattgaaagtggggctgcatttctcttcatgacatttcacttgaaggactctgttggtcacaaggaaacaaaggctatcaaacagatgtttggcccctttccttcatcatctgccactgcagcttgtaatgctactaatcgaattatttctcattttagtcaagatgatcttactgctcttgtgcagatgacagaaaaagaacatggcgatagggttttttttggtaaaaatttagcattttcatttgacatgcatgatttggaccactttgacgaactgccaataaatggtgaaactcagaaaactataagcctagattataagaagtttctgaatgaacatctccaggaggcttgcaccccagaactcaagcctgtggaaaaaacaaatggctcctttttgtggtgtgaagttgaaaagtacctaaattcaactttgaaggaaatgactgaagtgccaagagtagaagatctttgctgtactttatatgatatgcttgcttctattaaaagtggtgatgaacttcaggatgagctatttgaactgctgggacctgaaggacttgaacttattgagaaactcctccagaacagaattacaattgtggatagatttcttaattcttcaaatgatcataggtttcaggctcttcaagacaattgtaaaaaaattttaggagaaaatgctaaacccaattatggttgtcaagtcactattcagtctgaacaagaaaagcagttaatgaaacaatatcgacgtgaagaaaaaagaattgccagacgagaaaaaaaggctggagaagatttagaagtttcagaaggacttatgtgctttgatcctaaggaattgcggatacaaagagaacaggcacttctgaatgctagaagtgttccaattctgagcaggcagagagatgcagacgttgaaaaaatacattatccccatgtgtatgattcccaggctgaagccatgaaaacatcagcatttattgctggtgcaaagatgattttgccagaaggaatccaaagagagaataacaagctttatgaagaagtaaggattccctacagcgaaccaatgccactcagctttgaggaaaagccagtttatatccaagacttagatgagatcggacagctggcttttaaaggaatgaagagactcaatagaatccagtcaatagtgtttgagactgcctacaacaccaatgagaacatgctgatttgtgcccctacaggagctggaaaaaccaacattgcaatgctgacagtcttgcatgaaattcgccaacattttcaacaaggtgttatcaaaaagaatgaatttaagattgtatatgttgctccaatgaaagccttggcagctgaaatgacagattacttcagcagacgtctagagccactaggcatcattgtgaaagaattgactggtgacatgcagttgtccaaaagtgaaattttacgaactcagatgcttgtgaccacaccagaaaaatgggatgtagtgacaagaaagagtgttggggatgtagctctttcccagattgtaaggctccttattcttgatgaagttcatttgctgcatgaagatagaggaccagtattagaaagcatagttgcccgtactttacggcaggtggaatccacacagagtatgataaggattctcggactgtctgcaactttacctaactacctcgatgttgccacatttttacatgttaatccatacattggacttttcttctttgatggccgttttcgaccagtacctcttggacagacatttttggggattaaatgtgcaaataagatgcagcagttgaataacatggatgaagtatgttatgaaaatgttttgaagcaagtaaaggctggacaccaggtgatggtgtttgtacatgctcgaaatgccactgtaagaacagctatgtctctaatagaaagagcaaaaaattgtggccatattcccttcttttttcctacccaaggacatgactatgtacttgcagaaaaacaggtacaaaggtcgagaaataagcaagtacgagaattattcccagatggttttagtattcatcatgcaggaatgcttcggcaggacagaaatttagttgaaaacttgttttctaatgggcatatcaaagtcctagtgtgtacagctacgttagcctggggtgtcaatcttcccgcccatgctgttattattaagggaacacaaatatatgctgcaaaaagaggctcctttgttgaccttggaattttagatgtcatgcagatatttggtcgagctggacgaccacaatttgacaaatttggggaaggaataattataacaacgcatgataaactcagccattacctcactttgctcactcaacgaaacccaattgagagtcagtttctggaaagccttgcagataacctaaatgcagagattgctctgggaacagttactaatgtggaagaagcagtgaagtggataagttacacttatctttatgtacggatgagagcaaatccattagcatatggcatcagtcacaaggcttatcagattgacccaacattaagaaagcatcgagaacagttggtcattgaagttggacgaaaactagacaaagctcagatgattcgttttgaggagcgaactggatatttttcctcaactgatttgggtagaactgccagccattactatattaaatacaacaccattgagacctttaatgaactctttgatgctcacaaaacagaaggtgatatctttgccatagtctccaaagctgaagaatttgatcaaattaaggtcagagaagaggaaatagaggagttagataccttattaagcaatttttgtgaactctccactcctggaggtgtagagaatagttatgggaaaataaacatcttacttcaaacttatatcagccgaggagaaatggacagtttctcccttatatcagattctgcatatgttgcacagaatgcagctagaattgtccgtgctctttttgaaattgctctgaggaaacgttggcctaccatgacctacaggctcctgaatcttagtaaagtcattgacaagaggctttggggttgggctagccctttgagacaattttcaatcctaccaccacacatcctaacaagattagaagaaaaaaagcttactgtggataagctgaaagacatgaggaaagatgaaataggtcacattttacatcatgtgaatattggactgaaggtcaaacaatgtgttcatcagattccttctgttatgatggaagcatccattcagcctatcacaaggactgtcctccgagtgacactcagcatctatgctgatttcacttggaatgatcaggtacatgggacagtaggagaaccttggtggatttgggtagaagatcctacaaatgatcatatttatcattcagagtattttctagctctaaaaaaacaagtcattagtaaagaagcccaactactggtatttacaatccctatttttgagcctttgccttcccaatactacatccgagcagtgtctgatagatggttgggtgctgaggcagtatgtattatcaactttcaacatctaattctaccagagagacatcctcctcatacagaattactggatcttcagcctttaccaatcacagctttgggatgtaaagcatatgaagccctgtacaacttcagccactttaaccctgtacagacacaaatatttcatacattgtatcacacggattgtaatgtcctacttggagcacctactggatcgggaaagactgttgcagctgaattagccattttcagagtcttcaacaaataccctacttcaaaggcggtatatattgcacccctaaaagccctagtacgtgaaagaatggatgattggaaagttagaatagaagaaaaacttggtaaaaaagttattgaactaacaggggatgtgactcctgatatgaaatccattgccaaggctgaccttatcgtcactacgccagagaagtgggatggagtcagcagaagctggcaaaataggaactatgttcagcaagtcactattctcatcatagatgagatccatctgcttggggaggaaagaggccctgttctagaggtcattgtatctcgaacaaattttatctcatcacacacagaaaagcctgttagaatagttggactatctactgcattagctaatgccagagaccttgctgattggctcaatattaagcagatgggcttgtttaacttccgaccatcagtacgcccagttccactggaagttcacattcaaggctttccaggtcaacattactgtcctcgtatggctagtatgaacaagcctgcatttcaggcaattagaagccattctccagccaaacctgttttgatatttgtctcatcaagacgtcaaactcgtcttactgctttggaattgatcgccttcctggctactgaagaagatccaaagcagtggttaaacatggatgaaagagagatggagaacatcattgcaacagtaagagattccaacctcaagctgacccttgctttcgggataggaatgcatcatgctggactacatgagagggaccgaaaaacagtagaggaactatttgtaaactgtaaagttcaggttcttattgctacaagcacattagcctggggtgtaaactttccagctcatttagtaattattaagggaacagaatactatgatggaaaaacaagacgttatgtggattttcccattacagatgtcctccagatgatggggcgtgctgggaggccgcagttcgatgaccaaggcaaagctgtaattctagttcatgacataaagaaagacttttataaaaaatttctttatgaacctttcccagtagaatcaagtttattaggagtgctctctgaccacttaaatgcagagattgctggtggtacaattacatctaagcaagatgcattggattatatcacctggacttactttttccgacgtcttatcatgaatcccagctattacaatttgggtgatgtgagccatgattctgtgaacaagtttctgtcccatctgattgagaagtccctgattgaattggaactttcctactgtattgaaattggagaggataatcgcagcattgaacctctaacttatggccgaattgcctcctattactatttgaagcatcaaacagttaaaatgttcaaggaccgcttgaagcctgaatgcagtactgaagaactgctttcaattctaagtgatgcagaagaatatacagatttgccagtgagacacaatgaagatcatatgaatagtgaactggcaaaatgtcttcccattgaatcaaatcctcattcatttgacagccctcacaccaaagcacatctcctgctacaggcacatctcagccgagccatgctaccctgcccagattatgacactgataccaaaacagtcttggaccaagctctcagagtatgtcaggcaatgctggacgtggctgcaaaccagggctggctggtgactgtcctgaatatcaccaacctgattcagatggtgatccagggtcggtggttaaaggactcttctcttcttacactaccaaacatagaaaaccatcatcttcaccttttcaagaaatggaagccgattatgaagggcccacatgctaggggtcggacctccatcgagtcccttcctgaactgatccatgcctgtggagggaaagaccatgtatttagctccatggtagaaagtgagctacatgctgcaaaaacgaaacaggcatggaatttcttatctcacttgccagtgataaatgttggcataagtgttaaaggctcgtgggatgacttagttgaaggacataatgaactctctgtctcaactctgactgcagacaaacgagatgacaacaaatggatcaaattgcatgctgaccaagagtatgtgcttcaagtgagcttgcagagagtccactttgggttccacaagggaaagccagagagctgtgcagttactcctcgatttcccaaatcaaaagacgaaggatggtttttgatattaggagaagtggataagagagaacttattgctttgaaaagagtaggatatattcgaaatcatcatgttgcttccctttctttttatacccctgaaatacctggaaggtatatctacacattatatttcatgagtgactgctaccttggcctggaccagcagtatgacatctatctcaacgttacacaagcgagtctttctgcacaggtcaacaccaaggtctctgattccctgactgacctggcattaaagtaacttgacctgaacaatccatttgaaaggagtggctaagaattctctctgttcagtcatctagacaaatcgaattacttgatgtttgccttgaaagaatcaacttctaacctcaaccatccaggaaattgacagtggctgcagtattgactccagtgacataaagttaaccacagtggccttttaacaaatgttgccttttataatgttatctttatgagtttcttgatatgtaagatgaaaaagcatttagaataatcttttaatttgtgtatatttgggatgatatttaggagctatcaatcaaattttacatctcacaatgtactgtttacatggatattggctgctttttttaaggaaaaccacattgagatgtgacaagtgttaggacttgtcacagatttctaactctgccgcataaactataaatctgtaaggtggtacacagcgtgtcttgttagcaaaatttatactttgatatgatcacatgtagaagtagcttcaagaatttcttgtagtcataaatgtttaataatatatgatgtaaaattatattatggagcctaatgatgataacaaagaaaacaatatactgatcttagaaaatgtagacatggttaactgggaaataaaatatagagtggcacttcaagacaagctgactcaatgttttcttctgcttcctttaaataatatccccttactcatctgttcttcttttctttcccttctacttcaaggctttatttctattatctttctgacatatttatttacagaagtagagaagtataatctaattcatgttgtagcacttacagatcatatagtacaattatttgtctttatgctctccaggaaaaatctgagacagaaaatttttcacccctatggataggttttcacctgtaataaagaaaatttctctatgtccaaacaaattccttcttgaaaaatactttttcaaactaaaaacttgttaaaattcaatgttcatataatatgcattctagtggaatgaaattctacctttgtgaaataatttcagttttcttagccctaaaatgaattattttaaaacattttccaatgtcattgttacaaatactagaatttaagtgtttctgaaattggaatgtattgcttgtatatatccttttccatgcttaaataaaaaagaagaagaaataaa

SEQ ID NO: 698 - DNA, 2181 bp, Homo sapiens
  source 1..2181: mol_type = unassigned DNA
gaggcggcagccacagttgattatggaagattcccacaagagtaccacgtcagagacagcacctcaacctggttcagcagttcagggagctcacatttctcatattgctcaacaggtatcatctttatcagaaagtgaggagtcccaggactcatccgacagcataggctcctcacagaaagcccacgggatcctagcacggcgcccatcttacagaaaaattttgaaagacttatcttctgaagatacacggggcagaaaaggagacggagaaaattctggagtttctgctgctgtcacttctatgtctgttccaactcccatctatcagactagcagcggacagtacattgccattgccccaaatggagccttacagttggcaagtccaggcacagatggagtacagggacttcagacattaaccatgacaaattcaggcagtactcagcaaggtacaactattcttcagtatgcacagacctctgatggacagcagatacttgtgcccagcaatcaggtggtcgtacaaactgcatcaggagatatgcaaacatatcagatccgaactacaccttcagctacttctctgccacaaactgtggtgatgacatctcctgtgactctcacctctcagacaactaagacagatgacccccaattgaaaagagaaataaggttaatgaaaaacagagaagctgctcgagaatgtcgcagaaagaagaaagaatatgtgaaatgcctggaaaaccgagttgcagtcctggaaaatcaaaataaaactctaatagaagagttaaaaactttgaaggatctttattccaataaaagtgtttgattcctaagaaagaaaatatttttgtggacatgcataaaaattaaatggatttcctagtggagttttataaattaaaaggtcaaaactgaagctttttatttaggcttttccaaatcaaggataaatatcttacgcacgatatctagtgacagaggagaaagtggaaaatgacctcaaggaagctacgggcacaactggaagctttgtagaaattaaacatattcaaggagcaagaaatgaactttcagcagtctaaattttctaaataaccaatagttgccaatctaaaatggcagagaagatgaaatttgataaactgaattttttttaaaaatccatttaccctacaggtttgcatttgtttgctgaaatttacctttttttagttatatatatgtgtgtgtgtgtgtgtaatttctgccaataaattctaaattacaaaggtaagagaaaacctagtacattactaaatatataaagtatatgttctgattatgtatacttgttctagtgtcaagtctttttaagtgggtttttaaaagtttgttattggacttgaatggatttttgagactaggttaattatttttgaggtcttatcctaaaaggcatctaaggtacatgaatggagtatggtgattttataacattttttatcagaatggaaaaagaactgtttaaaagtttgatacttttaaatagttggtttttttgcttactctggtaatgattttctacaaatacataataaattgtttttttgagtctatattctgtatgcagttgaatatccattacttattctgctgtgctttaatagaatggaatgtttacaggcccttaaaatattatttttaaaaaaccttctgaagatacataccaaagtttttccaagaagattttataatcaatttaataatgtaaggtttatcagattctataatagtatagttattaaggcaattttatgttagagactattttgtaatgtagtgagtggtacctttataagaaaagtgactgccaatatatttttatagctgatctttataaattctaatgttgagtttttaatgattattttaaatgtttatatagtttagtaaaatttgcatctcaaagtatcatttttatattatgggacgttttcagattggctaatatttgcattgtaaattttgtatgcagtttatctaaaattcaaaaatactgtcagtacaccagcgtttaacatctatattccaatttgtatacagtttaaaattgtactgcaaaactattgtgtgctcttacacagtatgcatcatattgttgtctgtgaaattaaaggacatttgatagtc

SEQ ID NO: 699 - DNA, 970 bp, Homo sapiens
  source 1..970: mol_type = unassigned DNA
tccgcgcctcggtgcagagctgcgctgcgcccttccagtcgtgcgtctcctcctttccctcgcccccaaataaaaagacgaggtcttgctacattgtccaggatggagaagtaggaattcttaaggatattgttatggagggaaaaaaatcattgattatggaagattcccacaagagtaccacgtcagagacagcacctcaacctggttcagcagttcagggagctcacatttctcatattgctcaacagttgccattgccccaaatggagccttacagttggcaagtccaggcacagatggagtacagggacttcagacattaaccatgacaaattcaggcagtactcagcaaggtacaactattcttcagtatgcacagacctctgatggacagcagatacttgtgcccagcaatcaggtggtcgtacaaactgcatcaggagatatgcaaacatatcagatccgaactacaccttcagctacttctctgccacaaactgtggtgatgacatctcctgtgactctcacctctcagacaactaagacagatgacccccaattgaaaagagaaataaggttaatgaaaaacagagaagctgctcgagaatgtcgcagaaagaagaaagaatatgtgaaatgcctggaaaaccgagttgcagtcctggaaaatcaaaataaaactctaatagaagagttaaaaactttgaaggatctttattccaataaaagtgtttgattcctaagaaagaaaatatttttgtggacatgcataaaaattaaatggatttcctagtggagttttataaattaaaaggtcaaaactgaagctttttatttaggcttttccaaatcaaggataaatatcttacgcacgatatctagtgacagaggagaaagtggaaaatgacctcaaggaagctacgggcacaactggaagctttgtagaaattaaacatattcaaggagc

SEQ ID NO: 700 - DNA, 745 bp, Homo sapiens
  source 1..745: mol_type = unassigned DNA
cccttccagtcgtgcgtctcctcctttccctcgcccccaaataaaagtaaagcccgaaaccgcccgccgcggggtggctttcgcctcagaagccgccctttgcagtcgcaggcgctagctctccgtgggaggtctcgagttgattatggaagattcccacaagagtaccacgtcagagacagcacctcaacctggttcagcagttcagggagctcacatttctcatattgctcaacaggtatcatctttatcagaaagtgaggagtcccaggactcatccgacagcataggctcctcacagaaagcccacgggatcctagcacggcgcccatcttacagaaaaattttgaaagacttatcttctgaagatacacggggcagaaaaggagacggagaaaattctggagtttctgctgctgtcacttctatgtctgttccaactcccatctatcagactagcagcggacagtacattgccattgccccaaatggagccttacagttggcaagtccaggcacagatggagtacagggacttcagacattaaccatgacaaattcaggcagtactcagcaaggtacaactattcttcagtatgcacagacctctgatggacagcagatacttgtgcccagcaatcaggtggtcgtacaaactgcatcaggagatatgcaaacatatcagatccgaactacaccttcagctacttctctgccacaaactgtggtgatgacatctcctgtg

SEQ ID NO: 701 - DNA, 549 bp, Homo sapiens
  source 1..549: mol_type = unassigned DNA
cagggccggcgtcggtcaaggtcaattggcagttgattatggaagattcccacaagagtaccacgtcagagacagcacctcaacctggttcagcagttcagggagctcacatttctcatattgctcaacaggtatcatctttatcagaaagtgaggagtcccaggactcatccgacagcataggctcctcacagaaagcccacgggatcctagcacggcgcccatcttacagaaaaattttgaaagacttatcttctgaagatacacggggcagaaaaggagacggagaaaattctggagtttctgctgctgtcacttctatgtctgttccaactcccatctatcagactagcagcggacagtacattgccattgccccaaatggagccttacagttggcaagtccaggcacagatggagtacagggacttcagacattaaccatgacaaattcaggcagtactcagcaaggtacaactattcttcagtatgcacagacctctgatggacagcagatacttgtgcccagcaatcaggtggtcgtacaaa

SEQ ID NO: 702 - DNA, 482 bp, Homo sapiens
  source 1..482: mol_type = unassigned DNA
atgatgcttcaacacccaggccaggtctctgcctcggaagaagagctgaggtttgccatccagaacaagcacctctgccaccggatgtcctctgcgctggaatcagtcactgtcagcgacagacccctcggggtgtccatcacaaaagccgaggtagcccctgaagaagatgaaaggaaaaagaggcgacgagaaagaaataagattgcagctgcaaagtgccgaaacaagaagaaggagaagacggagtgcctgcagaaactcccaaggcccttttgggtccagaagacctgcatatgggctgttgactcatgcaaatgaggtatctgaactgcagcttcagtattagcagagccacaggccgcctctgtggcatcaccagggtttctctgaagaagagggtctgcattttcctaaacccagtgctgctctcccatctcccatcttcctctcgcagcttgatgagccccggtgtgtcccag

SEQ ID NO: 703 - DNA, 2033 bp, Homo sapiens
  source 1..2033: mol_type = unassigned DNA
attacgtcagcctgggactggcaacacggagtaaacgaccgcgccgccagcctgagggctataaaaggggtgatgcaacgctctccaagccacagtcgcacgcagccaggcgcgcactgcacagctctcttctctcgccgccgcccgagcgcacccttcagcccgcgcgccggccgtgagtcctcggtgctcgcccgccggccagacaaacagcccgcccgaccccgtcccgaccctggccgccccgagcggagcctggagcaaaatgatgcttcaacacccaggccaggtctctgcctcggaagtgagtgcttctgccatcgtcccctgcctgtcccctcctgggtcactggtgtttgaggattttgctaacctgacgccctttgtcaaggaagagctgaggtttgccatccagaacaagcacctctgccaccggatgtcctctgcgctggaatcagtcactgtcagcgacagacccctcggggtgtccatcacaaaagccgaggtagcccctgaagaagatgaaaggaaaaagaggcgacgagaaagaaataagattgcagctgcaaagtgccgaaacaagaagaaggagaagacggagtgcctgcagaaagagtcggagaagctggaaagtgtgaatgctgaactgaaggctcagattgaggagctcaagaacgagaagcagcatttgatatacatgctcaaccttcatcggcccacgtgtattgtccgggctcagaatgggaggactccagaagatgagagaaacctctttatccaacagataaaagaaggaacattgcagagctaagcagtcgtggtatgggggcgactggggagtcctcattgaatcctcattttatacccaaaaccctgaagccattggagagctgtcttcctgtgtacctctagaatcccagcagcagagaaccatcaaggcgggagggcctgcagtgattcagcaggcccttcccattctgccccagagtgggtcttggaccagggcaagtgcatctttgcctcaactccaggatttaggccttaacacactggccattcttatgttccagatggcccccagctggtgtcctgcccgcctttcatctggattctacaaaaaaccaggatgcccaccgttaggattcaggcagcagtgtctgtacctcgggtgggagggatggggccatctccttcaccgtggctaccattgtcactcgtaggggatgtggagtgagaacagcatttagtgaagttgtgcaacggccagggttgtgctttctagcaaatatgctgttatgtccagaaattgtgtgtgcaagaaaactaggcaatgtactcttccgatgtttgtgtcacacaacactgatgtgacttttatatgctttttctcagatctggtttctaagagttttggggggcggggctgtcaccacgtgcagtatctcaagatattcaggtggccagaagagcttgtcagcaagaggaggacagaattctcccagcgttaacacaaaatccatgggcagtatgatggcaggtcctctgttgcaaactcagttccaaagtcacaggaagaaagcagaaagttcaacttccaaagggttaggactctccactcaatgtcttaggtcaggagttgtgtctaggctggaagagccaaagaatattccattttcctttccttgtggttgaaaaccacagtcagtggagagatgtttggaaaccacagtcagtggagcctgggtggtacccaggctttagcattattggatgtcaatagcattgtttttgtcatgtagctgttttaagaaatctggcccagggtgtttgcagctgtgagaagtcactcacactggccacaaggacgctggctactgtctattaaaattctgatgtttctgtgaaattctcagagtgtttaattgtactcaatggtatcattacaattttctgtaagagaaaatattacttatttatcctagtattcctaacctgtcagaataataaatattggaaccaagacatggtaaaca

SEQ ID NO: 704 - DNA, 680 bp, Homo sapiens
  source 1..680: mol_type = unassigned DNA
ggcggaggtggggttagcttcagttgaccaaccatgccttgaggataaattggatgggatcagatgggaagatgtgacaagaagagaaatcctcctctatataggatgctctgctgtttcctaaggattttcagcaccttgccccaaaatcaaaatgatgcttcaacacccaggccaggtctctgcctcggaagtgagtgcttctgccatcgtcccctgcctgtcccctcctgggtcactggtgtttgaggattttgctaacctgacgccctttgtcaaggaagagctgaggtttgccatccagaacaagcacctctgccaccggatgtcctctgcgctggaatcagtcactgtcagcgacagacccctcggggtgtccatcacaaaagccgaggtagcccctgaagaagatgaaaggaaaaagaggcgacgagaaagaaataagattgcagctgcaaagtgccgaaacaagaagaaggagaagacggagtgcctgcagaaagagtcggagaagctggaaagtgtgaatgctgaactgaaggctcagattgaggagctcaagaacgagaagcagcatttgatatacatgctcaaccttcatcggcccacgtgtattgtccgggctcagaatgggaggactccagaagatgagagaaacctctttatccaacagataaaag

SEQ ID NO: 705 - DNA, 858 bp, Homo sapiens
  source 1..858: mol_type = unassigned DNA
atgatgcttcaacacccaggccaggtctctgcctcggaagtgagtgcttctgccatcgtcccctgcctgtcccctcctgggtcactggtgtttgaggattttgctaacctgacgccctttgtcaaggaagagctgaggtttgccatccagaacaagcacctctgccaccggatgtcctctgcgctggaatcagtcactgtcagcgacagacccctcggggtgtccatcacaaaagccgaggtagcccctgaagaagatgaaaggaaaaagaggcgacgagaaagaaataagattgcagctgcaaagtgccgaaacaagaagaaggagaagacggagtgcctgcagaaactcccaaggcccttttgggtccagaagacctgcatatgggctgttgactcatgcaaatgaggtatctgaactgcagcttcagtattagcagagccacaggccgcctctgtggcatcaccagggtttctctgaagaagagggtctgcattttcctaaacccagtgctgctctcccatctcccatcttcctctcgcagcttgatgagccccggtgtgtcccaggtacacccctgcatccaggcagcagcccaggccaccccctcctcactggcccttggctcctttcttgatgcctctgttgcttgtcccccaggagtcggagaagctggaaagtgtgaatgctgaactgaaggctcagattgaggagctcaagaacgagaagcagcatttgatatacatgctcaaccttcatcggcccacgtgtattgtccgggctcagaatgggaggactccagaagatgagagaaacctctttatccaacagataaaagaaggaacattgcagagctaa

SEQ ID NO: 706 - DNA, 516 bp, Homo sapiens
  source 1..516: mol_type = unassigned DNA
cgagcggagcctggagcaaaatgatgcttcaacacccaggccagagctgaggtttgccatccagaacaagcacctctgccaccggatgtcctctgcgctggaatcagtcactgtcagcgacagacccctcggggtgtccatcacaaaagccgaggtagcccctgaagaagatgaaaggaaaaagaggcgacgagaaagaaataagattgcagctgcaaagtgccgaaacaagaagaaggagaagacggagtgcctgcagaaagagtcggagaagctggaaagtgtgaatgctgaactgaaggctcagattgaggagctcaagaacgagaagcagcatttgatatacatgctcaaccttcatcggcccacgtgtattgtccgggctcagaatgggaggactccagaagatgagagaaacctctttatccaacagataaaagaaggaacattgcagagctaagcagtcgtggtatgggggcgactggggagtcctcattgaatcctcattttataccc

SEQ ID NO: 707 - DNA, 1896 bp, Homo sapiens
  source 1..1896: mol_type = unassigned DNA
agttgaccaaccatgccttgaggataaattggatgggatcagatgggaagatgtgacaagaagagaaatcctcctctatataggatgctctgctgtttcctaaggattttcagcaccttgccccaaaatcaaaatgatgcttcaacacccaggccaggtctctgcctcggaagtgagtgcttctgccatcgtcccctgcctgtcccctcctgggtcactggtgtttgaggattttgctaacctgacgccctttgtcaaggaagagctgaggtttgccatccagaacaagcacctctgccaccggatgtcctctgcgctggaatcagtcactgtcagcgacagacccctcggggtgtccatcacaaaagccgaggtagcccctgaagaagatgaaaggaaaaagaggcgacgagaaagaaataagattgcagctgcaaagtgccgaaacaagaagaaggagaagacggagtgcctgcagaaagagtcggagaagctggaaagtgtgaatgctgaactgaaggctcagattgaggagctcaagaacgagaagcagcatttgatatacatgctcaaccttcatcggcccacgtgtattgtccgggctcagaatgggaggactccagaagatgagagaaacctctttatccaacagataaaagaaggaacattgcagagctaagcagtcgtggtatgggggcgactggggagtcctcattgaatcctcattttatacccaaaaccctgaagccattggagagctgtcttcctgtgtacctctagaatcccagcagcagagaaccatcaaggcgggagggcctgcagtgattcagcaggcccttcccattctgccccagagtgggtcttggaccagggcaagtgcatctttgcctcaactccaggatttaggccttaacacactggccattcttatgttccagatggcccccagctggtgtcctgcccgcctttcatctggattctacaaaaaaccaggatgcccaccgttaggattcaggcagcagtgtctgtacctcgggtgggagggatggggccatctccttcaccgtggctaccattgtcactcgtaggggatgtggagtgagaacagcatttagtgaagttgtgcaacggccagggttgtgctttctagcaaatatgctgttatgtccagaaattgtgtgtgcaagaaaactaggcaatgtactcttccgatgtttgtgtcacacaacactgatgtgacttttatatgctttttctcagatctggtttctaagagttttggggggcggggctgtcaccacgtgcagtatctcaagatattcaggtggccagaagagcttgtcagcaagaggaggacagaattctcccagcgttaacacaaaatccatgggcagtatgatggcaggtcctctgttgcaaactcagttccaaagtcacaggaagaaagcagaaagttcaacttccaaagggttaggactctccactcaatgtcttaggtcaggagttgtgtctaggctggaagagccaaagaatattccattttcctttccttgtggttgaaaaccacagtcagtggagagatgtttggaaaccacagtcagtggagcctgggtggtacccaggctttagcattattggatgtcaatagcattgtttttgtcatgtagctgttttaagaaatctggcccagggtgtttgcagctgtgagaagtcactcacactggccacaaggacgctggctactgtctattaaaattctgatgtttctgtgaaattctcagagtgtttaattgtactcaatggtatcattacaattttctgtaagagaaaatattacttatttatcctagtattcctaacctgtcagaataataaatattggaaccaagacatggt

SEQ ID NO: 708 - DNA, 767 bp, Homo sapiens
  source 1..767: mol_type = unassigned DNA
atgatgcttcaacacccaggccaggtctctgcctcggaagtgagtgcttctgccatcgtcccctgcctgtcccctcctgggtcactggtgtttgaggattttgctaacctgacgccctttgtcaaggaagagctgaggtttgccatccagaacaagcacctctgccaccggatgtcctctgcgctggaatcagtcactgtcagcgacagacccctcggggtgtccatcacaaaagccgaggtagcccctgaagaagatgaaaggaaaaagaggcgacgagaaagaaataagattgcagctgcaaagtgccgaaacaagaagaaggagaagacggagtgcctgcagaaactcccaaggcccttttgggtccagaagacctgcatatgggctgttgactcatgcaaatgaggtatctgaactgcagcttcagtattagcagagccacaggccgcctctgtggcatcaccagggtttctctgaagaagagggtctgcattttcctaaacccagtgctgctctcccatctcccatcttcctctcgcagcttgatgagccccggtgtgtcccaggagtcggagaagctggaaagtgtgaatgctgaactgaaggctcagattgaggagctcaagaacgagaagcagcatttgatatacatgctcaaccttcatcggcccacgtgtattgtccgggctcagaatgggaggactccagaagatgagagaaacctctttatccaacagataaaagaaggaacattgcagagctaa

SEQ ID NO: 709 - DNA, 2019 bp, Homo sapiens
  source 1..2019: mol_type = unassigned DNA
tttctactttgcccgcccacagatgtagttttctctgcgcgtgtgcgttttccctcctccccgccctcagggtccacggccaccatggcgtattaggggcagcagtgcctgcggcagcattggcctttgcagcggcggcagcagcaccaggctctgcagcggcaacccccagcggcttaagccatggcgtgagtaccggggcgggtcgtccagctgtgctcctggggccggcgcgggttttggattggtggggtgcggcctggggccagggcggtgccgccaagggggaagcgatttaacgagcgcccgggacgcgtggtctttgcttgggtgtccccgagacgctcgcgtgcctgggatcgggaaagcgtagtcgggtgcccggactgcttccccaggagccctacagccctcggaccccgagccccgcaagggtcccaggggtcttggctgttgccccacgaaacgtggcaggaaccaagatggcggcggcagggcggcggcgcgggcgtgagtcaagggcgggcggtgggcggggcgcggccgccctggccgtatttggacgtggggacggagcgctttcctcttggcggccggtggaagaatcccctggtctccgtgagcgtccattttgtggaacctgagttgcaagcagggaggggcaaatacaactgccctgttcccgattctctagatggccgatctagagaagtcccgcctcataagtggaaggatgaaattctcagaacagctaacctctaatgggagttggcttctgattctcattcaggcttctcacggcattcagcagcagcgttgctgtaaccgacaaagacaccttcgaattaagcacattcctcgattccagcaaagcaccgcaacatgaccgaaatgagcttcctgagcagcgaggtgttggtgggggacttgatgtcccccttcgaccagtcgggtttgggggctgaagaaagcctaggtctcttagatgattacctggaggtggccaagcacttcaaacctcatgggttctccagcgacaaggctaaggcgggctcctccgaatggctggctgtggatgggttggtcagtccctccaacaacagcaaggaggatgccttctccgggacagattggatgttggagaaaatggatttgaaggagttcgacttggatgccctgttgggtatagatgacctggaaaccatgccagatgaccttctgaccacgttggatgacacttgtgatctctttgcccccctagtccaggagactaataagcagcccccccagacggtgaacccaattggccatctcccagaaagtttaacaaaacccgaccaggttgcccccttcaccttcttacaacctcttcccctttccccaggggtcctgtcctccactccagatcattcctttagtttagagctgggcagtgaagtggatatcactgaaggagataggaagccagactacactgcttacgttgccatgatccctcagtgcataaaggaggaagacaccccttcagataatgatagtggcatctgtatgagcccagagtcctatctggggtctcctcagcacagcccctctaccaggggctctccaaataggagcctcccatctccaggtgttctctgtgggtctgcccgtcccaaaccttacgatcctcctggagagaagatggtagcagcaaaagtaaagggtgagaaactggataagaagctgaaaaaaatggagcaaaacaagacagcagccactaggtaccgccagaagaagagggcggagcaggaggctcttactggtgagtgcaaagagctggaaaagaagaacgaggctctaaaagagagggcggattccctggccaaggagatccagtacctgaaagatttgatagaagaggtccgcaaggcaagggggaagaaaagggtcccctagttgaggatagtcaggagcgtcaatgtgcttgtacatagagtgctgtagctgtgtgttccaataaattattttgtagggaaa

SEQ ID NO: 710 - DNA, 1420 bp, Homo sapiens
  source 1..1420: mol_type = unassigned DNA
tttctactttgcccgcccacagatgtagttttctctgcgcgtgtgcgttttccctcctccccgccctcagggtccacggccaccatggcgtattaggggcagcagtgcctgcggcagcattggcctttgcagcggcggcagcagcaccaggctctgcagcggcaacccccagcggcttaagccatggcgcttctcacggcattcagcagcagcgttgctgtaaccgacaaagacaccttcgaattaagcacattcctcgattccagcaaagcaccgcaacatgaccgaaatgagcttcctgagcagcgaggtgttggtgggggacttgatgtcccccttcgaccagtcgggtttgggggctgaagaaagcctaggtctcttagatgattacctggaggtggccaagcacttcaaacctcatgggttctccagcgacaaggctaaggcgggctcctccgaatggctggctgtggatgggttggtcagtccctccaacaacagcaaggaggatgccttctccgggacagattggatgttggagaaaatggatttgaaggagttcgacttggatgccctgttgggtatagatgacctggaaaccatgccagatgaccttctgaccacgttggatgacacttgtgatctctttgcccccctagtccaggagactaataagcagcccccccagacggtgaacccaattggccatctcccagaaagtttaacaaaacccgaccaggttgcccccttcaccttcttacaacctcttcccctttccccaggggtcctgtcctccactccagatcattcctttagtttagagctgggcagtgaagtggatatcactgaaggagataggaagccagactacactgcttacgttgccatgatccctcagtgcataaaggaggaagacaccccttcagataatgatagtggcatctgtatgagcccagagtcctatctggggtctcctcagcacagcccctctaccaggggctctccaaataggagcctcccatctccaggtgttctctgtgggtctgcccgtcccaaaccttacgatcctcctggagagaagatggtagcagcaaaagtaaagggtgagaaactggataagaagctgaaaaaaatggagcaaaacaagacagcagccactaggtaccgccagaagaagagggcggagcaggaggctcttactggtgagtgcaaagagctggaaaagaagaacgaggctctaaaagagagggcggattccctggccaaggagatccagtacctgaaagatttgatagaagaggtccgcaaggcaagggggaagaaaagggtcccctagttgaggatagtcaggagcgtcaatgtgcttgtacatagagtgctgtagctgtgtgttccaataaattattttgtagggaaagta

SEQ ID NO: 711 - DNA, 1910 bp, Homo sapiens
  source 1..1910: mol_type = unassigned DNA
aggtggacaggcccggcgcgccctctcgaggccccttcaacctcccgggggcagcagcgccgtgtcggctatgaatggggcctctggaaaactcaggcttggaacagcacctcgcgcgataacctggcgtcctcggccttcacaataaaaactcttcgccggaaaacgacctttccccgcccactgcgctgacaccggaagcgaggcgtgtctgggagatcactccgcgctccggcggcgaaggaaagaacggactctgatcatagaagcctagtaaagtagtacacctctctcctttcgtgaggccataagaacaaactccttttctcgtcacagctacgccctgggcataaacggttggggcgtcaaagggagggagggaagggagcgggcgggaggagacggtcacgtggtcgcggcggaaggatgcgtctgtgctgcgtccccatagagacgaagtctataaagggccggcgggcggccacggcagccatttctactttgcccgcccacagatgtagttttctctgcgcgtgtgcgttttccctcctccccgccctcagggtccacggccaccatggcgtattaggggcagcagtgcctgcggcagcattggcctttgcagcggcggcagcagcaccaggctctgcagcggcaacccccagcggcttaagccatggcgcttctcacggcattcagcagcagcgttgctgtaaccgacaaagacaccttcgaattaagcacattcctcgattccagcaaagcaccgcaacatgaccgaaatgagcttcctgagcagcgaggtgttggtgggggacttgatgtcccccttcgaccagtcgggtttgggggctgaagaaagcctaggtctcttagatgattacctggaggtggccaagcacttcaaacctcatgggttctccagcgacaaggctaaggcgggctcctccgaatggctggctgtggatgggttggtcagtccctccaacaacagcaaggaggatgccttctccgggacagattggatgttggagaaaatggatttgaaggagttcgacttggatgccctgttgggtatagatgacctggaaaccatgccagatgaccttctgaccacgttggatgacacttgtgatctctttgcccccctagtccaggagactaataagcagcccccccagacggtgaacccaattggccatctcccagaaagtttaacaaaacccgaccaggttgcccccttcaccttcttacaacctcttcccctttccccaggggtcctgtcctccactccagatcattcctttagtttagagctgggcagtgaagtggatatcactgaaggagataggaagccagactacactgcttacgttgccatgatccctcagtgcataaaggaggaagacaccccttcagataatgatagtggcatctgtatgagcccagagtcctatctggggtctcctcagcacagcccctctaccaggggctctccaaataggagcctcccatctccaggtgttctctgtgggtctgcccgtcccaaaccttacgatcctcctggagagaagatggtagcagcaaaagtaaagggtgagaaactggataagaagctgaaaaaaatggagcaaaacaagacagcagccactaggtaccgccagaagaagagggcggagcaggaggctcttactggtgagtgcaaagagctggaaaagaagaacgaggctctaaaagagagggcggattccctggccaaggagatccagtacctgaaagatttgatagaagaggtccgcaaggcaagggggaagaaaagggtcccctagttgaggatagtcaggagcgtcaatgtgcttgtacatagagtgctgtagctgtgtgttccaataaattattttgtagggaaa

SEQ ID NO: 712 - DNA, 2259 bp, Homo sapiens
  source 1..2259: mol_type = unassigned DNA
gtgactcatgctggactctaacccacgagggtttctcagagtcagcagctgggggatgaagaagtgaaaagtgactggcaggaaattctgcaagcaaggaaagggaaagagaaatgaactggtgcaggtctgcgggaagagaatgaggctggatcctcaaaatcacaggaggaagcaggcccagacctcagaggcagaaagagaaagaaaccagagcttagagtcaggaggaggaaaccagaccccggagccacaaggagagggctggatccccggctcagagggaagagtgtcgccgcctctgcctgcgtagccccggccatggctctgtagcctcgacccctttgtgcccccggcccgtctccgcgctcaccacgcctgcgctctccgctcccaccttctttcttcagccgaggccgccgccgcctctccttgctgcagccatggagtcttccactttcgccttggtgcctgtcttcgcccacctgagcatcctccagagcctcgtgccagctgctggtgcagcctctcctgttgccatcagtgcccagcacctgtgctacagccatgtcactcctggcgaccctggggctggagctggacagggccctgctcccagctagtgggctgggatggctcgtagactatgggaaactccccccggcccctgcccccctggctccctatgaggtccttgggggagccctggagggcgggcttccagtggggggagagcccctggcaggtgatggcttctctgactggatgactgagcgagttgatttcacagctctcctccctctggagcctcccttaccccccggcaccctcccccaaccttccccaaccccacctgacctggaagctatggcctccctcctcaagaaggagctggaacagatggaagacttcttcctagatgccccgcccctcccaccaccctccccgccgccactaccaccaccaccactaccaccagccccctccctccccctgtccctcccctcctttgacctcccccagccccctgtcttggatactctggacttgctggccatctactgccgcaacgaggccgggcaggaggaagtggggatgccgcctctgcccccgccacagcagccccctcctccttctccacctcaaccttctcgcctggccccctacccacatcctgccaccacccgaggggaccgcaagcaaaagaagagagaccagaacaagtcggcggctctgaggtaccgccagcggaagcgggcagagggtgaggccctggagggcgagtgccaggggctggaggcacggaatcgcgagctgaaggaacgggcagagtccgtggagcgcgagatccagtacgtcaaggacctgctcatcgaggtttacaaggcccggagccagaggacccgtagctgctagaagggcaggggtgtggcttctgggggctggtcttcagctctggcgccttcatccccctgcctctaccttcattccaaacccctctcggccgggtgcagtggcttatgcttgtaatcccagcactttgggaggccaaggcaggaggatcgtttgaggccaggaggtcaataccagcctgggcaacatagtaagaccctgtctctattaaaaaaaaaaaatcaacccttcttccccaccaaaccacccaactcctctctactcttatccttttatcctctgtctctgcttatcacctctcttgcgtatttctggatctccttccctcctttctcgtccaaatcatgaaatgtttggccttagtcaatgtctatgcccgtcacataacagccgaggcaccgaggcccacagggaagcagctgggagcttggaaacctggtctcttgaatttcaaacctggtttcttacaggtggttgtctggggtgggtggagtggcgacaggatagagctgaaggactatgcaaatgaggaagtaagtcagggcgggctttgagaaggggacccatatcctacaggcaaaaagcaggctaggtgaccttgggacactacgctaagggagggaggctaaaggcggccaggtttgcagtgcgggaagatgagcaggccagtgggaggaggggcagggcagggctgtagttggtgactgggtgttcattttagctctaagaaaaaaaatcagtgtttcgtgaaggtgttggagaggggctgtgtctgggtgagggatggcggggtactgatttttttgggaggttatgagcaaaaataaaacgaaacatttcctctgg

SEQ ID NO: 713 - DNA, 7496 bp, Homo sapiens
  source 1..7496: mol_type = unassigned DNA
ttttgtccgcctgccgccgccgtcccagatattaatcacggagttccagggagaaggaacttgtgaaatgggggagccggctggggttgccggcaccatggagtcaccttttagcccgggactctttcacaggctggatgaagattgggattctgctctctttgctgaactcggttatttcacagacactgatgagctgcaattggaagcagcaaatgagacgtatgaaaacaattttgataatcttgattttgatttggatttgatgccttgggagtcagacatttgggacatcaacaaccaaatctgtacagttaaagatattaaggcagaacctcagccactttctccagcctcctcaagttattcagtctcgtctcctcggtcagtggactcttattcttcaactcagcatgttcctgaggagttggatttgtcttctagttctcagatgtctcccctttccttatatggtgaaaactctaatagtctctcttcagcggagccactgaaggaagataagcctgtcactggtcctaggaacaagactgaaaatggactgactccaaagaaaaaaattcaggtgaattcaaaaccttcaattcagcccaagcctttattgcttccagcagcacccaagactcaaacaaactccagtgttccagcaaaaaccatcattattcagacagtaccaacgcttatgccattggcaaagcagcaaccaattatcagtttacaacctgcacccactaaaggccagacggttttgctgtctcagcctactgtggtacaacttcaagcacctggagttctgccctctgctcagccagtccttgctgttgctgggggagtcacacagctccctaatcacgtggtgaatgtggtaccagccccttcagcgaatagcccagtgaatggaaaactttccgtgactaaacctgtcctacaaagtaccatgagaaatgtcggttcagatattgctgtgctaaggagacagcaacgtatgataaaaaatcgagaatccgcttgtcagtctcgcaagaagaagaaagaatatatgctagggttagaggcgagattaaaggctgccctctcagaaaacgagcaactgaagaaagaaaatggaacactgaagcggcagctggatgaagttgtgtcagagaaccagaggcttaaagtccctagtccaaagcgaagagttgtctgtgtgatgatagtattggcatttataatactgaactatggacctatgagcatgttggaacaggattccaggagaatgaaccctagtgtgagccctgcaaatcaaaggaggcaccttctaggattttctgctaaagaggcacaggacacatcagatggtattatccagaaaaacagctacagatatgatcattctgtttcaaatgacaaagccctgatggtgctaactgaagaaccattgctttacattcctccacctccttgtcagcccctaattaacacaacagagtctctcaggttaaatcatgaacttcgaggatgggttcatagacatgaagtagaaaggaccaagtcaagaagaatgacaaataatcaacagaaaacccgtattcttcagggtgctctggaacagggctcaaattctcagctgatggctgttcaatacacagaaaccactagtagtatcagcaggaactcagggagtgagctacaagtgtattatgcttcacccagaagttatcaagacttttttgaagccatccgcagaaggggagacacattttatgttgtgtcatttcgaagggatcacctgctgttaccagctaccacccataacaagaccacaagaccaaaaatgtcaattgtgttaccagcaataaacataaatgagaatgtgatcaatgggcaggactacgaagtgatgatgcagattgactgtcaggtgatggacaccaggatcctccatatcaaaagttcgtcagttcctccttacctccgagatcagcagaggaatcaaaccaacaccttctttggctcccctcccgcagccacagaggcaacccacgttgtcagcaccatccctgagtcattacaatagcaccctgcagctatgctggaaaactgagcgtgggaccctgccagactgaagagcaggtgagcaaaatgctgctttctgccttggtggcaggcagagaactgtctcgtactagaattcaaggaggaaagaagaagaaataaaagaagctgctccatttttcatcatctacccatctatttggaaagcactggaattcagatgcaagagaacaatgtttcttcagtggcaaatgtagccctgcatcctccagtgttacctggtgtagatttttttttctgtacctttctaaacctctcttccctctgtgatggttttgtgtttaaacagtcatcttcttttaaataatatccacctctcctttttgccatttcacttattgattcataaagtgaattttatttaaagctatgccacacatgcatgttcaaatggtttccactgattcgatttttcattcatttaatgcaaacccattctggatattgtgcttatttgagaaaacacatttcaaaaccagaaaagccaaaaacactccaaaaacaagcaaaacaatttggagctttagataaaaggaaaaactcccagttggtaaagtttatctttacttaggatttgtggctcacacctaaacaaagggggtcagggagtgggtacaaatttgagaaaatagaagggtaagggaagggccagtggtggggtttggagagaggagatagctccattaatacacatgtttaaaagatggaaagttcacgcctgtaatcccagcactttgggaggccgaggcgggtggatcacgaggtcaggagatcaagaccatcccggctaaaacggtgaaaccccgtctctactaaaaatacaaaaaattagccgggcgtagtgacgggcgcctgtagtcccagctacttgggaggctgaggcaggagaatggcgtgaacccgggaggcggagcttgcagtgagccgagatcccgccactgcactccagcctgggcgacagagcgagactccgtctcaaaaaaaaaaaaaaaaaaaaaaaaagatggaaagttcgatgtgactgcagtatgagattaaagccacaactattgtttattttggggactctaggccaccaagtattagcacacatacttatgttttctctactaatctggtccaggtcctcatggaccacaggacaaagctttcattttcattcattcttctattgaaattataccaaattcagctgaggaatatggaagtaactttagacttaaacaagacaaaagttttttcactgaagaattgacaagtatttgctccttaaaacaacgcagattagtgaacgtggattcctgctgagggagtgcatcccataatatggcaataattttcagtttctccaacgaaaagatagtgaaggaattaaatcttttgtcctcccatggttaaaaaaaaaaaaaaagctgtgttcatttttactgtactatgcctcttttttcaccatagtagacaattatgtttcatttgatgaattcatagaactggatctcatacagcgatgtcctctctaatgttctacctttcagtttctaaagtgagtcttcctccctctcctacaaaacttttcaattttttgatgtaactcatctacaaatactgtttcttaccccagttgacttgcctttgtcagatttcttcttgttccacactatagcaatcaatttctcttcttccttacaagaaagggaacgagaaattgtagcaacctctcaaggattatatgcagctagttagttttctgcctgtgaaattaggtctggctcctaaataattttaaagaaccatcagcacttctaactctctggacaggtgcctctttgtccaagctagttaaatgctttccaaggaaatcagttcaacttttgtgagcggggaaaagcagggctttattgttgtgttacctgggagtctggagtttgaaaagtgctaattaaccttcctctttttccacattacaaacctttttaagcagcgcagcactccccttagatttggctatcctgggtgattttcagacaagaaccattttctctggggaccattcttctgctgggtgccaaggaatataaggcaaatgcccagaagaccttcaggtgactgggcagtcttatcatgggatatttcttctggccctgccccttcccattctgtaatgtgaattagccacaccagaggctgtgaccatggctagtagacagtggcaacatagtcatccccaagatgctaatcttctgctggaactgtcatacgttatcatggtcaatgtaaacctggtttgtgtggggtgattataaatagagtttccctcctctctgtgacagaatcacaggagaaggacccatctcgtggccttcttgttcttagcgcttcacttttacttcatccctcgattcccagctttttctatcatcattttgccaactcctcagatgcaagactttggttatgtcatactcaccaacgttagtccctctcttccaggtgaaaaggtgggtagcggttgggagggagtctccactgaagagcaggaaggtggtagcagggccggcagctctgccacagagctaggggtgcctgtaaggtgccgcctagagcagcctgggagctttgccttcttttgtctctcactagcccttctactctttgtcattgcctgttcttgagtggatctttgaaatgaggggacaggattctcctaagggtagagtttcaggaaatgagtgaaaggcaattgacaaatgcaaagaagtagtcactttttaaattgctggcaaagctataattaatccctaggcacaattgtagtttttattttaatgtttgtatgcacaaggccctttaggaaatgagaagttgccatgccagattaatttttttttttttttttggtgggattgccttttgggggttgcagccagaaattgtgggtaatgtgtgtatttttttatttattaaattttaaacaggattgtgcaagcttatgagacaattagataaactcatggaggaggcaggtcctcctgttattagatgattttgtgctcttggggctgacaataatacactcttgggaagtgatggtagagactgatgggaatagtctttctgcctggttgcaagtcccaaatttttaagggttaatggaagtaagtggatgtttcctcatgttaactactgaatcagatgttaggagcttgtccctttggggttgacttatgcccagcagtacagggacacagcttcattagagtgttagtgtaaactaactccaaagttaggagttaatgtgaaaggatcatccttgaaacaaatctgctgtttgccatgcttgtagtacagaaacttcacatggagttttgggtgggatttgtgttttcacaagtaaaaaatccctcacgattataaaactcagagcatcatctaatttttttttttaatgactacaagttccagcacaaaactggcatttctttgccatttcttgccagtaagaagttgacacggaggtatttgaaagcaatgttatgtgagtcattcttaagtgttccaagtaagtttagaaacagaaaaggaacttgggattcaaattgatttttcaaatcatttttaaagagacatcatcctgactaaatcttagcctgaaccttcctcccctgtgtgtattccccggtagtcaccgcagcgagatgctggtgagactgccgtggtggcatttagcatcgttaaaactggaaaactctcaagctctttgccactttcctactattttttgattcttgccattttaccaagcttaggttgtgaaacttgacagaaatgtattacaggaaaaacttataattgtatttgactttctaacacattgcaaagtttcaaagtgactttcactttcaacaacatattagaagtaaccacttttgctttcacagcctgaagagttagagcctgatctgatgccccctttcactctgaagtcatgggaaattttccagccatgaaagccctctttccactgcatactgatgggctgactcagcttccttcagccgactgagatcttttcatactattggctatttcataccaattaacctcttaaataagattgtgaattgccaaaattgatagacacttattaccacctgtggactccatattccttaccacaaatgttattttcatcagtcctgagtcattttaacttacagaaattaggattgttgctgctaatatgaataccaattataacttttagaaacaagaataaagcctaaaagagaatgaaatataagaaatgttcgttcccacccctaataacatttggaagtgaatattcccattttcttccacccacagggattgggattgatttttaatttcctaggaaacaatactagactacccaaaaagatgttgccagaatccaaaaggaactatgctcgtaaaagaaatgcagttttctcctacctaaaaaaaagaaagtaaagtgtgttctgttcttatctttttaatgactaagctttaaacagtttattttgggtaagactagaactttcggccatttgttctaatatgtgtgttattagatgcaatagaatttatgaaaagaagaatgacaaaggtatctgattagaaaatttgatcttacgcatgaatccatgtcatggccagccactgtcacatagtgggtgccattctcaacatattggtttgctaactttaagcattagggatttagcacactaaaatacttttaattatattaggtttggtaactaaggagtaaataaatcataatttatcatttgccaaggccaacaaacaacactattgtgctgtttgctctcaatgaagttgaataaaccaggaggcttggcatatcccctttatgttaatcccagctagagattagtaggttgactttcacagcaattgtatattgatccattttaactcatccttgccataatttccaggccagtcaccaggacagaggagatgatggggaaacagagctttagatgaaaactactatgcactactagccttagaggcactggtttcctgttaccactttggcaagtatggatggtctaagtccagtagggcttcatccatggagccattagaactgaggggggagtgttagagatgccatttcaccaggatctttttgctcaggttgtacccatgccaattgaagaacgtgttaaagatgaggaggagagatgtaccattctctcccttaataatgatgttggtttgcaaaacctaaagaaataataacaacagactatttcatactttcaagcaagtctttatactacctgttatttctctaaaattcaaataaagaatttttaaactta

SEQ ID NO: 714 - DNA, 2620 bp, Homo sapiens
  source 1..2620: mol_type = unassigned DNA
aaccgtctcctggttggggggtgggggggaaagatggcggagctgatgctgctcagcgagattgctgacccgacgcgtttcttcaccgacaacctgcttagcccggaggactggggtctgcagaacagcaccttgtattctggcctagatgaagtggccgaggagcagacgcagctcttccgttgcccggagcaggatgtcccgtttgacggcagctccctggacgtggggatggatgtcagcccctctgagcccccatgggaactcctgccgatcttcccagatcttcaggtgaagtctgagccatcttccccctgctcttcctcctccctcagctccgagtcatcgcgtctctccacagagccatccagcgaggctcttggggtaggggaggtgctccatgtgaagacagagtccttggcacccccactgtgtctcctgggagatgacccaacatcctcatttgaaaccgtccagatcaacgttatccccacctctgatgattcctcagatgtccagaccaagatagaacctgtctctccatgttcttccgtcaactctgaggcctccctgctctcagccgactcctccagccaggcttttataggagaggaggtcctggaagtgaagacagagtccctgtccccttcaggatgcctcctgtgggatgtcccagccccctcacttggagctgtccagatcagcatgggcccatcccttgatggctcctcaggcaaagccctgcccacccggaagccgccactgcagcccaaacctgtagtgctaaccactgtcccaatgccatccagagctgtgcctcccagcaccacagtccttctgcagtccctcgtccagccacccccagtgtccccagttgtcctcatccagggtgctattcgagtccagcctgaagggccggctccctctctaccacggcctgagaggaagagcatcgttcccgctcctatgcctggaaactcctgcccgcctgaagtggatgcaaagctgctgaagcggcagcagcgaatgatcaagaaccgggagtcagcctgccagtcccggagaaagaagaaagagtatctgcagggactggaggctcggctgcaagcagtactggctgacaaccagcagctccgccgagagaatgctgccctccggcggcggctggaggccctgctggctgaaaacagcgagctcaagttagggtctggaaacaggaaggtggtctgcatcatggtcttccttctcttcattgccttcaactttggacctgtcagcatcagtgagcctccttcagctcccatctctcctcggatgaacaagggggagcctcaaccccggagacacttgctggggttctcagagcaagagccagttcagggagttgaacctctccaggggtcctcccagggccctaaggagccccagcccagccccacagaccagcccagtttcagcaacctgacagccttccctgggggcgccaaggagctactactaagagacctagaccagctcttcctctcctctgattgccggcacttcaaccgcactgagtccctgaggcttgctgacgagttgagtggctgggtccagcgccaccagagaggccggaggaagatccctcagagggcccaggagagacagaagtctcagccacggaagaagtcacctccagttaaggcagtccccatccaaccccctggacccccagaaagggattctgtgggccagctgcaactatatcgccacccagaccgttcgcagccagcattcttggatgcaattgaccgacgggaagacacattttatgttgtctctttccgaagggaccacctgctgctcccagccatcagccacaacaagacctcccggcccaagatgtccctggtgatgcctgccatggcccccaatgagaccctgtcaggccgtggggccccgggggactatgaggagatgatgcagatcgagtgtgaggtcatggacaccagggtgattcacatcaagacctccacagtgcccccctcgctccgaaaacagccatccccaaccccaggcaatgccacaggtggccccttgccagtctctgcagccagccaggcccaccaggcctcccaccagcccctctacctcaatcatccctgacctctgccattcacactgacttagaacggggggagggggtaccaggtggccaggtgggactgtttcaaatttccctgatccccaggcttggggcaattggtaaaggaaagagcaggtgtgggggttaagcacttatttgaggtgggggtgttcacctctcttctcatcccttttcagaatatagggctcctctcattcctgtgaacccccagtcccggcttctttgtttgaggggattgtgtgaggttcagttgtggggtgggtggtgagctgctgcatattttttattttgtttctctagtgttatggcagtggaggtgggaatttagtccccaggtgggacaagggaagttttttcattttggagctagttactgggagtaagggagggtggggtgggggggagttcaggtttatgtgtgtgcatttcttttttattattattaaataaacaacttggagggagttgaaggaa

SEQ ID NO: 715 - DNA, 771 bp, Homo sapiens
  source 1..771: mol_type = unassigned DNA
aaagatggcggagctgatgctgctcagcgagattgctgacccgacgcgtttcttcaccgacaacctgcttagcccggaggactggggtctgcagaacagcaccttgtattctggcctagatgaagtggccgaggagcagacgcagctcttccgttgcccggagcaggatgtcccgtttgacggcagctccctggacgtggggatggatgtcagccccacagaccagcccagtttcagcaacctgacagccttccctgggggcgccaaggagctactactaagagacctagaccagctcttcctctcctctgattgccggcacttcaaccgcactgagtccctgaggcttgctgacgagttgagtggctgggtccagcgccaccagagaggccggaggaagatccctcagagggcccaggagagacagaagtctcagccacggaagaagtcacctccagttaaggcagtccccatccaaccccctggacccccagaaagggattctgtgggccagctgcaactatatcgccacccagaccgttcgcagccagcattcttggatgcaattgaccgacgggaagacacattttatgttgtctctttccgaaggaccacctgctgctcccagccatcagccacaacaagacctcccggcccaagatgtccctggtgatgcctgccatggcccccaatgcctcctgaatgatgccagcccagtatgctctaacctccagcctggttctcctggtgctgctgagcacagccagagca

SEQ ID NO: 716 - DNA, 2624 bp, Homo sapiens
  source 1..2624: mol_type = unassigned DNA
ggcgggccttgggaaccgtctcctggttggggggtgggggggaaagatggcggagctgatgctgctcagcgagattgctgacccgacgcgtttcttcaccgacaacctgcttagcccggaggactgggacagcaccttgtattctggcctagatgaagtggccgaggagcagacgcagctcttccgttgcccggagcaggatgtcccgtttgacggcagctccctggacgtggggatggatgtcagcccctctgagcccccatgggaactcctgccgatcttcccagatcttcaggtgaagtctgagccatcttccccctgctcttcctcctccctcagctccgagtcatcgcgtctctccacagagccatccagcgaggctcttggggtaggggaggtgctccatgtgaagacagagtccttggcacccccactgtgtctcctgggagatgacccaacatcctcatttgaaaccgtccagatcaacgttatccccacctctgatgattcctcagatgtccagaccaagatagaacctgtctctccatgttcttccgtcaactctgaggcctccctgctctcagccgactcctccagccaggcttttataggagaggaggtcctggaagtgaagacagagtccctgtccccttcaggatgcctcctgtgggatgtcccagccccctcacttggagctgtccagatcagcatgggcccatcccttgatggctcctcaggcaaagccctgcccacccggaagccgccactgcagcccaaacctgtagtgctaaccactgtcccaatgccatccagagctgtgcctcccagcaccacagtccttctgcagtccctcgtccagccacccccagtgtccccagttgtcctcatccagggtgctattcgagtccagcctgaagggccggctccctctctaccacggcctgagaggaagagcatcgttcccgctcctatgcctggaaactcctgcccgcctgaagtggatgcaaagctgctgaagcggcagcagcgaatgatcaagaaccgggagtcagcctgccagtcccggagaaagaagaaagagtatctgcagggactggaggctcggctgcaagcagtactggctgacaaccagcagctccgccgagagaatgctgccctccggcggcggctggaggccctgctggctgaaaacagcgagctcaagttagggtctggaaacaggaaggtggtctgcatcatggtcttccttctcttcattgccttcaactttggacctgtcagcatcagtgagcctccttcagctcccatctctcctcggatgaacaagggggagcctcaaccccggagacacttgctggggttctcagagcaagagccagttcagggagttgaacctctccaggggtcctcccagggccctaaggagccccagcccagccccacagaccagcccagtttcagcaacctgacagccttccctgggggcgccaaggagctactactaagagacctagaccagctcttcctctcctctgattgccggcacttcaaccgcactgagtccctgaggcttgctgacgagttgagtggctgggtccagcgccaccagagaggccggaggaagatccctcagagggcccaggagagacagaagtctcagccacggaagaagtcacctccagttaaggcagtccccatccaaccccctggacccccagaaagggattctgtgggccagctgcaactatatcgccacccagaccgttcgcagccagcattcttggatgcaattgaccgacgggaagacacattttatgttgtctctttccgaagggaccacctgctgctcccagccatcagccacaacaagacctcccggcccaagatgtccctggtgatgcctgccatggcccccaatgagaccctgtcaggccgtggggccccgggggactatgaggagatgatgcagatcgagtgtgaggtcatggacaccagggtgattcacatcaagacctccacagtgcccccctcgctccgaaaacagccatccccaaccccaggcaatgccacaggtggccccttgccagtctctgcagccagccaggcccaccaggcctcccaccagcccctctacctcaatcatccctgacctctgccattcacactgacttagaacggggggagggggtaccaggtggccaggtgggactgtttcaaatttccctgatccccaggcttggggcaattggtaaaggaaagagcaggtgtgggggttaagcacttatttgaggtgggggtgttcacctctcttctcatcccttttcagaatatagggctcctctcattcctgtgaacccccagtcctggcttctttgtttgaggggattgtgtgaggttcagttgtggggtgggtggtgagctgctgcatattttttattttgtttctctagtgttatggcagtggaggtgggaatttagtccccaggtgggacaagggaagttttttcattttggagctagttactgggagtaagggagggtggggtgggggggagttcaggtttatgtgtgtgcatttcttttttattattattaaataaacaacttggagggagttgaaggaa

SEQ ID NO: 717 - DNA, 2620 bp, Homo sapiens
  source 1..2620: mol_type = unassigned DNA
aaccgtctcctggttggggggtgggggggaaagatggcggagctgatgctgctcagcgagattgctgacccgacgcgtttcttcaccgacaacctgcttagcccggaggactggggtctgcagaacagcaccttgtattctggcctagatgaagtggccgaggagcagacgcagctcttccgttgcccggagcaggatgtcccgtttgacggcagctccctggacgtggggatggatgtcagcccctctgagcccccatgggaactcctgccgatcttcccagatcttcaggtgaagtctgagccatcttccccctgctcttcctcctccctcagctccgagtcatcgcgtctctccacagagccatccagcgaggctcttggggtaggggaggtgctccatgtgaagacagagtccttggcacccccactgtgtctcctgggagatgacccaacatcctcatttgaaaccgtccagatcaacgttatccccacctctgatgattcctcagatgtccagaccaagatagaacctgtctctccatgttcttccgtcaactctgaggcctccctgctctcagccgactcctccagccaggcttttataggagaggaggtcctggaagtgaagacagagtccctgtccccttcaggatgcctcctgtgggatgtcccagccccctcacttggagctgtccagatcagcatgggcccatcccttgatggctcctcaggcaaagccctgcccacccggaagccgccactgcagcccaaacctgtagtgctaaccactgtcccaatgccatccagagctgtgcctcccagcaccacagtccttctgcagtccctcgtccagccacccccagtgtccccagttgtcctcatccagggtgctattcgagtccagcctgaagggccggctccctctctaccacggcctgagaggaagagcatcgttcccgctcctatgcctggaaactcctgcccgcctgaagtggatgcaaagctgctgaagcggcagcagcgaatgatcaagaaccgggagtcagcctgccagtcccggagaaagaagaaagagtatctgcagggactggaggctcggctgcaagcagtactggctgacaaccagcagctccgccgagagaatgctgccctccggcggcggctggaggccctgctggctgaaaacagcgagctcaagttagggtctggaaacaggaaggtggtctgcatcatggtcttccttctcttcattgccttcaactttggacctgtcagcatcagtgagcctccttcagctcccatctctcctcggatgaacaagggggagcctcaaccccggagacacttgctggggttctcagagcaagagccagttcagggagttgaacctctccaggggtcctcccagggccctaaggagccccagcccagccccacagaccagcccagtttcagcaacctgacagccttccctgggggcgccaaggagctactactaagagacctagaccagctcttcctctcctctgattgccggcacttcaaccgcactgagtccctgaggcttgctgacgagttgagtggctgggtccagcgccaccagagaggccggaggaagatccctcagagggcccaggagagacagaagtctcagccacggaagaagtcacctccagttaaggcagtccccatccaaccccctggacccccagaaagggattctgtgggccagctgcaactatatcgccacccagaccgttcgcagccagcattcttggatgcaattgaccgacgggaagacacattttatgttgtctctttccgaagggaccacctgctgctcccagccatcagccacaacaagacctcccggcccaagatgtccctggtgatgcctgccatggcccccaatgagaccctgtcaggccgtggggccccgggggactatgaggagatgatgcagatcgagtgtgaggtcatggacaccagggtgattcacatcaagacctccacagtgcccccctcgctccgaaaacagccatccccaaccccaggcaatgccacaggtggccccttgccagtctctgcagccagccaggcccaccaggcctcccaccagcccctctacctcaatcatccctgacctctgccattcacactgacttagaacggggggagggggtaccaggtggccaggtgggactgtttcaaatttccctgatccccaggcttggggcaattggtaaaggaaagagcaggtgtgggggttaagcacttatttgaggtgggggtgttcacctctcttctcatcccttttcagaatatagggctcctctcattcctgtgaacccccagtcctggcttctttgtttgaggggattgtgtgaggttcagttgtggggtgggtggtgagctgctgcatattttttattttgtttctctagtgttatggcagtggaggtgggaatttagtccccaggtgggacaagggaagttttttcattttggagctagttactgggagtaagggagggtggggtgggggggagttcaggtttatgtgtgtgcatttcttttttattattattaaataaacaacttggagggagttgaaggaa

SEQ ID NO: 718 - DNA, 2624 bp, Homo sapiens
  source 1..2624: mol_type = unassigned DNA
ggcgggccttgggaaccgtctcctggttggggggtgggggggaaagatggcggagctgatgctgctcagcgagattgctgacccgacgcgtttcttcaccgacaacctgcttagcccggaggactgggacagcaccttgtattctggcctagatgaagtggccgaggagcagacgcagctcttccgttgcccggagcaggatgtcccgtttgacggcagctccctggacgtggggatggatgtcagcccctctgagcccccatgggaactcctgccgatcttcccagatcttcaggtgaagtctgagccatcttccccctgctcttcctcctccctcagctccgagtcatcgcgtctctccacagagccatccagcgaggctcttggggtaggggaggtgctccatgtgaagacagagtccttggcacccccactgtgtctcctgggagatgacccaacatcctcatttgaaaccgtccagatcaacgttatccccacctctgatgattcctcagatgtccagaccaagatagaacctgtctctccatgttcttccgtcaactctgaggcctccctgctctcagccgactcctccagccaggcttttataggagaggaggtcctggaagtgaagacagagtccctgtccccttcaggatgcctcctgtgggatgtcccagccccctcacttggagctgtccagatcagcatgggcccatcccttgatggctcctcaggcaaagccctgcccacccggaagccgccactgcagcccaaacctgtagtgctaaccactgtcccaatgccatccagagctgtgcctcccagcaccacagtccttctgcagtccctcgtccagccacccccagtgtccccagttgtcctcatccagggtgctattcgagtccagcctgaagggccggctccctctctaccacggcctgagaggaagagcatcgttcccgctcctatgcctggaaactcctgcccgcctgaagtggatgcaaagctgctgaagcggcagcagcgaatgatcaagaaccgggagtcagcctgccagtcccggagaaagaagaaagagtatctgcagggactggaggctcggctgcaagcagtactggctgacaaccagcagctccgccgagagaatgctgccctccggcggcggctggaggccctgctggctgaaaacagcgagctcaagttagggtctggaaacaggaaggtggtctgcatcatggtcttccttctcttcattgccttcaactttggacctgtcagcatcagtgagcctccttcagctcccatctctcctcggatgaacaagggggagcctcaaccccggagacacttgctggggttctcagagcaagagccagttcagggagttgaacctctccaggggtcctcccagggccctaaggagccccagcccagccccacagaccagcccagtttcagcaacctgacagccttccctgggggcgccaaggagctactactaagagacctagaccagctcttcctctcctctgattgccggcacttcaaccgcactgagtccctgaggcttgctgacgagttgagtggctgggtccagcgccaccagagaggccggaggaagatccctcagagggcccaggagagacagaagtctcagccacggaagaagtcacctccagttaaggcagtccccatccaaccccctggacccccagaaagggattctgtgggccagctgcaactatatcgccacccagaccgttcgcagccagcattcttggatgcaattgaccgacgggaagacacattttatgttgtctctttccgaagggaccacctgctgctcccagccatcagccacaacaagacctcccggcccaagatgtccctggtgatgcctgccatggcccccaatgagaccctgtcaggccgtggggccccgggggactatgaggagatgatgcagatcgagtgtgaggtcatggacaccagggtgattcacatcaagacctccacagtgcccccctcgctccgaaaacagccatccccaaccccaggcaatgccacaggtggccccttgccagtctctgcagccagccaggcccaccaggcctcccaccagcccctctacctcaatcatccctgacctctgccattcacactgacttagaacggggggagggggtaccaggtggccaggtgggactgtttcaaatttccctgatccccaggcttggggcaattggtaaaggaaagagcaggtgtgggggttaagcacttatttgaggtgggggtgttcacctctcttctcatcccttttcagaatatagggctcctctcattcctgtgaacccccagtcccggcttctttgtttgaggggattgtgtgaggttcagttgtggggtgggtggtgagctgctgcatattttttattttgtttctctagtgttatggcagtggaggtgggaatttagtccccaggtgggacaagggaagttttttcattttggagctagttactgggagtaagggagggtggggtgggggggagttcaggtttatgtgtgtgcatttcttttttattattattaaataaacaacttggagggagttgaaggaa

SEQ ID NO: 719 - DNA, 425 bp, Homo sapiens
  source 1..425: mol_type = unassigned DNA
ccagcccagccccacagaccagcccagtttcagcaacctgacagccttccctgggggcgccaaggagctactactaagagacctagaccagctcttcctctcctctgattgccggcacttcaaccgcactgagtccctgaggcttgctgacgagttgagtggctgggtccagcgccaccagagaggccggaggaagatccctcagagggcccaggagagacagtccttagatacttctccttccagaagtctcagccacggaagaagtcacctccagttaaggcagtccccatccaaccccctggacccccagaaagggattctgtgggccagctgcaactatatcgccacccagaccgttcgcagccagcattcttggatgcaattgaccgacgggaagacacattttatgttgtctctttccg

SEQ ID NO: 720 - DNA, 425 bp, Homo sapiens; identical to SEQ ID NO: 719
  source 1..425: mol_type = unassigned DNA

SEQ ID NO: 721 - DNA, 2620 bp, Homo sapiens
  source 1..2620: mol_type = unassigned DNA
aaccgtctcctggttggggggtgggggggaaagatggcggagctgatgctgctcagcgagattgctgacccgacgcgtttcttcaccgacaacctgcttagcccggaggactggggtctgcagaacagcaccttgtattctggcctagatgaagtggccgaggagcagacgcagctcttccgttgcccggagcaggatgtcccgtttgacggcagctccctggacgtggggatggatgtcagcccctctgagcccccatgggaactcctgccgatcttcccagatcttcaggtgaagtctgagccatcttccccctgctcttcctcctccctcagctccgagtcatcgcgtctctccacagagccatccagcgaggctcttggggtaggggaggtgctccatgtgaagacagagtccttggcacccccactgtgtctcctgggagatgacccaacatcctcatttgaaaccgtccagatcaacgttatccccacctctgatgattcctcagatgtccagaccaagatagaacctgtctctccatgttcttccgtcaactctgaggcctccctgctctcagccgactcctccagccaggcttttataggagaggaggtcctggaagtgaagacagagtccctgtcgccttcaggatgcctcctgtgggatgtcccagccccctcacttggagctgtccagatcagcatgggcccatcccttgatggctcctcaggcaaagccctgcccacccggaagccgccactgcagcccaaacctgtagtgctaaccactgtcccaatgccatccagagctgtgcctcccagcaccacagtccttctgcagtccctcgtccagccacccccagtgtccccagttgtcctcatccagggtgctattcgagtccagcctgaagggccggctccctctctaccacggcctgagaggaagagcatcgttcccgctcctatgcctggaaactcctgcccgcctgaagtggatgcaaagctgctgaagcggcagcagcgaatgatcaagaaccgggagtcagcctgccagtcccggagaaagaagaaagagtatctgcagggactggaggctcggctgcaagcagtactggctgacaaccagcagctccgccgagagaatgctgccctccggcggcggctggaggccctgctggctgaaaacagcgagctcaagttagggtctggaaacaggaaggtggtctgcatcatggtcttccttctcttcattgccttcaactttggacctgtcagcatcagtgagcctccttcagctcccatctctcctcggatgaacaagggggagcctcaaccccggagacacttgctggggttctcagagcaagagccagttcagggagttgaacctctccaggggtcctcccagggccctaaggagccccagcccagccccacagaccagcccagtttcagcaacctgacagccttccctgggggcgccaaggagctactactaagagacctagaccagctcttcctctcctctgattgccggcacttcaaccgcactgagtccctgaggcttgctgacgagttgagtggctgggtccagcgccaccagagaggccggaggaagatccctcagagggcccaggagagacagaagtctcagccacggaagaagtcacctccagttaaggcagtccccatccaaccccctggacccccagaaagggattctgtgggccagctgcaactatatcgccacccagaccgttcgcagccagcattcttggatgcaattgaccgacgggaagacacattttatgttgtctctttccgaagggaccacctgctgctcccagccatcagccacaacaagacctcccggcccaagatgtccctggtgatgcctgccatggcccccaatgagaccctgtcaggccgtggggccccgggggactatgaggagatgatgcagatcgagtgtgaggtcatggacaccagggtgattcacatcaagacctccacagtgcccccctcgctccgaaaacagccatccccaaccccaggcaatgccacaggtggccccttgccagtctctgcagccagccaggcccaccaggcctcccaccagcccctctacctcaatcatccctgacctctgccattcacactgacttagaacggggggagggggtaccaggtggccaggtgggactgtttcaaatttccctgatccccaggcttggggcaattggtaaaggaaagagcaggtgtgggggttaagcacttatttgaggtgggggtgttcacctctcttctcatcccttttcagaatatagggctcctctcattcctgtgaacccccagtcctggcttctttgtttgaggggattgtgtgaggttcagttgtggggtgggtggtgagctgctgcatattttttattttgtttctctagtgttatggcagtggaggtgggaatttagtccccaggtggaacaagggaagttttttcattttggagctagttactgggagtaagggagggtggggtgggggggagttcaggtttatgtgtgtgcatttcttttttattattattaaataaacaacttggagggagttgaaggaa

SEQ ID NO: 722 - DNA, 2620 bp, Homo sapiens
  source 1..2620: mol_type = unassigned DNA
aaccgtctcctggttgtggggtgggggggaaagatggcggagctgatgctgctcagcgagattgctgacccgacgcgtttcttcaccgacaacctgcttagcccggaggactggggtctgcagaacagcaccttgtattctggcctagatgaagtggccgaggagcagacgcagctcttccgttgcccggagcaggatgtcccgtttgacggcagctccctggacgtggggatggatgtcagcccctctgagcccccatgggaactcctgccgatcttcccagatcttcaggtgaagtctgagccatcttccccctgctcttcctcctccctcagctccgagtcatcgcgtctctccacagagccatccagcgaggctcttggggtaggggaggtgctccatgtgaagacagagtccttggcacccccactgtgtctcctgggagatgacccaacatcctcatttgaaaccgtccagatcaacgttatccccacctctgatgattcctcagatgtccagaccaagatagaacctgtctctccatgttcttccgtcaactctgaggcctccctgctctcagccgactcctccagccaggcttttataggagaggaggtcctggaagtgaagacagagtccctgtccccttcaggatgcctcctgtgggatgtcccagccccctcacttggagctgtccagatcagcatgggcccatcccttgatggctcctcaggcaaagccctgcccacccggaagccgccactgcagcccaaacctgtagtgctaaccactgtcccaatgccatccagagctgtgcctcccagcaccacagtccttctgcagtccctcgtccagccacccccagtgtccccagttgtcctcatccagggtgctattcgagtccagcctgaagggccggctccctctctaccacggcctgagaggaagagcatcgttcccgctcctatgcctggaaactcctgcccgcctgaagtggatgcaaagctgctgaagcggcagcagcgaatgatcaagaaccgggagtcagcctgccagtcccggagaaagaagaaagagtatctgcagggactggaggctcggctgcaagcagtactggctgacaaccagcagctccgccgagagaatgctgccctccggcggcggctggaggccctgctggctgaaaacagcgagctcaagttagggtctggaaacaggaaggtggtctgcatcatggtcttccttctcttcattgccttcaactttggacctgtcagcatcagtgagcctccttcagctcccatctctcctcggatgaacaagggggagcctcaaccccggagacacttgctggggttctcagagcaagagccagttcagggagttgaacctctccaggggtcctcccagggccctaaggagccccagcccagccccacagaccagcccagtttcagcaacctgacagccttccctgggggcgccaaggagctactactaagagacctagaccagctcttcctctcctctgattgccggcacttcaaccgcactgagtccctgaggcttgctgacgagttgagtggctgggtccagcgccaccagagaggccggaggaagatccctcagagggcccaggagagacagaagtctcagccacggaagaagtcacctccagttaaggcagtccccatccaaccccctggacccccagaaagggattctgtgggccagctgcaactatatcgccacccagaccgttcgcagccagcattcttggatgcaattgaccgacgggaagacacattttatgttgtctctttccgaagggaccacctgctgctcccagccatcagccacaacaagacctcccggcccaagatgtccctggtgatgcctgccatggcccccaatgagaccctgtcaggccgtggggccccgggggactatgaggagatgatgcagatcgagtgtgaggtcatggacaccagggtgattcacatcaagacctccacagtgcccccctcgctccgaaaacagccatccccaaccccaggcaatgccacaggtggccccttgccagtctctgcagccagccaggcccaccaggcctcccaccagcccctctacctcaatcatccctgacctctgccattcacactgacttagaacggggggagggggtaccaggtggccaggtgggactgtttcaaatttccctgatccccaggcttggggcaattggtaaaggaaagagcaggtgtgggggttaagcacttatttgaggtgggggtgttcacctctcttctcatcccttttcagaatatagggctcctctcattcctgtgaacccccagtcctggcttctttgtttgaggggattgtgtgaggttcagttgtggggtgggtggtgagctgctgcatattttttattttgtttctctagtgttatggcagtggaggtgggaatttagtccccaggtgggacaagggaagttttttcattttggagctagttactgggagtaagggagggtggggtgggggggagttcaggtttatgtgtgtgcatttcttttttattattattaaataaacaacttggagggagttgaaggaa

SEQ ID NO: 723 - DNA, 2624 bp, Homo sapiens
  source 1..2624: mol_type = unassigned DNA
ggcgggccttgggaaccgtctcctggttggggggtgggggggaaagatggcggagctgatgctgctcagcgagattgctgacccgacgcgtttcttcaccgacaacctgcttagcccggaggactgggacagcaccttgtattctggcctagatgaagtggccgaggagcagacgcagctcttccgttgcccggagcaggatgtcccgtttgacggcagctccctggacgtggggatggatgtcagcccctctgagcccccatgggaactcctgccgatcttcccagatcttcaggtgaagtctgagccatcttccccctgctcttcctcctccctcagctccgagtcatcgcgtctctccacagagccatccagcgaggctcttggggtaggggaggtgctccatgtgaagacagagtccttggcacccccactgtgtctcctgggagatgacccaacatcctcatttgaaaccgtccagatcaacgttatccccacctctgatgattcctcagatgtccagaccaagatagaacctgtctctccatgttcttccgtcaactctgaggcctccctgctctcagccgactcctccagccaggcttttataggagaggaggtcctggaagtgaagacagagtccctgtcgccttcaggatgcctcctgtgggatgtcccagccccctcacttggagctgtccagatcagcatgggcccatcccttgatggctcctcaggcaaagccctgcccacccggaagccgccactgcagcccaaacctgtagtgctaaccactgtcccaatgccatccagagctgtgcctcccagcaccacagtccttctgcagtccctcgtccagccacccccagtgtccccagttgtcctcatccagggtgctattcgagtccagcctgaagggccggctccctctctaccacggcctgagaggaagagcatcgttcccgctcctatgcctggaaactcctgcccgcctgaagtggatgcaaagctgctgaagcggcagcagcgaatgatcaagaaccgggagtcagcctgccagtcccggagaaagaagaaagagtatctgcagggactggaggctcggctgcaagcagtactggctgacaaccagcagctccgccgagagaatgctgccctccggcggcggctggaggccctgctggctgaaaacagcgagctcaagttagggtctggaaacaggaaggtggtctgcatcatggtcttccttctcttcattgccttcaactttggacctgtcagcatcagtgagcctccttcagctcccatctctcctcggatgaacaagggggagcctcaaccccggagacacttgctggggttctcagagcaagagccagttcagggagttgaacctctccaggggtcctcccagggccctaaggagccccagcccagccccacagaccagcccagtttcagcaacctgacagccttccctgggggcgccaaggagctactactaagagacctagaccagctcttcctctcctctgattgccggcacttcaaccgcactgagtccctgaggcttgctgacgagttgagtggctgggtccagcgccaccagagaggccggaggaagatccctcagagggcccaggagagacagaagtctcagccacggaagaagtcacctccagttaaggcagtccccatccaaccccctggacccccagaaagggattctgtgggccagctgcaactatatcgccacccagaccgttcgcagccagcattcttggatgcaattgaccgacgggaagacacattttatgttgtctctttccgaagggaccacctgctgctcccagccatcagccacaacaagacctcccggcccaagatgtccctggtgatgcctgccatggcccccaatgagaccctgtcaggccgtggggccccgggggactatgaggagatgatgcagatcgagtgtgaggtcatggacaccagggtgattcacatcaagacctccacagtgcccccctcgctccgaaaacagccatccccaaccccaggcaatgccacaggtggccccttgccagtctctgcagccagccaggcccaccaggcctcccaccagcccctctacctcaatcatccctgacctctgccattcacactgacttagaacggggggagggggtaccaggtggccaggtgggactgtttcaaatttccctgatccccaggcttggggcaattggtaaaggaaagagcaggtgtgggggttaagcacttatttgaggtgggggtgttcacctctcttctcatcccttttcagaatatagggctcctctcattcctgtgaacccccagtcctggcttctttgtttgaggggattgtgtgaggttcagttgtggggtgggtggtgagctgctgcatattttttattttgtttctctagtgttatggcagtggaggtgggaatttagtccccaggtggaacaagggaagttttttcattttggagctagttactgggagtaagggagggtggggtgggggggagttcaggtttatgtgtgtgcatttcttttttattattattaaataaacaacttggagggagttgaaggaa

SEQ ID NO: 724 - DNA, 425 bp, Homo sapiens; identical to SEQ ID NO: 719
  source 1..425: mol_type = unassigned DNA

SEQ ID NO: 725 - DNA, 2624 bp, Homo sapiens
  source 1..2624: mol_type = unassigned DNA
ggcgggccttgggaaccgtctcctggttgtggggtgggggggaaagatggcggagctgatgctgctcagcgagattgctgacccgacgcgtttcttcaccgacaacctgcttagcccggaggactgggacagcaccttgtattctggcctagatgaagtggccgaggagcagacgcagctcttccgttgcccggagcaggatgtcccgtttgacggcagctccctggacgtggggatggatgtcagcccctctgagcccccatgggaactcctgccgatcttcccagatcttcaggtgaagtctgagccatcttccccctgctcttcctcctccctcagctccgagtcatcgcgtctctccacagagccatccagcgaggctcttggggtaggggaggtgctccatgtgaagacagagtccttggcacccccactgtgtctcctgggagatgacccaacatcctcatttgaaaccgtccagatcaacgttatccccacctctgatgattcctcagatgtccagaccaagatagaacctgtctctccatgttcttccgtcaactctgaggcctccctgctctcagccgactcctccagccaggcttttataggagaggaggtcctggaagtgaagacagagtccctgtccccttcaggatgcctcctgtgggatgtcccagccccctcacttggagctgtccagatcagcatgggcccatcccttgatggctcctcaggcaaagccctgcccacccggaagccgccactgcagcccaaacctgtagtgctaaccactgtcccaatgccatccagagctgtgcctcccagcaccacagtccttctgcagtccctcgtccagccacccccagtgtccccagttgtcctcatccagggtgctattcgagtccagcctgaagggccggctccctctctaccacggcctgagaggaagagcatcgttcccgctcctatgcctggaaactcctgcccgcctgaagtggatgcaaagctgctgaagcggcagcagcgaatgatcaagaaccgggagtcagcctgccagtcccggagaaagaagaaagagtatctgcagggactggaggctcggctgcaagcagtactggctgacaaccagcagctccgccgagagaatgctgccctccggcggcggctggaggccctgctggctgaaaacagcgagctcaagttagggtctggaaacaggaaggtggtctgcatcatggtcttccttctcttcattgccttcaactttggacctgtcagcatcagtgagcctccttcagctcccatctctcctcggatgaacaagggggagcctcaaccccggagacacttgctggggttctcagagcaagagccagttcagggagttgaacctctccaggggtcctcccagggccctaaggagccccagcccagccccacagaccagcccagtttcagcaacctgacagccttccctgggggcgccaaggagctactactaagagacctagaccagctcttcctctcctctgattgccggcacttcaaccgcactgagtccctgaggcttgctgacgagttgagtggctgggtccagcgccaccagagaggccggaggaagatccctcagagggcccaggagagacagaagtctcagccacggaagaagtcacctccagttaaggcagtccccatccaaccccctggacccccagaaagggattctgtgggccagctgcaactatatcgccacccagaccgttcgcagccagcattcttggatgcaattgaccgacgggaagacacattttatgttgtctctttccgaagggaccacctgctgctcccagccatcagccacaacaagacctcccggcccaagatgtccctggtgatgcctgccatggcccccaatgagaccctgtcaggccgtggggccccgggggactatgaggagatgatgcagatcgagtgtgaggtcatggacaccagggtgattcacatcaagacctccacagtgcccccctcgctccgaaaacagccatccccaaccccaggcaatgccacaggtggccccttgccagtctctgcagccagccaggcccaccaggcctcccaccagcccctctacctcaatcatccctgacctctgccattcacactgacttagaacggggggagggggtaccaggtggccaggtgggactgtttcaaatttccctgatccccaggcttggggcaattggtaaaggaaagagcaggtgtgggggttaagcacttatttgaggtgggggtgttcacctctcttctcatcccttttcagaatatagggctcctctcattcctgtgaacccccagtcctggcttctttgtttgaggggattgtgtgaggttcagttgtggggtgggtggtgagctgctgcatattttttattttgtttctctagtgttatggcagtggaggtgggaatttagtccccaggtgggacaagggaagttttttcattttggagctagttactgggagtaagggagggtggggtgggggggagttcaggtttatgtgtgtgcatttcttttttattattattaaataaacaacttggagggagttgaaggaa

SEQ ID NO: 726 - DNA, 425 bp, Homo sapiens; identical to SEQ ID NO: 719
  source 1..425: mol_type = unassigned DNA

SEQ ID NO: 727 - DNA, 771 bp, Homo sapiens; identical to SEQ ID NO: 715
  source 1..771: mol_type = unassigned DNA

SEQ ID NO: 728 - DNA, 771 bp, Homo sapiens; identical to SEQ ID NO: 715
  source 1..771: mol_type = unassigned DNA

SEQ ID NO: 729 - DNA, 771 bp, Homo sapiens; identical to SEQ ID NO: 715
  source 1..771: mol_type = unassigned DNA

SEQ ID NO: 730 - DNA, 6158 bp, Homo sapiens
  source 1..6158: mol_type = unassigned DNA
atgacttctcgcgagagttgagcgcgcctggccggacgggaggaaagtatccgttccgccaaggggggaaaggaggagctggagacagattgtaggaccgagcgcgggcaggcgggaggcaacggagctaccagccgctcctctctgctatatgaaatatgggagacgacagaccgtttgtgtgcaatgccccgggctgtggacagagatttacaaacgaggaccacctggcagttcataaacacaagcatgagatgacattgaaatttggcccagcccgaactgactcagtcatcattgcagatcaaacgcctactccaactagattcctgaagaactgtgaggaggtgggactcttcaatgaactagctagctcctttgaacatgaattcaagaaagctgcagatgaggatgagaaaaaggctgctgctgggccccttgacatgtctctgccttccacaccagacatcaaaatcaaagaagaagagccagtggaggtagactcatccccacctgatagccctgcctctagtccctgttccccaccactgaaggagaagtcaccagctcagcccacccctagtactggggggcgacggcggcgcacagtagatgaagatccagatgagcgacggcagcgctttctggagcgcaaccgggctgcagcctcccgctgccgccaaaagcgaaagctgtgggtgtcctccctagagaagaaggccgaagaactcacttctcagaacattcagctgagtaatgaagtcacattactacgcaatgaggtggcccagttgaaacagctactgttagctcataaagactgcccagtcactgcactacagaaaaagactcaaggctatttagaaagccccaaggaaagctcagagccaacgggttctccagcccctgtgattcagcacagctcagcaacagcccctagcaatggcctcagtgttcgctctgcagctgaagctgtggccacctcggtcctcactcagatggccagccaaaggacagaactgagcatgccgatacaatcgcatgtaatcatgaccccacagtcccagtctgcgggcagatgatgcctcctctggtggagaggtcctcagccagagctcgcccgcccaagagccaagagagatgtcatcttatcccctcccatctgccttggacatggcaatatgggtggggggaattgtgtgttgtgagtaatggacagatatggggctttttagccatgtggtcatgtacgtttgacacctgtgctgggggcctcccagccccggagcctcatagatcatcccccagggtggggtttctgatgcatccacagccaaaggcctttccagatggtccgaacaatcacccctgccccatgcacgtgtatctgtctcttttaacactaacccttggcacttctaggtttggggtttctcagttccctctcttcccactaagccgtggctgttacctttttgttccttaccagcatgccacttcctgccagatagagggaggctagatttgatgacatattacccgctgacccagccccagccaccccatggactcaggactcaggtctcccatagctgcttatttacccgtttcctttttcctcttccttaattctagttaaaacattcacttacggagaatgtaaggttacctttgatgtatgaagtagcagtattttccagtttttccataagctttattccttctctctacctgccaccaaaaagaaagaaaccctcaagagttctaattctttttcatctatttgcagagctatttgggtacctcattttgtcccttgactttagtgtagtggtggggtctttcccaccaccccactaagccttggcaacctcattttgtggccttattattaaagattgcttggtagtgaaaagggaagggcccagaatctgactggctgattctgtctcctcccctccctccttctttagtttaaccatcagggcagacaggaacaaagtatttcaaagcttgttccatcaagttagggattaatcgattcctttatgttttataagagtttaccggccaaagcatattgtcatctttggtcatttttctgctcctgcttctctctcttcattcccctatcaacattaccgcccctgtctctcttctgtaactacttcagactcagccctcctggaggctgtcatgtaggggactctcgagttcctttgttctaccccatctctccccctcacacatctgtctgcttttctgagctagagtcttctgttcacaagtgcccatcaccgtctggactatcttctttctctttcaccaggttcctagcttagccactaggtcttccaggtcctccagagtttcttcaacccatttcttctctcttctctttacatgcagtgctccaggatcttgaagcgtcatagccaagatgctgagtgggtttacttgagtataagattgaaaggagggaggaagaggagagggaaagtgcagaactggtcccagcaaaggaccccaggttctggcctgggaaattggtgactattgctctcaaccattcttactttgaagagttgggttgcagagggagcaattcatctctcttgtccctcttccacgttaaggcttctcatctccccttggctctgaactatgcagtttctaccaggaccataggaagcaattcagagccagaggcctgtggatagataggtcagctttaattgcctttccgtatgaaacccttccagttgtcccagagccactttctgccatctgtgcaagccaagaatgtccttctctccatctttcctacctccatcttaaacatacatacaaaataactgccagcttcctttcttattttgtctccaaaattgactgtcacaggggaatgagaaaatgttctaagctacaagattcccgtttccttaaagtgatatcctgtcctagtgaaccagtcaggtaacaggttctgctgcatttgttttaaatttcccctcctgcttttcagagctggtgctgaacaggccacacccctaaagacaaaggagagaaaacacggttttctcatcctctaccatcaggtacccaacaggaataggccctgaagtgattcagactagcaaatgttatggcagatggtcaggacgcaggttaccacatccagggacttcacttttgcctttaaaaattcacagccgtaacttgtgctcaggacttcccctttagctggctgctccctgggattttctcctgctttagagttttgtttcatttttttattgtcttgatttcccagtagcagccttgccctaaagcttgactgagtttatggctcctaaggagctttcctaagactcttgactatttttcttcccccttcagtcaagtgtttttacagttaagaattaatttgtaactgcatacatgccctgccagtctgtccctgtgttgggtggctaatttatgtagcgggtcttttttatttcttagcccccatgactaattatctagtcctaacttcatttttatcagtgggaagatgtgtacgggacctcagtgaggagcactgccagaaccacagtaacaaaatggcactgaaataaggaagcagcaggtcagaaccccctagatagttcttgagttggttctcagtctcactaaggaggcagaataattgctgccctgaaacttctctgatagtcaaaggtaacttcacttaccttgttattgctaccagccatgtggtcactctccccaaatctttgtcttccagatccatctggaccagaaccaaacatcatggaaggtgtcacttggcccttcctaaagtccatggcgtttctagaggcctaagggaggacactttcagaaaggagctgagtgtatggtgggtgtcctgaattcgttcatgtgaatacaggactcaggcttcccaccccactccaatgtgagtgctcgatacacaagcactctagctagctgccacgtacccaaggccacagagggaggggacagaaccaggtcttctggtctgctcactttctgccccattcccctaacagaaagtttgcttagagttgaaaagtctaagaaagcctcccacaatactagagaggccaacaaaaaaaaagtcatgccccctttacttactcttttgctgctggttatgcatctcaaatctgacttccttagccttcacctccctccttggccctaagcattagaccatgtactctaagtagtggttaaagagggactgagcaaactgaacctcctctcgctcacttctctatccctgttctgttggttttggctcctttcttgattcactgccctctagcaccacccatcctggtagatggagtgcttaaccccaaccgtgccctatgtacagcctgaaccaccaaacagacaccaaaaaaattcttcctgtggtttctggggctcccctgctccacactgagaggctccttaaaggtgctagcccctgatacagctatccccgccagttttctccttttttcataacttccttcccatccccaaatcattaatttttcattaatattgtacattatatacacaggaaggaaatacattattttttttaaatttcataaccagcctgtttagattccagtcttcctagctatatcacatatgccttgttgatatgctctttctgctttctttagacttaatgtttgacgggggtgggggtgtctggaagaacaggaaaggtggggatcctaaggcagattaaaggactccctccaccccactacagcctcccataactctagtcatccctctcatagtacaggactgatttctctgtgtctgtttgtacacacaaatgtgcatacagacataaattcccccaccccataccaaggtggttacctagcaggaatgagcgtaggtggctgctggccaccattaccaccgtctgcatcagctgtgttgtctctctttggggtaaagtcctaccccagaatgagaaaaggctggggagagtagggcaggttaaaggagcttatgtcctctgtagatgtaggtttgtatcatagctactagggtttatttttttaatggggggctaatagcacagagttatctcaccagcagtagctactggtgagtgatgttttagctgtaagaagtggctatgagcaatagtttcactgactttaccttagggcagtgccacagtaatctgggaacttgttagaaatacacattctcaggccccatcccagacttattgaatcacagactctgggggcagggtttaaaagcactccaagtgattctaatgcacactaaaggttgagaaccatttcttagggataagctgggaaatttttacaggtgtggaggatatttcaaatacatcttttgcctttgcactaacatgctttcatttctttcagtctcttcctccattccctttaaagtcttccccatcatatcactgatctcaaaagctagatttgtcttcattttagtcgtatccctaaaaccatgcattggtctggacaggagttgtcccatattcccttgcagactggtcactccatgttctctgttacagtaaggaccagccaagcttcagctgtcccattcctccccctacaacacacacacctttcaggcagggaggagatgagcttccagccccaagagtggaggctgccacatcctaacatagtatctattgaaaaggaagcagtgtgtatctatgattatatctctgttcatctatatatttttgacatgtagcaacacctctccatcttatcaaggaactcaactcggtctgggtctccccagtgcccagtggtggcctttgacaggtaggaggatgcagtgctgcaggctattttgttttttgttacaaaactgtcttttcccttttcccctccacctgattcagcatgatccctgtgagctggttctcacaatctcctgggactgggctgaggcaggggcttcgctctattctccctaaccatactgtcttcctttcccccttgccacttagcagttatccccccagctatgccttctccctccctcccttgccctggcatatattgtgccttatttatgctgcaaatataacattaaactatcaagtg

SEQ ID NO: 731 - DNA, 6582 bp, Homo sapiens
  source 1..6582: mol_type = unassigned DNA
ctcctctctgctatatgaaatatgggagacgacagaccgtttgtgtgcaatgccccgggctgtggacagagatttacaaacgaggaccacctggcagttcataaacacaagcatgagatgacattgaaatttggcccagcccgaactgactcagtcatcattgcagatcaaacgcctactccaactagattcctgaagaactgtgaggaggtgggactcttcaatgaactagctagctcctttgaacatgaattcaagaaagctgcagatgaggatgagaaaaaggcaagaagcaggactgttgccaaaaaactggtggctgctgctgggccccttgacatgtctctgccttccacaccagacatcaaaatcaaagaagaagagccagtggaggtagactcatccccacctgatagccctgcctctagtccctgttccccaccactgaaggagaaggaggttaccccaaagcctgttctgatctctacccccacacccaccattgtacgtcctggctccctgcctctccacttgggctatgatccacttcatccaacccttccctccccaacctctgtcatcacacaggctccaccatccaacaggcaaatggggtctcccactggctccctccctcttgtcatgcatcttgctaatggacagaccatgcctgtgttgccagggcctccagtacagatgccgtctgttatatcgctggccagacctgtgtccatggtgcccaacattcctggtatccctggcccaccagttaacagtagtggctccatttctccctctggccaccctataccatcagaagccaagatgagactgaaagccaccctaactcaccaagtctcctcaatcaatggtggttgtggaatggtggtgggtactgccagcaccatggtgacagcccgcccagagcagagccagattctcatccagcaccctgatgccccatcccctgcccagccacaggtctcaccagctcagcccacccctagtactggggggcgacggcggcgcacagtagatgaagatccagatgagcgacggcagcgctttctggagcgcaaccgggctgcagcctcccgctgccgccaaaagcgaaagctgtgggtgtcctccctagagaagaaggccgaagaactcacttctcagaacattcagctgagtaatgaagtcacattactacgcaatgaggtggcccagttgaaacagctactgttagctcataaagactgcccagtcactgcactacagaaaaagactcaaggctatttagaaagccccaaggaaagctcagagccaacgggttctccagcccctgtgattcagcacagctcagcaacagcccctagcaatggcctcagtgttcgctctgcagctgaagctgtggccacctcggtcctcactcagatggccagccaaaggacagaactgagcatgccgatacaatcgcatgtaatcatgaccccacagtcccagtctgcgggcagatgatgcctcctctggtggagaggtcctcagccagagctcgcccgcccaagagccaagagagatgtcatcttatcccctcccatctgccttggacatggcaatatgggtggggggaattgtgtgttgtgagtaatggacagatatggggctttttagccatgtggtcatgtacgtttgacacctgtgctgggggcctcccagccccggagcctcatagatcatcccccagggtggggtttctgatgcatccacagccaaaggcctttccagatggtccgaacaatcacccctgccccatgcacgtgtatctgtctcttttaacactaacccttggcacttctaggtttggggtttctcagttccctctcttcccactaagccgtggctgttacctttttgttccttaccagcatgccacttcctgccagatagagggaggctagatttgatgacatattacccgctgacccagccccagccaccccatggactcaggactcaggtctcccatagctgcttatttacccgtttcctttttcctcttccttaattctagttaaaacattcacttacggagaatgtaaggttacctttgatgtatgaagtagcagtattttccagtttttccataagctttattccttctctctacctgccaccaaaaagaaagaaaccctcaagagttctaattctttttcatctatttgcagagctatttgggtacctcattttgtcccttgactttagtgtagtggtggggtctttcccaccaccccactaagccttggcaacctcattttgtggccttattattaaagattgcttggtagtgaaaagggaagggcccagaatctgactggctgattctgtctcctcccctccctccttctttagtttaaccatcagggcagacaggaacaaagtatttcaaagcttgttccatcaagttagggattaatcgattcctttatgttttataagagtttaccggccaaagcatattgtcatctttggtcatttttctgctcctgcttctctctcttcattcccctatcaacattaccgcccctgtctctcttctgtaactacttcagactcagccctcctggaggctgtcatgtaggggactctcgagttcctttgttctaccccatctctccccctcacacatctgtctgcttttctgagctagagtcttctgttcacaagtgcccatcaccgtctggactatcttctttctctttcaccaggttcctagcttagccactaggtcttccaggtcctccagagtttcttcaacccatttcttctctcttctctttacatgcagtgctccaggatcttgaagcgtcatagccaagatgctgagtgggtttacttgagtataagattgaaaggagggaggaagaggagagggaaagtgcagaactggtcccagcaaaggaccccaggttctggcctgggaaattggtgactattgctctcaaccattcttactttgaagagttgggttgcagagggagcaattcatctctcttgtccctcttccacgttaaggcttctcatctccccttggctctgaactatgcagtttctaccaggaccataggaagcaattcagagccagaggcctgtggatagataggtcagctttaattgcctttccgtatgaaacccttccagttgtcccagagccactttctgccatctgtgcaagccaagaatgtccttctctccatctttcctacctccatcttaaacatacatacaaaataactgccagcttcctttcttattttgtctccaaaattgactgtcacaggggaatgagaaaatgttctaagctacaagattcccgtttccttaaagtgatatcctgtcctagtgaaccagtcaggtaacaggttctgctgcatttgttttaaatttcccctcctgcttttcagagctggtgctgaacaggccacacccctaaagacaaaggagagaaaacacggttttctcatcctctaccatcaggtacccaacaggaataggccctgaagtgattcagactagcaaatgttatggcagatggtcaggacgcaggttaccacatccagggacttcacttttgcctttaaaaattcacagccgtaacttgtgctcaggacttcccctttagctggctgctccctgggattttctcctgctttagagttttgtttcatttttttattgtcttgatttcccagtagcagccttgccctaaagcttgactgagtttatggctcctaaggagctttcctaagactcttgactatttttcttcccccttcagtcaagtgtttttacagttaagaattaatttgtaactgcatacatgccctgccagtctgtccctgtgttgggtggctaatttatgtagcgggtcttttttatttcttagcccccatgactaattatctagtcctaacttcatttttatcagtgggaagatgtgtacgggacctcagtgaggagcactgccagaaccacagtaacaaaatggcactgaaataaggaagcagcaggtcagaaccccctagatagttcttgagttggttctcagtctcactaaggaggcagaataattgctgccctgaaacttctctgatagtcaaaggtaacttcacttaccttgttattgctaccagccatgtggtcactctccccaaatctttgtcttccagatccatctggaccagaaccaaacatcatggaaggtgtcacttggcccttcctaaagtccatggcgtttctagaggcctaagggaggacactttcagaaaggagctgagtgtatggtgggtgtcctgaattcgttcatgtgaatacaggactcaggcttcccaccccactccaatgtgagtgctcgatacacaagcactctagctagctgccacgtacccaaggccacagagggaggggacagaaccaggtcttctggtctgctcactttctgccccattcccctaacagaaagtttgcttagagttgaaaagtctaagaaagcctcccacaatactagagaggccaacaaaaaaaaagtcatgccccctttacttactcttttgctgctggttatgcatctcaaatctgacttccttagccttcacctccctccttggccctaagcattagaccatgtactctaagtagtggttaaagagggactgagcaaactgaacctcctctcgctcacttctctatccctgttctgttggttttggctcctttcttgattcactgccctctagcaccacccatcctggtagatggagtgcttaaccccaaccgtgccctatgtacagcctgaaccaccaaacagacaccaaaaaaattcttcctgtggtttctggggctcccctgctccacactgagaggctccttaaaggtgctagcccctgatacagctatccccgccagttttctccttttttcataacttccttcccatccccaaatcattaatttttcattaatattgtacattatatacacaggaaggaaatacattattttttttaaatttcataaccagcctgtttagattccagtcttcctagctatatcacatatgccttgttgatatgctctttctgctttctttagacttaatgtttgacgggggtgggggtgtctggaagaacaggaaaggtggggatcctaaggcagattaaaggactccctccaccccactacagcctcccataactctagtcatccctctcatagtacaggactgatttctctgtgtctgtttgtacacacaaatgtgcatacagacataaattcccccaccccataccaaggtggttacctagcaggaatgagcgtaggtggctgctggccaccattaccaccgtctgcatcagctgtgttgtctctctttggggtaaagtcctaccccagaatgagaaaaggctggggagagtagggcaggttaaaggagcttatgtcctctgtagatgtaggtttgtatcatagctactagggtttatttttttaatggggggctaatagcacagagttatctcaccagcagtagctactggtgagtgatgttttagctgtaagaagtggctatgagcaatagtttcactgactttaccttagggcagtgccacagtaatctgggaacttgttagaaatacacattctcaggccccatcccagacttattgaatcacagactctgggggcagggtttaaaagcactccaagtgattctaatgcacactaaaggttgagaaccatttcttagggataagctgggaaatttttacaggtgtggaggatatttcaaatacatcttttgcctttgcactaacatgctttcatttctttcagtctcttcctccattccctttaaagtcttccccatcatatcactgatctcaaaagctagatttgtcttcattttagtcgtatccctaaaaccatgcattggtctggacaggagttgtcccatattcccttgcagactggtcactccatgttctctgttacagtaaggaccagccaagcttcagctgtcccattcctccccctacaacacacacacctttcaggcagggaggagatgagcttccagccccaagagtggaggctgccacatcctaacatagtatctattgaaaaggaagcagtgtgtatctatgattatatctctgttcatctatatatttttgacatgtagcaacacctctccatcttatcaaggaactcaactcggtctgggtctccccagtgcccagtggtggcctttgacaggtaggaggatgcagtgctgcaggctattttgttttttgttacaaaactgtcttttcccttttcccctccacctgattcagcatgatccctgtgagctggttctcacaatctcctgggactgggctgaggcaggggcttcgctctattctccctaaccatactgtcttcctttcccccttgccacttagcagttatccccccagctatgccttctccctccctcccttgccctggcatatattgtgccttatttatgctgcaaatataacattaaactatcaagtg

SEQ ID NO: 732 - DNA, 6623 bp, Homo sapiens
  source 1..6623: mol_type = unassigned DNA
atgacttctcgcgagagttgagcgcgcctggccggacgggaggaaagtatccgttccgccaaggggggaaaggaggagctggagacagattgtaggaccgagcgcgggcaggcgggaggcaacggagctaccagccgctcctctctgctatatgaaatatgggagacgacagaccgtttgtgtgcaatgccccgggctgtggacagagatttacaaacgaggaccacctggcagttcataaacacaagcatgagatgacattgaaatttggcccagcccgaactgactcagtcatcattgcagatcaaacgcctactccaactagattcctgaagaactgtgaggaggtgggactcttcaatgaactagctagctcctttgaacatgaattcaagaaagctgcagatgaggatgagaaaaaggctgctgctgggccccttgacatgtctctgccttccacaccagacatcaaaatcaaagaagaagagccagtggaggaggttaccccaaagcctgttctgatctctacccccacacccaccattgtacgtcctggctccctgcctctccacttgggctatgatccacttcatccaacccttccctccccaacctctgtcatcacacaggctccaccatccaacaggcaaatggggtctcccactggctccctccctcttgtcatgcatcttgctaatggacagaccatgcctgtgttgccagggcctccagtacagatgccgtctgttatatcgctggccagacctgtgtccatggtgcccaacattcctggtatccctggcccaccagttaacagtagtggctccatttctccctctggccaccctataccatcagaagccaagatgagactgaaagccaccctaactcaccaagtctcctcaatcaatggtggttgtggaatggtggtgggtactgccagcaccatggtgacagcccgcccagagcagagccagattctcatccagcaccctgatgccccatcccctgcccagccacaggtctcaccagctcagcccacccctagtactggggggcgacggcggcgcacagtagatgaagatccagatgagcgacggcagcgctttctggagcgcaaccgggctgcagcctcccgctgccgccaaaagcgaaagctgtgggtgtcctccctagagaagaaggccgaagaactcacttctcagaacattcagctgagtaatgaagtcacattactacgcaatgaggtggcccagttgaaacagctactgttagctcataaagactgcccagtcactgcactacagaaaaagactcaaggctatttagaaagccccaaggaaagctcagagccaacgggttctccagcccctgtgattcagcacagctcagcaacagcccctagcaatggcctcagtgttcgctctgcagctgaagctgtggccacctcggtcctcactcagatggccagccaaaggacagaactgagcatgccgatacaatcgcatgtaatcatgaccccacagtcccagtctgcgggcagatgatgcctcctctggtggagaggtcctcagccagagctcgcccgcccaagagccaagagagatgtcatcttatcccctcccatctgccttggacatggcaatatgggtggggggaattgtgtgttgtgagtaatggacagatatggggctttttagccatgtggtcatgtacgtttgacacctgtgctgggggcctcccagccccggagcctcatagatcatcccccagggtggggtttctgatgcatccacagccaaaggcctttccagatggtccgaacaatcacccctgccccatgcacgtgtatctgtctcttttaacactaacccttggcacttctaggtttggggtttctcagttccctctcttcccactaagccgtggctgttacctttttgttccttaccagcatgccacttcctgccagatagagggaggctagatttgatgacatattacccgctgacccagccccagccaccccatggactcaggactcaggtctcccatagctgcttatttacccgtttcctttttcctcttccttaattctagttaaaacattcacttacggagaatgtaaggttacctttgatgtatgaagtagcagtattttccagtttttccataagctttattccttctctctacctgccaccaaaaagaaagaaaccctcaagagttctaattctttttcatctatttgcagagctatttgggtacctcattttgtcccttgactttagtgtagtggtggggtctttcccaccaccccactaagccttggcaacctcattttgtggccttattattaaagattgcttggtagtgaaaagggaagggcccagaatctgactggctgattctgtctcctcccctccctccttctttagtttaaccatcagggcagacaggaacaaagtatttcaaagcttgttccatcaagttagggattaatcgattcctttatgttttataagagtttaccggccaaagcatattgtcatctttggtcatttttctgctcctgcttctctctcttcattcccctatcaacattaccgcccctgtctctcttctgtaactacttcagactcagccctcctggaggctgtcatgtaggggactctcgagttcctttgttctaccccatctctccccctcacacatctgtctgcttttctgagctagagtcttctgttcacaagtgcccatcaccgtctggactatcttctttctctttcaccaggttcctagcttagccactaggtcttccaggtcctccagagtttcttcaacccatttcttctctcttctctttacatgcagtgctccaggatcttgaagcgtcatagccaagatgctgagtgggtttacttgagtataagattgaaaggagggaggaagaggagagggaaagtgcagaactggtcccagcaaaggaccccaggttctggcctgggaaattggtgactattgctctcaaccattcttactttgaagagttgggttgcagagggagcaattcatctctcttgtccctcttccacgttaaggcttctcatctccccttggctctgaactatgcagtttctaccaggaccataggaagcaattcagagccagaggcctgtggatagataggtcagctttaattgcctttccgtatgaaacccttccagttgtcccagagccactttctgccatctgtgcaagccaagaatgtccttctctccatctttcctacctccatcttaaacatacatacaaaataactgccagcttcctttcttattttgtctccaaaattgactgtcacaggggaatgagaaaatgttctaagctacaagattcccgtttccttaaagtgatatcctgtcctagtgaaccagtcaggtaacaggttctgctgcatttgttttaaatttcccctcctgcttttcagagctggtgctgaacaggccacacccctaaagacaaaggagagaaaacacggttttctcatcctctaccatcaggtacccaacaggaataggccctgaagtgattcagactagcaaatgttatggcagatggtcaggacgcaggttaccacatccagggacttcacttttgcctttaaaaattcacagccgtaacttgtgctcaggacttcccctttagctggctgctccctgggattttctcctgctttagagttttgtttcatttttttattgtcttgatttcccagtagcagccttgccctaaagcttgactgagtttatggctcctaaggagctttcctaagactcttgactatttttcttcccccttcagtcaagtgtttttacagttaagaattaatttgtaactgcatacatgccctgccagtctgtccctgtgttgggtggctaatttatgtagcgggtcttttttatttcttagcccccatgactaattatctagtcctaacttcatttttatcagtgggaagatgtgtacgggacctcagtgaggagcactgccagaaccacagtaacaaaatggcactgaaataaggaagcagcaggtcagaaccccctagatagttcttgagttggttctcagtctcactaaggaggcagaataattgctgccctgaaacttctctgatagtcaaaggtaacttcacttaccttgttattgctaccagccatgtggtcactctccccaaatctttgtcttccagatccatctggaccagaaccaaacatcatggaaggtgtcacttggcccttcctaaagtccatggcgtttctagaggcctaagggaggacactttcagaaaggagctgagtgtatggtgggtgtcctgaattcgttcatgtgaatacaggactcaggcttcccaccccactccaatgtgagtgctcgatacacaagcactctagctagctgccacgtacccaaggccacagagggaggggacagaaccaggtcttctggtctgctcactttctgccccattcccctaacagaaagtttgcttagagttgaaaagtctaagaaagcctcccacaatactagagaggccaacaaaaaaaaagtcatgccccctttacttactcttttgctgctggttatgcatctcaaatctgacttccttagccttcacctccctccttggccctaagcattagaccatgtactctaagtagtggttaaagagggactgagcaaactgaacctcctctcgctcacttctctatccctgttctgttggttttggctcctttcttgattcactgccctctagcaccacccatcctggtagatggagtgcttaaccccaaccgtgccctatgtacagcctgaaccaccaaacagacaccaaaaaaattcttcctgtggtttctggggctcccctgctccacactgagaggctccttaaaggtgctagcccctgatacagctatccccgccagttttctccttttttcataacttccttcccatccccaaatcattaatttttcattaatattgtacattatatacacaggaaggaaatacattattttttttaaatttcataaccagcctgtttagattccagtcttcctagctatatcacatatgccttgttgatatgctctttctgctttctttagacttaatgtttgacgggggtgggggtgtctggaagaacaggaaaggtggggatcctaaggcagattaaaggactccctccaccccactacagcctcccataactctagtcatccctctcatagtacaggactgatttctctgtgtctgtttgtacacacaaatgtgcatacagacataaattcccccaccccataccaaggtggttacctagcaggaatgagcgtaggtggctgctggccaccattaccaccgtctgcatcagctgtgttgtctctctttggggtaaagtcctaccccagaatgagaaaaggctggggagagtagggcaggttaaaggagcttatgtcctctgtagatgtaggtttgtatcatagctactagggtttatttttttaatggggggctaatagcacagagttatctcaccagcagtagctactggtgagtgatgttttagctgtaagaagtggctatgagcaatagtttcactgactttaccttagggcagtgccacagtaatctgggaacttgttagaaatacacattctcaggccccatcccagacttattgaatcacagactctgggggcagggtttaaaagcactccaagtgattctaatgcacactaaaggttgagaaccatttcttagggataagctgggaaatttttacaggtgtggaggatatttcaaatacatcttttgcctttgcactaacatgctttcatttctttcagtctcttcctccattccctttaaagtcttccccatcatatcactgatctcaaaagctagatttgtcttcattttagtcgtatccctaaaaccatgcattggtctggacaggagttgtcccatattcccttgcagactggtcactccatgttctctgttacagtaaggaccagccaagcttcagctgtcccattcctccccctacaacacacacacctttcaggcagggaggagatgagcttccagccccaagagtggaggctgccacatcctaacatagtatctattgaaaaggaagcagtgtgtatctatgattatatctctgttcatctatatatttttgacatgtagcaacacctctccatcttatcaaggaactcaactcggtctgggtctccccagtgcccagtggtggcctttgacaggtaggaggatgcagtgctgcaggctattttgttttttgttacaaaactgtcttttcccttttcccctccacctgattcagcatgatccctgtgagctggttctcacaatctcctgggactgggctgaggcaggggcttcgctctattctccctaaccatactgtcttcctttcccccttgccacttagcagttatccccccagctatgccttctccctccctcccttgccctggcatatattgtgccttatttatgctgcaaatataacattaaactatcaagtg

SEQ ID NO: 733 - DNA, 6686 bp, Homo sapiens
  source 1..6686: mol_type = unassigned DNA
atgacttctcgcgagagttgagcgcgcctggccggacgggaggaaagtatccgttccgccaaggggggaaaggaggagctggagacagattgtaggaccgagcgcgggcaggcgggaggcaacggagctaccagccgctcctctctgctatatgaaatatgggagacgacagaccgtttgtgtgcaatgccccgggctgtggacagagatttacaaacgaggaccacctggcagttcataaacacaagcatgagatgacattgaaatttggcccagcccgaactgactcagtcatcattgcagatcaaacgcctactccaactagattcctgaagaactgtgaggaggtgggactcttcaatgaactagctagctcctttgaacatgaattcaagaaagctgcagatgaggatgagaaaaaggctgctgctgggccccttgacatgtctctgccttccacaccagacatcaaaatcaaagaagaagagccagtggaggtagactcatccccacctgatagccctgcctctagtccctgttccccaccactgaaggagaaggaggttaccccaaagcctgttctgatctctacccccacacccaccattgtacgtcctggctccctgcctctccacttgggctatgatccacttcatccaacccttccctccccaacctctgtcatcacacaggctccaccatccaacaggcaaatggggtctcccactggctccctccctcttgtcatgcatcttgctaatggacagaccatgcctgtgttgccagggcctccagtacagatgccgtctgttatatcgctggccagacctgtgtccatggtgcccaacattcctggtatccctggcccaccagttaacagtagtggctccatttctccctctggccaccctataccatcagaagccaagatgagactgaaagccaccctaactcaccaagtctcctcaatcaatggtggttgtggaatggtggtgggtactgccagcaccatggtgacagcccgcccagagcagagccagattctcatccagcaccctgatgccccatcccctgcccagccacaggtctcaccagctcagcccacccctagtactggggggcgacggcggcgcacagtagatgaagatccagatgagcgacggcagcgctttctggagcgcaaccgggctgcagcctcccgctgccgccaaaagcgaaagctgtgggtgtcctccctagagaagaaggccgaagaactcacttctcagaacattcagctgagtaatgaagtcacattactacgcaatgaggtggcccagttgaaacagctactgttagctcataaagactgcccagtcactgcactacagaaaaagactcaaggctatttagaaagccccaaggaaagctcagagccaacgggttctccagcccctgtgattcagcacagctcagcaacagcccctagcaatggcctcagtgttcgctctgcagctgaagctgtggccacctcggtcctcactcagatggccagccaaaggacagaactgagcatgccgatacaatcgcatgtaatcatgaccccacagtcccagtctgcgggcagatgatgcctcctctggtggagaggtcctcagccagagctcgcccgcccaagagccaagagagatgtcatcttatcccctcccatctgccttggacatggcaatatgggtggggggaattgtgtgttgtgagtaatggacagatatggggctttttagccatgtggtcatgtacgtttgacacctgtgctgggggcctcccagccccggagcctcatagatcatcccccagggtggggtttctgatgcatccacagccaaaggcctttccagatggtccgaacaatcacccctgccccatgcacgtgtatctgtctcttttaacactaacccttggcacttctaggtttggggtttctcagttccctctcttcccactaagccgtggctgttacctttttgttccttaccagcatgccacttcctgccagatagagggaggctagatttgatgacatattacccgctgacccagccccagccaccccatggactcaggactcaggtctcccatagctgcttatttacccgtttcctttttcctcttccttaattctagttaaaacattcacttacggagaatgtaaggttacctttgatgtatgaagtagcagtattttccagtttttccataagctttattccttctctctacctgccaccaaaaagaaagaaaccctcaagagttctaattctttttcatctatttgcagagctatttgggtacctcattttgtcccttgactttagtgtagtggtggggtctttcccaccaccccactaagccttggcaacctcattttgtggccttattattaaagattgcttggtagtgaaaagggaagggcccagaatctgactggctgattctgtctcctcccctccctccttctttagtttaaccatcagggcagacaggaacaaagtatttcaaagcttgttccatcaagttagggattaatcgattcctttatgttttataagagtttaccggccaaagcatattgtcatctttggtcatttttctgctcctgcttctctctcttcattcccctatcaacattaccgcccctgtctctcttctgtaactacttcagactcagccctcctggaggctgtcatgtaggggactctcgagttcctttgttctaccccatctctccccctcacacatctgtctgcttttctgagctagagtcttctgttcacaagtgcccatcaccgtctggactatcttctttctctttcaccaggttcctagcttagccactaggtcttccaggtcctccagagtttcttcaacccatttcttctctcttctctttacatgcagtgctccaggatcttgaagcgtcatagccaagatgctgagtgggtttacttgagtataagattgaaaggagggaggaagaggagagggaaagtgcagaactggtcccagcaaaggaccccaggttctggcctgggaaattggtgactattgctctcaaccattcttactttgaagagttgggttgcagagggagcaattcatctctcttgtccctcttccacgttaaggcttctcatctccccttggctctgaactatgcagtttctaccaggaccataggaagcaattcagagccagaggcctgtggatagataggtcagctttaattgcctttccgtatgaaacccttccagttgtcccagagccactttctgccatctgtgcaagccaagaatgtccttctctccatctttcctacctccatcttaaacatacatacaaaataactgccagcttcctttcttattttgtctccaaaattgactgtcacaggggaatgagaaaatgttctaagctacaagattcccgtttccttaaagtgatatcctgtcctagtgaaccagtcaggtaacaggttctgctgcatttgttttaaatttcccctcctgcttttcagagctggtgctgaacaggccacacccctaaagacaaaggagagaaaacacggttttctcatcctctaccatcaggtacccaacaggaataggccctgaagtgattcagactagcaaatgttatggcagatggtcaggacgcaggttaccacatccagggacttcacttttgcctttaaaaattcacagccgtaacttgtgctcaggacttcccctttagctggctgctccctgggattttctcctgctttagagttttgtttcatttttttattgtcttgatttcccagtagcagccttgccctaaagcttgactgagtttatggctcctaaggagctttcctaagactcttgactatttttcttcccccttcagtcaagtgtttttacagttaagaattaatttgtaactgcatacatgccctgccagtctgtccctgtgttgggtggctaatttatgtagcgggtcttttttatttcttagcccccatgactaattatctagtcctaacttcatttttatcagtgggaagatgtgtacgggacctcagtgaggagcactgccagaaccacagtaacaaaatggcactgaaataaggaagcagcaggtcagaaccccctagatagttcttgagttggttctcagtctcactaaggaggcagaataattgctgccctgaaacttctctgatagtcaaaggtaacttcacttaccttgttattgctaccagccatgtggtcactctccccaaatctttgtcttccagatccatctggaccagaaccaaacatcatggaaggtgtcacttggcccttcctaaagtccatggcgtttctagaggcctaagggaggacactttcagaaaggagctgagtgtatggtgggtgtcctgaattcgttcatgtgaatacaggactcaggcttcccaccccactccaatgtgagtgctcgatacacaagcactctagctagctgccacgtacccaaggccacagagggaggggacagaaccaggtcttctggtctgctcactttctgccccattcccctaacagaaagtttgcttagagttgaaaagtctaagaaagcctcccacaatactagagaggccaacaaaaaaaaagtcatgccccctttacttactcttttgctgctggttatgcatctcaaatctgacttccttagccttcacctccctccttggccctaagcattagaccatgtactctaagtagtggttaaagagggactgagcaaactgaacctcctctcgctcacttctctatccctgttctgttggttttggctcctttcttgattcactgccctctagcaccacccatcctggtagatggagtgcttaaccccaaccgtgccctatgtacagcctgaaccaccaaacagacaccaaaaaaattcttcctgtggtttctggggctcccctgctccacactgagaggctccttaaaggtgctagcccctgatacagctatccccgccagttttctccttttttcataacttccttcccatccccaaatcattaatttttcattaatattgtacattatatacacaggaaggaaatacattattttttttaaatttcataaccagcctgtttagattccagtcttcctagctatatcacatatgccttgttgatatgctctttctgctttctttagacttaatgtttgacgggggtgggggtgtctggaagaacaggaaaggtggggatcctaaggcagattaaaggactccctccaccccactacagcctcccataactctagtcatccctctcatagtacaggactgatttctctgtgtctgtttgtacacacaaatgtgcatacagacataaattcccccaccccataccaaggtggttacctagcaggaatgagcgtaggtggctgctggccaccattaccaccgtctgcatcagctgtgttgtctctctttggggtaaagtcctaccccagaatgagaaaaggctggggagagtagggcaggttaaaggagcttatgtcctctgtagatgtaggtttgtatcatagctactagggtttatttttttaatggggggctaatagcacagagttatctcaccagcagtagctactggtgagtgatgttttagctgtaagaagtggctatgagcaatagtttcactgactttaccttagggcagtgccacagtaatctgggaacttgttagaaatacacattctcaggccccatcccagacttattgaatcacagactctgggggcagggtttaaaagcactccaagtgattctaatgcacactaaaggttgagaaccatttcttagggataagctgggaaatttttacaggtgtggaggatatttcaaatacatcttttgcctttgcactaacatgctttcatttctttcagtctcttcctccattccctttaaagtcttccccatcatatcactgatctcaaaagctagatttgtcttcattttagtcgtatccctaaaaccatgcattggtctggacaggagttgtcccatattcccttgcagactggtcactccatgttctctgttacagtaaggaccagccaagcttcagctgtcccattcctccccctacaacacacacacctttcaggcagggaggagatgagcttccagccccaagagtggaggctgccacatcctaacatagtatctattgaaaaggaagcagtgtgtatctatgattatatctctgttcatctatatatttttgacatgtagcaacacctctccatcttatcaaggaactcaactcggtctgggtctccccagtgcccagtggtggcctttgacaggtaggaggatgcagtgctgcaggctattttgttttttgttacaaaactgtcttttcccttttcccctccacctgattcagcatgatccctgtgagctggttctcacaatctcctgggactgggctgaggcaggggcttcgctctattctccctaaccatactgtcttcctttcccccttgccacttagcagttatccccccagctatgccttctccctccctcccttgccctggcatatattgtgccttatttatgctgcaaatataacattaaactatcaagtg

SEQ ID NO: 734 - DNA, 2634 bp, Homo sapiens
  source 1..2634: mol_type = unassigned DNA
gctcctctctgctatatgaaatatgggagacgacagaccgtttgtgtgcaatgccccgggctgtggacagagatttacaaacgaggaccacctggcagttcataaacacaagcatgagatgacattgaaatttggcccagcccgaactgactcagtcatcattgcagatcaaacgcctactccaactagattcctgaagaactgtgaggaggtgggactcttcaatgaactagctagctcctttgaacatgaattcaagaaagctgcagatgaggatgagaaaaaggctgctgctgggccccttgacatgtctctgccttccacaccagacatcaaaatcaaagaagaagagccagtggaggtagactcatccccacctgatagccctgcctctagtccctgttccccaccactgaaggagaaggaggttaccccaaagcctgttctgatctctacccccacacccaccattgtacgtcctggctccctgcctctccacttgggctatgatccacttcatccaacccttccctccccaacctctgtcatcacacaggctccaccatccaacaggcaaatggggtctcccactggctccctccctcttgtcatgcatcttgctaatggacagaccatgcctgtgttgccagggcctccagtacagatgccgtctgttatatcgctggccagacctgtgtccatggtgcccaacattcctggtatccctggcccaccagttaacagtagtggctccatttctccctctggccaccctataccatcagaagccaagatgagactgaaagccaccctaactcaccaagtctcctcaatcaatggtggttgtggaatggtggtgggtactgccagcaccatggtgacagcccgcccagagcagagccagattctcatccagcaccctgatgccccatcccctgcccagccacaggtctcaccagctcagcccacccctagtactggggggcgacggcggcgcacagtagatgaagatccagatgagcgacggcagcgctttctggagcgcaaccgggctgcagcctcccgctgccgccaaaagcgaaagctgtgggtgtcctccctagagaagaaggccgaagaactcacttctcagaacattcagctgagtaatgaagtcacattactacgcaatgaggtggcccagttgaaacagctactgttagctcataaagactgcccagtcactgcactacagaaaaagactcaaggctatttagaaagccccaaggaaagctcagagccaacgggttctccagcccctgtgattcagcacagctcagcaacagcccctagcaatggcctcagtgttcgctctgcagctgaagctgtggccacctcggtcctcactcagatggccagccaaaggacagaactgagcatgccgatacaatcgcatgtaatcatgaccccacagtcccagtctgcgggcagatgatgcctcctctggtggagaggtcctcagccagagctcgcccgcccaagagccaagagagatgtcatcttatcccctcccatctgccttggacatggcaatatgggtggggggaattgtgtgttgtgagtaatggacagatatggggctttttagccatgtggtcatgtacgtttgacacctgtgctgggggcctcccagccccggagcctcatagatcatcccccagggtggggtttctgatgcatccacagccaaaggcctttccagatggtccgaacaatcacccctgccccatgcacgtgtatctgtctcttttaacactaacccttggcacttctaggtttggggtttctcagttccctctcttcccactaagccgtggctgttacctttttgttccttaccagcatgccacttcctgccagatagagggaggctagatttgatgacatattacccgctgacccagccccagccaccccatggactcaggactcaggtctcccatagctgcttatttacccgtttcctttttcctcttccttaattctagttaaaacattcacttacggagaatgtaaggttacctttgatgtatgaagtagcagtattttccagtttttccataagctttattccttctctctacctgccaccaaaaagaaagaaaccctcaagagttctaattctttttcatctatttgcagagctatttgggtacctcattttgtcccttgactttagtgtagtggtggggtctttcccaccaccccactaagccttggcaacctcattttgtggccttattattaaagattgcttggtagtgaaaagggaagggcccagaatctgactggctgattctgtctcctcccctccctccttctttagtttaaccatcagggcagacaggaacaaagtatttcaaagcttgttccatcaagttagggattaatcgattcctttatgttttataagagtttaccggccaaagcatattgtcatctttggtcatttttctgctcctgcttctctctcttcattcccctatcaacattaccgcccctgtctctcttctgtaactacttcagactcagccctcctggaggctgtcatgtaggggactctcgagttcctttgttctaccccatctctccccc

SEQ ID NO: 735 - DNA, 1801 bp, Homo sapiens
  source 1..1801: mol_type = unassigned DNA
gctcctctctgctatatgaaatatgggagacgacagaccgtttgtgtgcaatgccccgggctgtggacagagatttacaaacgaggaccacctggcagttcataaacacaagcatgagatgacattgaaatttggcccagcccgaactgactcagtcatcattgcagatcaaacgcctactccaactagattcctgaagaactgtgaggaggtgggactcttcaatgaactagctagctcctttgaacatgaattcaagaaagctgcagatgaggatgagaaaaaggcaagaagcaggactgttgccaaaaaactggtggctgctgctgggccccttgacatgtctctgccttccacaccagacatcaaaatcaaagaagaagagccagtggaggtagactcatccccacctgatagccctgcctctagtccctgttccccaccactgaaggagaaggaggttaccccaaagcctgttctgatctctacccccacacccaccattgtacgtcctggctccctgcctctccacttgggctatgatccacttcatccaacccttccctccccaacctctgtcatcacacaggctccaccatccaacaggcaaatggggtctcccactggctccctccctcttgtcatgcatcttgctaatggacagaccatgcctgtgttgccagggcctccagtacagatgccgtctgttatatcgctggccagacctgtgtccatggtgcccaacattcctggtatccctggcccaccagttaacagtagtggctccatttctccctctggccaccctataccatcagaagccaagatgagactgaaagccaccctaactcaccaagtctcctcaatcaatggtggttgtggaatggtggtgggtactgccagcaccatggtgacagcccgcccagagcagagccagattctcatccagcaccctgatgccccatcccctgcccagccacaggtctcaccagctcagcccacccctagtactggggggcgacggcggcgcacagtagatgaagatccagatgagcgacggcagcgctttctggagcgcaaccgggctgcagcctcccgctgccgccaaaagcgaaagctgtgggtgtcctccctagagaagaaggccgaagaactcacttctcagaacattcagctgagtaatgaagtcacattactacgcaatgaggtggcccagttgaaacagctactgttagctcataaagactgcccagtcactgcactacagaaaaagactcaaggctatttagaaagccccaaggaaagctcagagccaacgggttctccagcccctgtgattcagcacagctcagcaacagcccctagcaatggcctcagtgttcgctctgcagctgaagctgtggccacctcggtcctcactcagatggccagccaaaggacagaactgagcatgccgatacaatcgcatgtaatcatgaccccacagtcccagtctgcgggcagatgatgcctcctctggtggagaggtcctcagccagagctcgcccgcccaagagccaagagagatgtcatcttatcccctcccatctgccttggacatggcaatatgggtggggggaattgtgtgttgcaaatctgagtagcctccaagaggcacacaagcagaggatgggctgtgttgccctgactgccagccccaggcacagaggaccaggcctggtcatcctcacagactctgaccctggctcttcccactcctcttccactccaggacatcctacttaacccctcctgacatgag

SEQ ID NO: 736 - DNA, 774 bp, Homo sapiens
  source 1..774: mol_type = unassigned DNA
ggggggaaggcggggccagaggcttgaagtgtggggagaacttggtctcctctctgctatatgaaatatgggagacgacagaccgtttgtgtgcaatgccccgggctgtggacagagatttacaaacgaggaccacctggcagttcataaacacaagcatgagatgacattgaaatttggcccagcccgaactgactcagtcatcattgcagatcaaacgcctactccaactagattcctgaagaactgtgaggaggtgggactcttcaatgaactagctagctcctttgaacatgaattcaagaaagctgcagatgaggatgagaaaaaggcaagaagcaggactgttgccaaaaaactggtggtattcagacctaggctatttttattgtgctttgggataattttcttaattggttaaaacacaaaatcatgggcttagtagagtaaaaccagtaaaaccagatagtagtcactaatcccagtcagccattcaggtctttaggagttccagatgatggatcagcacaagtctgtcgtcaccgaaaattagtcctcttgttcttccaggggagtattagtttaataatcggttttttaaaaaatatttatattataaatatgttgaagatgttaaaaggtgataaattactcagattttgttggataacatatttgttgccaaattccactcttttctgagctgatcagacttctcagctacactgtttttttgaatcagcaagtcaataaacatttatcaaatttccactc

SEQ ID NO: 737 - DNA, 860 bp, Homo sapiens
  source 1..860: mol_type = unassigned DNA
ttctcgcgagagttgagcgcgcctggccggacgggaggaaagtatccgttccgccaaggggggaaaggaggagctggagacagattgtaggaccgagcgcgggcaggcgggaggcaacggagctaccagccgctcctctctgctatatgaaatatgggagacgacagaccgtttgtgtgcaatgccccgggctgtggacagagatttacaaacgaggaccacctggcagttcataaacacaagcatgagatgacattgaaatttggcccagcccgaactgactcagtcatcattgcagatcaaacgcctactccaactagattcctgaagaactgtgaggaggtgggactcttcaatgaactagctagctcctttgaacatgaattcaagaaagctgcagatgaggatgagaaaaaggcaagaagcaggactgttgccaaaaaactggtggtattcagacctaggctatttttattgtgctttgggataattttcttaattggttaaaacacaaaatcatgggcttagtagagtaaaaccagtaaaaccagatagtagtcactaatcccagtcagccattcaggtctttaggagttccagatgatggatcagcacaagtctgtcgtcaccgaaaattagtcctcttgttcttccaggggagtattagtttaataatcggttttttaaaaaatatttatattataaatatgttgaagatgttaaaaggtgataaattactcagattttgttggataacatatttgttgccaaattccactcttttctgagctgatcagacttctcagctacactgtttttttgaatcagcaagtcaataaacatttatcaaatttccactc

SEQ ID NO: 738 - DNA, 4656 bp, Homo sapiens
  source 1..4656: mol_type = unassigned DNA
gaatctgcggaggcggcggcggtggcagcggcggcgcggcgactgaagcgcgcgaaaagctgaggcggcaacgtcggggacggctgcgcgggacggctctgtaggaaggaacttggttccccctccctcagcttccgccccaaaagattcagaatggacagtttagaagaacctcagaaaaaagtctttaaggctcgaaaaacgatgagagtgagtgatcgtcagcaacttgaagcagtgtacaaggtcaaagaagaactgttgaaaactgatgtcaagctgttaaatggcaaccatgaaaatggagatttggacccaacctcacctttggaaaacatggattacattaaagacaaggaagaggtgaatggcattgaagagatttgttttgatcctgaaggaagtaaagcagaatggaaggaaacaccctgtatcctaagtgttaatgtaaaaaacaagcaggatgatgatttaaattgtgaacctttgtctccccataatataactccagaaccagtctctaaactgcctgctgaaccagtttctggtgatccagcccctggtgatctggatgccggagatccagcctccggagtactggcctctggtgattccacctctggtgatcccacctctagcgagccctcctctagtgatgctgcctctggtgatgcaacctctggtgatgccccttctggtgatgtgtcccctggtgatgccacctctggtgatgccactgctgatgatctctcctctggtgatcccacctctagtgatcccatcccaggtgaaccggtccctgttgaacccatttctggtgattgtgccgctgatgatatagcctctagtgaaataacttctgttgatctggcttctggagcaccagcttccactgatccagcctctgatgatctggcctctggtgatctatcctctagtgaactggcctctgatgatctggccactggtgaactggcctctgatgagctgacttctgaatcaacctttgatcgtacctttgaaccaaagtctgtaccagtttgtgaaccagttcctgaaattgacaatatagaaccaagtagcaataaagatgatgattttcttgaaaaaaatggagctgatgaaaaattagagcaaattcagagtaaagactcattggatgagaaaaataaagctgataataatattgatgctaatgaagaaactctagaaacagatgatacaactatttgttcagatcgacctcctgaaaatgaaaagaaggtagaggaagatattatcacagagcttgctcttggagaagatgctatatctagcagtatggaaattgaccaaggtgaaaagaatgaagatgaaacttctgcagatcttgtagaaacgattaatgaaaatgttattgaagataacaaaagtgagaatatcttagaaaatacagactctatggagacagatgaaatcattcctattttggaaaagcttgcaccttctgaggatgaacttacttgcttttctaaaacatctctccttccaatcgatgagacaaatccagatttggaagagaaaatggaaagttcttttggttcaccatctaaacaagaaagtagtgagagtttgccaaaagaagcctttctggtcctctctgatgaagaggatatttcgggtgaaaaagatgagtctgaagttatatcgcaaaatgaaacgtgctctccagcagaagtagaaagtaatgaaaaggacaacaaacctgaggaagaagagcaagtaatacatgaagatgatgaaagaccttctgagaaaaatgaattttctagacgaaaacgttctaaatcagaagacatggacaatgtacagtctaaacgtcgtcgatatatggaagaagaatatgaggcagaatttcaagtaaagattacagccaaaggagacattaaccagaaacttcaaaaggttatacagtggttgctggaagaaaaattgtgtgcgctgcagtgtgctgtatttgataagactttggcagaattgaaaacacgagtggaaaagattgaatgtaacaagaggcataaaacagttctcactgaactacaggccaagatagccaggttaaccaaacgctttgaagcagccaaagaagatcttaagaaaagacatgaacatccacccaacccaccagtatcaccaggaaaaactgtaaatgatgtcaacagcaataataacatgtcttacagaaatgcaggcacagtgagacagatgctggagtccaaaagaaatgtaagcgagagtgcaccaccatcctttcaaactcctgtgaatacagtatcttcaaccaatcttgtcactcctccagcagttgtcagtagtcaacctaaattgcagactccagtgacttcgggttccctcacagcaacgtcagttcttcctgcacccaatacagctactgtagttgctactactcaggtgcctagtggaaatccccagcctacaatctctttacagcctttgccagtgattttgcatgtacctgttgcagtatcctcccagcctcagcttctacagagccatccagggactttggtgactaatcaaccatctggcaatgttgaattcatttctgtgcaaagcccacctacagtgagtggtcttaccaaaaatccagtatccttgccatccttgccaaatcccactaaaccaaacaacgttccttctgtgcccagtcctagtattcaaaggaaccctactgccagtgctgcaccattgggaacaacacttgctgtgcaggctgttccaacagcacactctattgtacaagccacaaggacttctttacccacagtgggcccatcaggactctatagtccatcaactaatcgaggtcctatacagatgaaaattccaatttctgcatttagtacttcgtctgctgcagaacagaacagcaataccaccccaagaattgaaaaccagacaaacaaaacaatagatgcttctgtcagtaagaaagcagctgatagcacatcacagtgtggaaaagccactggcagtgattcaagtggtgtcattgatctcacaatggatgatgaagagagtggagcttcacaagaccccaaaaaactaaatcacactcctgtatcaaccatgagttcttctcagcctgtgtcacgaccattgcaacccatacaaccagcaccgcctcttcaaccatctggggtgccaacaagtggaccatctcagaccaccatacacttactacctacagctccaactaccgtgaatgtaacacatcgtccagtaactcaggtgaccacaagactccctgtaccaagagctcctgcaaaccaccaggtggtttatacaactcttcctgcaccaccagctcaggctcccttgcgaggaactgttatgcaggctcctgctgttcggcaggtcaatccccaaaatagtgttacagttcgagtgcctcaaacaaccacatatgttgtaaacaatggactaaccctgggatcaacaggacctcagctcacagtgcatcaccgaccaccacaagtgcatactgagcccccacgccccgtgcacccagcacccttaccagaagctccacaaccacagcgtctgcccccagaagctgccagcacatctctgcctcagaagccacacttgaagttagcacgcgttcagagtcaaaatggcatagtactgtcatggagtgtcctggaggtggatcgaagctgtgccactgttgatagctaccatctctatgcttaccatgaggaacccagtgccactgtgccctcacaatggaaaaagattggggaagtcaaggcacttcccttgcccatggcatgtactctcacccagtttgtatctggtagcaaatactactttgcagtacgagccaaggatatttatggacgttttgggcctttctgtgatcctcagtcaacagatgtgatctcttctacccagagcagttaaaccttggagcctttatattttcctcttttaaaatttccaccttttggtcttgtttttaatcttgtgcatgataccccatgtaaaatccaccttgtgcaagatttcttggacagatgtgtgtatacactacatttgtttataaccagaagcaaaataaactcagcccacaaagctagaatcttttcctggacagtttaggctttggggtttggaaatgtaaatgtgtaccttgctttagttttgaggctggggaatatgtgtgggtgtttatgtgtgtttttccttatgtaggtgttattgcattggagtctcccattttcattctcaaatttacctcttaaagtacgaagtaagtagatcaaaggatttgagatgtgtaactggcatgattctgcttttgaaggatctatagtatcattttagttaagtgggtcaaacagaatcaaaacaaaacccaaagaaataaataaaaaacaaaatggctaaatagtttaaaataggttaattcgaacacaggaaaggatctatttgttgtttcttttgtctggtctcctgagttgttaattaggtgaaaaaagatctgcaatggccccctccctttcctaatctggcttttacatttattttgtgccttaaagattaactacaaagataaacatggccaaaaataaataaataaatatggccata

SEQ ID NO: 739 - DNA, 1727 bp, Homo sapiens
  source 1..1727: mol_type = unassigned DNA
aaggtaaccaaaactaagaaattgatgttaggtaatttgcccagtctcacacagtaggtttcctgggagagttggaattcaaatctgtgaatctgtctacagtctacagagttcatgttcttaattgggttattaaaagtgatgaatttttttaaaggaatgcttacttttaatattcagaatggacagtttagaagaacctcagaaaaaagtctttaaggctcgaaaaacgatgagagtgagtgatcgtcagcaacttgaagcagtgtacaaggtcaaagaagaactgttgaaaactgatgtcaagctgttaaatggcaaccatgaaaatggagatttggacccaacctcacctttggaaaacatggattacattaaagacaaggaagaggtgaatggcattgaagagatttgttttgatcctgaaggaagtaaagcagaatggaaggaaacaccctgtatcctaagtgttaatgtaaaaaacaagcaggatgatgatttaaattgtgaacctttgtctccccataatataactccagaaccagtctctaaactgcctgctgaaccagtttctggtgatccagcccctggtgatctggatgccggagatccagcctccggagtactggcctctggtgattccacctctggtgatcccacctctagcgagccctcctctagtgatgctgcctctggtgatgcaacctctggtgatgccccttctggtgatgtgtcccctggtgatgccacctctggtgatgccactgctgatgatctctcctctggtgatcccacctctagtgatcccatcccaggtgaaccggtccctgttgaacccatttctggtgattgtgccgctgatgatatagcctctagtgaaataacttctgttgatctggcttctggagcaccagcttccactgatccagcctctgatgatctggcctctggtgatctatcctctagtgaactggcctctgatgatctggccactggtgaactggcctctgatgagctgacttctgaatcaacctttgatcgtacctttgaaccaaagtctgtaccagtttgtgaaccagttcctgaaattgacaatatagaaccaagtagcaataaagatgatgattttcttgaaaaaaatggagctgatgaaaaattagagcaaattcagagtaaagactcattggatgagaaaaataaagctgataataatattgatgctaatgaagaaactctagaaacagatgatacaactatttgttcagatcgacctcctgaaaatgaaaagaaggtagaggaagatattatcacagagcttgctcttggagaagatgctatatctagcagtatggaaattgaccaaggtgaaaagaatgaagatgaaacttctgcagatcttgtagaaacgattaatgaaaatgttattgaagataacaaaagtgagaatatcttagaaaatacagactctatggagacagatgaaatcattcctattttggaaaagcttgcaccttctgaggatgaacttacttgcttttctaaaacatctctccttccaatcgatgagacaaatccagatttggaagagaaaatggaaagttcttttggttcaccatctaaacaagaaagtagtgagagtttgccaaaagaagcctttctggtcctctctgatgaagaggatatttcgggtgaaaaagatgagtctgaagttatatcgcaaaatgaaa

SEQ ID NO: 740 - DNA, 555 bp, Homo sapiens
  source 1..555: mol_type = unassigned DNA
aggtgttggtattagtccctttttaagggaggacagactattacaagataaagctgtaattgataaagaagttggcctggtgtggtggctcacacctgtaatcccagcactttgggaggccgaggcaggtggatcacgaggtcagaagatcaagaccatcctggctaacacgattcagaatggacagtttagaagaacctcagaaaaaagtctttaaggctcgaaaaacgatgagagtgagtgatcgtcagcaacttgaagcagtgtacaaggtcaaagaagaactgttgaaaactgatgtcaagctgttaaatggcaaccatgaaaatggagatttggacccaacctcacctttggaaaacatggattacattaaagacaaggaagaggtgaatggcattgaagagatttgttttgatcctgaaggaagtaaagcagaatggaaggaaacaccctgtatcctaagtgttaatgtaaaaaacaagcaggatgatgatttaaattgtgaacctttgtctccccataatataactccagaaccagtctctaaactgc

SEQ ID NO: 741 - DNA, 550 bp, Homo sapiens
  source 1..550: mol_type = unassigned DNA
ttcttctttttttctcaagagaatatttgacctgatgtaattcttggatctctgaggtcttctacacagaagtatatttagagagcaattcagaatggacagtttagaagaacctcagaaaaaagtctttaaggctcgaaaaacgatgagagtgagtgatcgtcagcaacttgaagcagtgtacaaggtcaaagaagaactgttgaaaactgatgtcaagctgttaaatggcaaccatgaaaatggagatttggacccaacctcacctttggaaaacatggattacattaaagacaaggaagaggtgaatggcattgaagagatttgttttgatcctgaaggaagtaaagcagaatggaaggaaacaccctgtatcctaagtgttaatgtaaaaaacaagcaggatgatgatttaaattgtgaacctttgtctccccataatataactccagaaccagtctctaaactgcctgctgaaccagtttctggtgatccagcccctggtgatctggatgccggagatccagcctccggagtactggcctctggt

SEQ ID NO: 742 - DNA, 572 bp, Homo sapiens
  source 1..572: mol_type = unassigned DNA
tttctcaagagaatatttgacctgatgtaattcttggatctctgaggtcttctacacagaagtatatttagagagcacctcattatgttgcccaggctggtcttgaactccaggggtcaagagagtttcccacttcagcctcccaaagtgctgagattacaagcatgagccaccatgtccagcctgtactgcctttcctttttcctttatgatttctacagcacttgtctgcccagaaaatattacctgttgtaagattcagaatggacagtttagaagaacctcagaaaaaagtctttaaggctcgaaaaacgatgagagtgagtgatcgtcagcaacttgaagcagtgtacaaggtcaaagaagaactgttgaaaactgatgtcaagctgttaaatggcaaccatgaaaatggagatttggacccaacctcacctttggaaaacatggattacattaaagacaaggaagaggtgaatggcattgaagagatttgttttgatcctgaaggaagtaaagcagaatggaaggaaacaccctgtatcctaagtgttaatgtaaaaaacaagcag

SEQ ID NO: 743 - DNA, 571 bp, Homo sapiens
  source 1..571: mol_type = unassigned DNA
gatgttaggtaatttgcccagtctcacacagtaggtttcctgggagagttggaattcaaatctgtgaatctgtctacagtctacagagttcatgttcttaattgggttattaaaagtgatgaatttttttaaaggaatgcttacttttaatggaggacagactattacaagataaagctgtaattgataaagaagttggcctggtgtggtggctcacacctgtaatcccagcactttgggaggccgaggcaggtggatcacgaggtcagaagatcaagaccatcctggctaacacgattcagaatggacagtttagaagaacctcagaaaaaagtctttaaggctcgaaaaacgatgagagtgagtgatcgtcagcaacttgaagcagtgtacaaggtcaaagaagaactgttgaaaactgatgtcaagctgttaaatggcaaccatgaaaatggagatttggacccaacctcacctttggaaaacatggattacattaaagacaaggaagaggtgaatggcattgaagagatttgttttgatcctgaaggaagtaaagcagaatggaagg

SEQ ID NO: 744 - DNA, 573 bp, Homo sapiens
  source 1..573: mol_type = unassigned DNA
aaactaagagtatggctgcagcaagctccctcttggattcagaatggacagtttagaagaacctcagaaaaaagtctttaaggctcgaaaaacgatgagagtgagtgatcgtcagcaacttgaagcagtgtacaaggtcaaagaagaactgttgaaaactgatgtcaagctgttaaatggcaaccatgaaaatggagatttggacccaacctcacctttggaaaacatggattacattaaagacaaggaagaggtgaatggcattgaagagatttgttttgatcctgaaggaagtaaagcagaatggaaggaaacaccctgtatcctaagtgttaatgtaaaaaacaagcaggatgatgatttaaattgtgaacctttgtctccccataatataactccagaaccagtctctaaactgcctgctgaaccagtttctggtgatccagcccctggtgatctggatgccggagatccagcctccggagtactggcctctggtgattccacctctggtgatcccacctctagcgagccctcctctagtgatgctgcctctggtgatgcaacctctgg

SEQ ID NO: 745 - DNA, 4142 bp, Homo sapiens
  source 1..4142: mol_type = unassigned DNA
tagtatacaacaagcagtaggttttctatgtcttaaacattacatgaaatgtgctgcttgcatctcttctaagatcaatttgtattaagtctacaattaggtggcttctgtttcagttattaaactctctttctcttttttcttaaagattcagaatggacagtttagaagaacctcagaaaaaagtctttaaggctcgaaaaacgatgagagtgagtgatcgtcagcaacttgaagcagtgtacaaggtcaaagaagaactgttgaaaactgatgtcaagctgttaaatggcaaccatgaaaatggagatttggacccaacctcacctttggaaaacatggattacattaaagacaaggaagaggtgaatggcattgaagagatttgttttgatcctgaaggaagtaaagcagaatggaaggaaacaccctgtatcctaagtgttaatgtaaaaaacaagcaggatgatgatttaaattgtgaacctttgtctccccataatataactccagaaccagtctctaaactgcctgctgaaccagtttctggtgatccagcccctggtgatctggatgccggagatccagcctccggagtactggcctctggtgattccacctctggtgatcccacctctagcgagccctcctctagtgatgctgcctctggtgatgcaacctctggtgatgccccttctggtgatgtgtcccctggtgatgccacctctggtgatgccactgctgatgatctctcctctggtgatcccacctctagtgatcccatcccaggtgaaccggtccctgttgaacccatttctggtgattgtgccgctgatgatatagcctctagtgaaataacttctgttgatctggcttctggagcaccagcttccactgatccagcctctgatgatctggcctctggtgatctatcctctagtgaactggcctctgatgatctggccactggtgaactggcctctgatgagctgacttctgaatcaacctttgatcgtacctttgaaccaaagtctgtaccagtttgtgaaccagttcctgaaattgacaatatagaaccaagtagcaataaagatgatgattttcttgaaaaaaatggagctgatgaaaaattagagcaaattcagagtaaagactcattggatgagaaaaataaagctgataataatattgatgctaatgaagaaactctagaaacagatgatacaactatttgttcagatcgacctcctgaaaatgaaaagaaggtagaggaagatattatcacagagcttgctcttggagaagatgctatatctagcagtatggaaattgaccaaggtgaaaagaatgaagatgaaacttctgcagatcttgtagaaacgattaatgaaaatgttattgaagataacaaaagtgagaatatcttagaaaatacagactctatggagacagatgaaatcattcctattttggaaaagcttgcaccttctgaggatgaacttacttgcttttctaaaacatctctccttccaatcgatgagacaaatccagatttggaagagaaaatggaaagttcttttggttcaccatctaaacaagaaagtagtgagagtttgccaaaagaagcctttctggtcctctctgatgaagaggatatttcgggtgaaaaagatgagtctgaagttatatcgcaaaatgaaacgtgctctccagcagaagtagaaagtaatgaaaaggacaacaaacctgaggaagaagagcaagtaatacatgaagatgatgaaagaccttctgagaaaaatgaattttctagacgaaaacgttctaaatcagaagacatggacaatgtacagtctaaacgtcgtcgatatatggaagaagaatatgaggcagaatttcaagtaaagattacagccaaaggagacattaaccagaaacttcaaaaggttatacagtggttgctggaagaaaaattgtgtgcgctgcagtgtgctgtatttgataagactttggcagaattgaaaacacgagtggaaaagattgaatgtaacaagaggcataaaacagttctcactgaactacaggccaagatagccaggttaaccaaacgctttgaagcagccaaagaagatcttaagaaaagacatgaacatccacccaacccaccagtatcaccaggaaaaactgtaaatgatgtcaacagcaataataacatgtcttacagaaatgcaggcacagtgagacagatgctggagtccaaaagaaatgtaagcgagagtgcaccaccatcctttcaaactcctgtgaatacagtatcttcaaccaatcttgtcactcctccagcagttgtcagtagtcaacctaaattgcagactccagtgacttcgggttccctcacagcaacgtcagttcttcctgcacccaatacagctactgtagttgctactactcaggtgcctagtggaaatccccagcctacaatctctttacagcctttgccagtgattttgcatgtacctgttgcagtatcctcccagcctcagcttctacagagccatccagggactttggtgactaatcaaccatctggcaatgttgaattcatttctgtgcaaagcccacctacagtgagtggtcttaccaaaaatccagtatccttgccatccttgccaaatcccactaaaccaaacaacgttccttctgtgcccagtcctagtattcaaaggaaccctactgccagtgctgcaccattgggaacaacacttgctgtgcaggctgttccaacagcacactctattgtacaagccacaaggacttctttacccacagtgggcccatcaggactctatagtccatcaactaatcgaggtcctatacagatgaaaattccaatttctgcatttagtacttcgtctgctgcagaacagaacagcaataccaccccaagaattgaaaaccagacaaacaaaacaatagatgcttctgtcagtaagaaagcagctgatagcacatcacagtgtggaaaagccactggcagtgattcaagtggtgtcattgatctcacaatggatgatgaagagagtggagcttcacaagaccccaaaaaactaaatcacactcctgtatcaaccatgagttcttctcagcctgtgtcacgaccattgcaacccatacaaccagcaccgcctcttcaaccatctggggtgccaacaagtggaccatctcagaccaccatacacttactacctacagctccaactaccgtgaatgtaacacatcgtccagtaactcaggtgaccacaagactccctgtaccaagagctcctgcaaaccaccaggtggtttatacaactcttcctgcaccaccagctcaggctcccttgcgaggaactgttatgcaggctcctgctgttcggcaggtcaatccccaaaatagtgttacagttcgagtgcctcaaacaaccacatatgttgtaaacaatggactaaccctgggatcaacaggacctcagctcacagtgcatcaccgaccaccacaagtgcatactgagcccccacgccccgtgcacccagcacccttaccagaagctccacaaccacagcgtctgcccccagaagctgccagcacatctctgcctcagaagccacacttgaagttagcacgcgttcagagtcaaaatggcatagtactgtcatggagtgtcctggaggtggatcgaagctgtgccactgttgatagctaccatctctatgcttaccatgaggaacccagtgccactgtgccctcacaatggaaaaagattggggaagtcaaggcacttcccttgcccatggcatgtactctcacccagtttgtatctggtagcaaatactactttgcagtacgagccaaggatatttatggacgttttgggcctttctgtgatcctcagtcaacagatgtgatctcttctacccagagcagttaaaccttggagcctttatattttcctcttttaaaatttccaccttttggtcttgtttttaatcttgtgcatgataccccatgtaaaatccaccttgtgcaagatttcttggacagatgtgtgtatacactacatttgtttataaccagaagcaaaataaactcagcccacaaagct

SEQ ID NO: 746 - DNA, 570 bp, Homo sapiens
  source 1..570: mol_type = unassigned DNA
agtttctgttgctgtgaaagaactgataagatggctgcagggggctccctttgggattcagaatggacagtttagaagaacctcagaaaaaagtctttaaggctcgaaaaacgatgagagtgagtgatcgtcagcaacttgaagcagtgtacaaggtcaaagaagaactgttgaaaactgatgtcaagctgttaaatggcaaccatgaaaatggagatttggacccaacctcacctttggaaaacatggattacattaaagacaaggaagaggtgaatggcattgaagagatttgttttgatcctgaaggaagtaaagcagaatggaaggaaacaccctgtatcctaagtgttaatgtaaaaaacaagcaggatgatgatttaaattgtgaacctttgtctccccataatataactccagaaccagtctctaaactgcctgctgaaccagtttctggtgatccagcccctggtgatctggatgccggagatccagcctccggagtactggcctctggtgattccacctctggtgatcccacctctagcgagccctcctctagtgatgctg

SEQ ID NO: 747 - DNA, 580 bp, Homo sapiens
  source 1..580: mol_type = unassigned DNA
agaatctcaagctgaattggcttccagcaagtaggctaggcttattattttatgcgcttcagccaaagaccagcaggaacacctttgtaattgaaaaagttaggtttactatttgctgcagggaggaaataatgttcactatggggaaactgtaaggcacatcaatcagtaagaggatgttagaaaaaacctagtataggatttgagtatagtataggttgggttattttggggagagattaaggaagtagatccttatcgtggattgggtgacatcagaaagtgggggcacttctattcttgggtatctcaataaattttatctatatagggaggacagactattacaagataaagctgtaattgataaagaagttggcctggtgtggtggctcacacctgtaatcccagcactttgggaggccgaggcaggtggatcacgaggtcagaagatcaagaccatcctggctaacacgattcagaatggacagtttagaagaacctcagaaaaaagtctttaaggctcgaaaaacgatgagagtgagtgatcgtcagcaacttgaagcagtgtacaaggtca

SEQ ID NO: 748 - DNA, 575 bp, Homo sapiens
  source 1..575: mol_type = unassigned DNA
aaccaaaactaagaaattgatgttagggaggacagactattacaagataaagctgtaattgataaagaagttggcctggtgtggtggctcacacctgtaatcccagcactttgggaggccgaggcaggtggatcacgaggtcagaagatcaagaccatcctggctaacacgattcagaatggacagtttagaagaacctcagaaaaaagtctttaaggctcgaaaaacgatgagagtgagtgatcgtcagcaacttgaagcagtgtacaaggtcaaagaagaactgttgaaaactgatgtcaagctgttaaatggcaaccatgaaaatggagatttggacccaacctcacctttggaaaacatggattacattaaagacaaggaagaggtgaatggcattgaagagatttgttttgatcctgaaggaagtaaagcagaatggaaggaaacaccctgtatcctaagtgttaatgtaaaaaacaagcaggatgatgatttaaattgtgaacctttgtctccccataatataactccagaaccagtctctaaactgcctgctgaaccagtttctggtg

SEQ ID NO: 749 - DNA, 564 bp, Homo sapiens
  source 1..564: mol_type = unassigned DNA
aatgacgtcacatatgagatagaatggagattcagaatggacagtttagaagaacctcagaaaaaagtctttaaggctcgaaaaacgatgagagtgagtgatcgtcagcaacttgaagcagtgtacaaggtcaaagaagaactgttgaaaactgatgtcaagctgttaaatggcaaccatgaaaatggagatttggacccaacctcacctttggaaaacatggattacattaaagacaaggaagaggtgaatggcattgaagagatttgttttgatcctgaaggaagtaaagcagaatggaaggaaacaccctgtatcctaagtgttaatgtaaaaaacaagcaggatgatgatttaaattgtgaacctttgtctccccataatataactccagaaccagtctctaaactgcctgctgaaccagtttctggtgatccagcccctggtgatctggatgccggagatccagcctccggagtactggcctctggtgattccacctctggtgatcccacctctagcgagccctcctctagtgatgctgcctctggtgatgcaacctct

SEQ ID NO: 750 - DNA, 574 bp, Homo sapiens
  source 1..574: mol_type = unassigned DNA
agacctaatagttggcagcatagaaagcagtacaaagaattctgattctaggcattttcactttgaaatagtcattttgaagatatactctgtgtgttctgtgagcttcattgacatattgtctgacgttttttggcttttgtggtaaatgggatgtatgctgcacaaactacccaacagatgtgaaccactatttgaaaggaattttaatatgtagccaacctactgtattcttgttttttttttaatgaatatgaatcaaacaagaaatttagactcgagaaggctgacctagaagtctgcattagcttttaatgtttatacaaatgaactaagtagcagtggtttacagaagaggaagtccttttcacagtgtcaagctgcccacagattcagaatggacagtttagaagaacctcagaaaaaagtctttaaggctcgaaaaacgatgagagtgagtgatcgtcagcaacttgaagcagtgtacaaggtcaaagaagaactgttgaaaactgatgtcaagctgttaaatggcaaccatgaaaatggagatttggacccaacctcacctttg

SEQ ID NO: 751 - DNA, 4324 bp, Homo sapiens
  source 1..4324: mol_type = unassigned DNA
ggcggcggcggtggcagcggcggcgcggcgactgaagcgcgcgaaaagctgaggcggcaacgtcggggacggctgcgcgggacggctctgtaggaaggaacttggttccccctccctcagcttccgccccaaaagattcagaatggacagtttagaagaacctcagaaaaaagtctttaaggctcgaaaaacgatgagagtgagtgatcgtcagcaacttgaagcagtgtacaaggtcaaagaagaactgttgaaaactgatgtcaagctgttaaatggcaaccatgaaaatggagatttggacccaacctcacctttggaaaacatggattacattaaagacaaggaagaggtgaatggcattgaagagatttgttttgatcctgaaggaagtaaagcagaatggaaggaaacaccctgtatcctaagtgttaatgtaaaaaacaagcaggatgatgatttaaattgtgaacctttgtctccccataatataactccagaaccagtctctaaactgcctgctgaaccagtttctggtgatccagcccctggtgatctggatgccggagatccagcctccggagtactggcctctggtgattccacctctggtgatcccacctctagcgagccctcctctagtgatgctgcctctggtgatgcaacctctggtgatgccccttctggtgatgtgtcccctggtgatgccacctctggtgatgccactgctgatgatctctcctctggtgatcccacctctagtgatcccatcccaggtgaaccggtccctgttgaacccatttctggtgattgtgccgctgatgatatagcctctagtgaaataacttctgttgatctggcttctggagcaccagcttccactgatccagcctctgatgatctggcctctggtgatctatcctctagtgaactggcctctgatgatctggccactggtgaactggcctctgatgagctgacttctgaatcaacctttgatcgtacctttgaaccaaagtctgtaccagtttgtgaaccagttcctgaaattgacaatatagaaccaagtagcaataaagatgatgattttcttgaaaaaaatggagctgatgaaaaattagagcaaattcagagtaaagactcattggatgagaaaaataaagctgataataatattgatgctaatgaagaaactctagaaacagatgatacaactatttgttcagatcgacctcctgaaaatgaaaagaaggtagaggaagatattatcacagagcttgctcttggagaagatgctatatctagcagtatggaaattgaccaaggtgaaaagaatgaagatgaaacttctgcagatcttgtagaaacgattaatgaaaatgttattgaagataacaaaagtgagaatatcttagaaaatacagactctatggagacagatgaaatcattcctattttggaaaagcttgcaccttctgaggatgaacttacttgcttttctaaaacatctctccttccaatcgatgagacaaatccagatttggaagagaaaatggaaagttcttttggttcaccatctaaacaagaaagtagtgagagtttgccaaaagaagcctttctggtcctctctgatgaagaggatatttcgggtgaaaaagatgagtctgaagttatatcgcaaaatgaaacgtgctctccagaagtagaaagtaatgaaaaggacaacaaacctgaggaagaagagcaagtaatacatgaagatgatgaaagaccttctgagaaaaatgaattttctagacgaaaacgttctaaatcagaagacatggacaatgtacagtctaaacgtcgtcgatatatggaagaagaatatgaggcagaatttcaagtaaagattacagccaaaggagacattaaccagaaacttcaaaaggttatacagtggttgctggaagaaaaattgtgtgcgctgcagtgtgctgtatttgataagactttggcagaattgaaaacacgagtggaaaagattgaatgtaacaagaggcataaaacagttctcactgaactacaggccaagatagccaggttaaccaaacgctttgaagcagccaaagaagatcttaagaaaagacatgaacatccacccaacccaccagtatcaccaggaaaaactgtaaatgatgtcaacagcaataataacatgtcttacagaaatgcaggcacagtgagacagatgctggagtccaaaagaaatgtaagcgagagtgcaccaccatcctttcaaactcctgtgaatacagtatcttcaaccaatcttgtcactcctccagcagttgtcagtagtcaacctaaattgcagactccagtgacttcgggttccctcacagcaacgtcagttcttcctgcacccaatacagctactgtagttgctactactcaggtgcctagtggaaatccccagcctacaatctctttacagcctttgccagtgattttgcatgtacctgttgcagtatcctcccagcctcagcttctacagagccatccagggactttggtgactaatcaaccatctggcaatgttgaattcatttctgtgcaaagcccacctacagtgagtggtcttaccaaaaatccagtatccttgccatccttgccaaatcccactaaaccaaacaacgttccttctgtgcccagtcctagtattcaaaggaaccctactgccagtgctgcaccattgggaacaacacttgctgtgcaggctgttccaacagcacactctattgtacaagccacaaggacttctttacccacagtgggcccatcaggactctatagtccatcaactaatcgaggtcctatacagatgaaaattccaatttctgcatttagtacttcgtctgctgcagaacagaacagcaataccaccccaagaattgaaaaccagacaaacaaaacaatagatgcttctgtcagtaagaaagcagctgatagcacatcacagtgtggaaaagccactggcagtgattcaagtggtgtcattgatctcacaatggatgatgaagagagtggagcttcacaagaccccaaaaaactaaatcacactcctgtatcaaccatgagttcttctcagcctgtgtcacgaccattgcaacccatacaaccagcaccgcctcttcaaccatctggggtgccaacaagtggaccatctcagaccaccatacacttactacctacagctccaactaccgtgaatgtaacacatcgtccagtaactcaggtgaccacaagactccctgtaccaagagctcctgcaaaccaccaggtggtttatacaactcttcctgcaccaccagctcaggctcccttgcgaggaactgttatgcaggctcctgctgttcggcaggtcaatccccaaaatagtaagagatttttcttgtatatggccccaagatacatgtagttctcttcagcatttagttggaatggcatataataatgttaaattttgcaaaaatttcttataatgtcatattaaaagtattgttataagttcaagagatctgtactacaacatagaaactatagtatagttaaaatcaatgtagtatattcttgaaaatagctgatagagcagattttaagtattgtcaccacacacaaaaaaggtaagtatgtgagatcatgcatatgtcagctagatttagccattctgcagtgtatgcatatttcaaacatgttgtataccataaatatatataatttttgtcaattaaaaaatagttttcaaaaaagaaatggcagtataaccaaaactaatctattattatttttcttcccttaggagagttaaacagagaaaattgttgatgtatactagttgatttgtgctctgagtgttgtctttaatttaactttatttatggcctgtattagtatagtacacaatttgatattggtatattctctactctattaagaaacaccttacctagttagagtgggaatggtcaattgtgatttaccccagatgatggaaatcatggtaaaggatagccttcaatgagagtcttaaagatatggaaagtggctgagaaaagaagggaaaatgttaaagaaagcttgtagtttcttgtatatatcatatattagttacatacatatgttacatgcatgttacatatgtagatgacattttaaaattatatattaaccacatgtatataagcagtagtagaatatatcacataaacacaagcttatataaaaggtatatttaaactttaaagtaaagaaaaataataaaatgaactacgtatgaactctt

SEQ ID NO: 752 - DNA, 4847 bp, Homo sapiens
  source 1..4847: mol_type = unassigned DNA
gacgggattcacaggcattatgttacaaaactggcttgctgccttctgttttctttttctgtgtcctgtgtagctgcattgtttgttgcagtatatgcattagctgttgtctatgttcagtttcctgcaggctgacaaagtgggaggggctttgtttgttacatagctgagttttcactgtgtgagttcttgagtgcacattgcagccatcttaattacacttttgtgcaactgagactgtgcagctgtctcaaaatggctgctaacctagtctttgtagctgcttaggcagcaagtatgtcagtgaggagacttgtcacatgcatcaggaccagagattcagaatggacagtttagaagaacctcagaaaaaagtctttaaggctcgaaaaacgatgagagtgagtgatcgtcagcaacttgaagcagtgtacaaggtcaaagaagaactgttgaaaactgatgtcaagctgttaaatggcaaccatgaaaatggagatttggacccaacctcacctttggaaaacatggattacattaaagacaaggaagaggtgaatggcattgaagagatttgttttgatcctgaaggaagtaaagcagaatggaaggaaacaccctgtatcctaagtgttaatgtaaaaaacaagcaggatgatgatttaaattgtgaacctttgtctccccataatataactccagaaccagtctctaaactgcctgctgaaccagtttctggtgatccagcccctggtgatctggatgccggagatccagcctccggagtactggcctctggtgattccacctctggtgatcccacctctagcgagccctcctctagtgatgctgcctctggtgatgcaacctctggtgatgccccttctggtgatgtgtcccctggtgatgccacctctggtgatgccactgctgatgatctctcctctggtgatcccacctctagtgatcccatcccaggtgaaccggtccctgttgaacccatttctggtgattgtgccgctgatgatatagcctctagtgaaataacttctgttgatctggcttctggagcaccagcttccactgatccagcctctgatgatctggcctctggtgatctatcctctagtgaactggcctctgatgatctggccactggtgaactggcctctgatgagctgacttctgaatcaacctttgatcgtacctttgaaccaaagtctgtaccagtttgtgaaccagttcctgaaattgacaatatagaaccaagtagcaataaagatgatgattttcttgaaaaaaatggagctgatgaaaaattagagcaaattcagagtaaagactcattggatgagaaaaataaagctgataataatattgatgctaatgaagaaactctagaaacagatgatacaactatttgttcagatcgacctcctgaaaatgaaaagaaggtagaggaagatattatcacagagcttgctcttggagaagatgctatatctagcagtatggaaattgaccaaggtgaaaagaatgaagatgaaacttctgcagatcttgtagaaacgattaatgaaaatgttattgaagataacaaaagtgagaatatcttagaaaatacagactctatggagacagatgaaatcattcctattttggaaaagcttgcaccttctgaggatgaacttacttgcttttctaaaacatctctccttccaatcgatgagacaaatccagatttggaagagaaaatggaaagttcttttggttcaccatctaaacaagaaagtagtgagagtttgccaaaagaagcctttctggtcctctctgatgaagaggatatttcgggtgaaaaagatgagtctgaagttatatcgcaaaatgaaacgtgctctccagcagaagtagaaagtaatgaaaaggacaacaaacctgaggaagaagagcaagtaatacatgaagatgatgaaagaccttctgagaaaaatgaattttctagacgaaaacgttctaaatcagaagacatggacaatgtacagtctaaacgtcgtcgatatatggaagaagaatatgaggcagaatttcaagtaaagattacagccaaaggagacattaaccagaaacttcaaaaggttatacagtggttgctggaagaaaaattgtgtgcgctgcagtgtgctgtatttgataagactttggcagaattgaaaacacgagtggaaaagattgaatgtaacaagaggcataaaacagttctcactgaactacaggccaagatagccaggttaaccaaacgctttgaagcagccaaagaagatcttaagaaaagacatgaacatccacccaacccaccagtatcaccaggaaaaactgtaaatgatgtcaacagcaataataacatgtcttacagaaatgcaggcacagtgagacagatgctggagtccaaaagaaatgtaagcgagagtgcaccaccatcctttcaaactcctgtgaatacagtatcttcaaccaatcttgtcactcctccagcagttgtcagtagtcaacctaaattgcagactccagtgacttcgggttccctcacagcaacgtcagttcttcctgcacccaatacagctactgtagttgctactactcaggtgcctagtggaaatccccagcctacaatctctttacagcctttgccagtgattttgcatgtacctgttgcagtatcctcccagcctcagcttctacagagccatccagggactttggtgactaatcaaccatctggcaatgttgaattcatttctgtgcaaagcccacctacagtgagtggtcttaccaaaaatccagtatccttgccatccttgccaaatcccactaaaccaaacaacgttccttctgtgcccagtcctagtattcaaaggaaccctactgccagtgctgcaccattgggaacaacacttgctgtgcaggctgttccaacagcacactctattgtacaagccacaaggacttctttacccacagtgggcccatcaggactctatagtccatcaactaatcgaggtcctatacagatgaaaattccaatttctgcatttagtacttcgtctgctgcagaacagaacagcaataccaccccaagaattgaaaaccagacaaacaaaacaatagatgcttctgtcagtaagaaagcagctgatagcacatcacagtgtggaaaagccactggcagtgattcaagtggtgtcattgatctcacaatggatgatgaagagagtggagcttcacaagaccccaaaaaactaaatcacactcctgtatcaaccatgagttcttctcagcctgtgtcacgaccattgcaacccatacaaccagcaccgcctcttcaaccatctggggtgccaacaagtggaccatctcagaccaccatacacttactacctacagctccaactaccgtgaatgtaacacatcgtccagtaactcaggtgaccacaagactccctgtaccaagagctcctgcaaaccaccaggtggtttatacaactcttcctgcaccaccagctcaggctcccttgcgaggaactgttatgcaggctcctgctgttcggcaggtcaatccccaaaatagtgttacagttcgagtgcctcaaacaaccacatatgttgtaaacaatggactaaccctgggatcaacaggacctcagctcacagtgcatcaccgaccaccacaagtgcatactgagcccccacgccccgtgcacccagcacccttaccagaagctccacaaccacagcgtctgcccccagaagctgccagcacatctctgcctcagaagccacacttgaagttagcacgcgttcagagtcaaaatggcatagtactgtcatggagtgtcctggaggtggatcgaagctgtgccactgttgatagctaccatctctatgcttaccatgaggaacccagtgccactgtgccctcacaatggaaaaagattggggaagtcaaggcacttcccttgcccatggcatgtactctcacccagtttgtatctggtagcaaatactactttgcagtacgagccaaggatatttatggacgttttgggcctttctgtgatcctcagtcaacagatgtgatctcttctacccagagcagttaaaccttggagcctttatattttcctcttttaaaatttccaccttttggtcttgtttttaatcttgtgcatgataccccatgtaaaatccaccttgtgcaagatttcttggacagatgtgtgtatacactacatttgtttataaccagaagcaaaataaactcagcccacaaagctagaatcttttcctggacagtttaggctttggggtttggaaatgtaaatgtgtaccttgctttagttttgaggctggggaatatgtgtgggtgtttatgtgtgtttttccttatgtaggtgttattgcattggagtctcccattttcattctcaaatttacctcttaaagtacgaagtaagtagatcaaaggatttgagatgtgtaactggcatgattctgcttttgaaggatctatagtatcattttagttaagtgggtcaaacagaatcaaaacaaaacccaaagaaataaataaaaaacaaaatggctaaatagtttaaaataggttaattcgaacacaggaaaggatctatttgttgtttcttttgtctggtctcctgagttgttaattaggtgaaaaaagatctgcaatggccccctccctttcctaatctggcttttacatttattttgtgccttaaagattaactacaaagataaacatggccaaaaataaataaataaatatggccata

SEQ ID NO: 753 - DNA, 568 bp, Homo sapiens
  source 1..568: mol_type = unassigned DNA
atttagttctcatggcaacctttgtgacaggtgttggtattagtccctttttaagattcagaatggacagtttagaagaacctcagaaaaaagtctttaaggctcgaaaaacgatgagagtgagtgatcgtcagcaacttgaagcagtgtacaaggtcaaagaagaactgttgaaaactgatgtcaagctgttaaatggcaaccatgaaaatggagatttggacccaacctcacctttggaaaacatggattacattaaagacaaggaagaggtgaatggcattgaagagatttgttttgatcctgaaggaagtaaagcagaatggaaggaaacaccctgtatcctaagtgttaatgtaaaaaacaagcaggatgatgatttaaattgtgaacctttgtctccccataatataactccagaaccagtctctaaactgcctgctgaaccagtttctggtgatccagcccctggtgatctggatgccggagatccagcctccggagtactggcctctggtgattccacctctggtgatcccacctctagcgagccctcctctagtgatgc

SEQ ID NO: 754 - DNA, 3370 bp, Homo sapiens
  source 1..3370: mol_type = unassigned DNA
atggcaagtccagatagaagtaaacggaagatattaaaagccaaaaagacaatgcccctaagttgccggaagcaagtagagatgctgaataagtcaaggaatgttgaagcgctgaaaacagcaattgggagtaatgttccaagcggtaatcagagtttcagtcctagtgtcataactaggacgactgaaataaccaaatgtagcccttctgaaaatggtgcatcctcattggactctaataaaaattcaatatcagagaaaagtaaagtattctctcagaattgcataaaaccagtagaagaaattgttcattcagaaacaaaattggaacaagttgtttgttcgtaccaaaagccaagtagaacaacagaatcccccagcagagtcttcacagaagaggcaaaagattcactgaacacttctgaaaacgattctgagcatcagacaaatgtaacaagatccctttttgagcatgagggggcttgtagtctaaagtccagttgctgtccacccagtgtattgagtggtgttgttcagatgccagagtctacagtaaccagtaccgtgggtgacaagaaaactgaccagatggttttccatttagaaacaaactccaattcagaatcacatgataaaaggcaaagtgacaacattttatgttcagaagactcaggttttgtgcctgttgagaaaacacctaatttggtgaattcagtcacttctaacaactgtgctgatgacattttgaaaactgatgagtgtagtagaaccagtatttcaaattgtgaaagtgcagactcaacatggcagtcatcacttgacactaataacaacagccattatcaaaagaagaggatgttttcagaaaacgaggaaaatgttaaacgcatgaaaacttcagagcaaattaatgaaaatatttgtgtaagtttggaaaggcaaacagcattcctggaacaggtcagacatttgattcagcaggagatctatagcataaattatgaactatttgataagaaactgaaagaattgaaccaacgcattgggaagacagagtgcagaaataagcatgaaggaatagctgataaacttttggcaaaaatagcaaaacttcaaagacgtattaaaacagtattattatttcaaaggaattgtttgaaaccaaacatgttatccagtaatggagcctctaaggttgcaaattcagaggctatgattttggataagaatcttgagtcagttaatagtccaattgaaaagtcttctgtgaattatgagccttctaacccttccgaaaaaggaagtaaaaaaattaatttgtcatcagatcaaaataagtctgtttctgaaagtaacaatgatgatgttatgttgatttctgtggaaagtcctaatttgacaactccaattacatcaaatccaacagataccagaaaaattacatcaggaaattctagcaattctcccaatgctgaagttatgaaagtccagtatcccccctggagtcacattcgaaagctgcttcaaactcaaaggaaacaaccccattggcacaaaatgcagtccaggttcctgagtcctttgagcacctgccacctctcccagaaccaccagcaccactacctgaattagtagacaaaacccgagacacacttcctccccagaagcctgagctcaaagtgaaacgggttttcagacccaatggcattgccctgacttggaatataaccaaaatcaatcccaagtgtgctcctgtagaaagctaccacctcttcctgtgtcatgagaactctaataataagttgatttggaagaagattggagaaattaaagctttaccactccccatggcctgtactttatctcagtttttagcttccaacagatactattttactgtccaatcaaaagatatttttggacgatatggaccattctgtgatataaaatctatccctgggttttctgaaaatcttacgtaaaaggtgtttaataatgatatactactttttttttcatatttgtttgtttgcaatgttactgtaatactatttgccattgtaaaaggccagctcagattgtgagccctttctattgggacagtcctcttctatatgttttaagtggccagtaatttaatgaatttctggtttgtattaaatatgtccttccaatggataagttctaaaacatacgctatcattggcccatgttgctgaggtgcattgtgaacaatacctttagtgactgtggaactgctgcttctatcagaagacctaggatacaagcagccactgtttcctccgttaacaatcagcttttagtaacctgctgtggtcagcatagctacaggaaaagtcagcccttgactgagggccagatcatccctggagtgcacctctactaagattttatgaaaagatgacatgttgggctgcatgataaaagttaattataaaaattaaaagatttttttttttgagatggaatattgctctgttgcccaggctggagtacagtggtcactgcaacctccatctccctggttcaagcaattctcctatgtcagcctcccaagtagctgggactatagtcacttgccaccatgcccggctaatttatttttagtagagatgaggtttcaccttgttggtcaggctggtctcaaactcctgacctcaggggatccacccgcctcggcctcccgaagtgctgggattataggcgtaagccaccatgcctggccaaaaattaaaagattttatgaaacgaaatggcttcccattctttctattcagcttctaagtgggctattcatttgtgctctcctcttttttgttttgttttgcactttgtcaatcatttggggaaatagcctggaggtctttcctgaatctgtttgtagacataataaaatttgtgtgctgtgtacacaaaaacataatgtatcttatgaaagcattacccaacctgtttgagttgagaatgcatttgtccacctttgatttgaggctttagtttgctgatttcctaaatgctaccctttgatcatttcctggccaccatcacaatactaaggggctcagatgtgtcttgtgcccacctcttcctgagaagagatggaagtggagctgtgactagtacaagcagcccaagaaactctgaacggggcccaatggaggcaaacttgagcaaataattgggatgataagaaacaaaaataatcccaactgtttgaaagttcgaaagaggggcattcttttctggtacatggtgagagttcaggctccagagactcaaaacggaatggttttccttggcattttgtaaatgctctcacatctgtagcaataaagctgttattttctgc

SEQ ID NO: 755 - DNA, 3463 bp, Homo sapiens
  source 1..3463: mol_type = unassigned DNA
atgtcttaaattccaggatatgaaagatggcaagtccagatagaagtaaacggaagatattaaaagccaaaaagacaatgcccctaagttgccggaagcaagtagagatgctgaataagtcaaggaatgttgaagcgctgaaaacagcaattgggagtaatgttccaagcggtaatcagagtttcagtcctagtgtcataactaggacgactgaaataaccaaatgtagcccttctgaaaatggtgcatcctcattggactctaataaaaattcaatatcagagaaaagtaaagtattctctcagaattgcataaaaccagtagaagaaattgttcattcagaaacaaaattggaacaagttgtttgttcgtaccaaaagccaagtagaacaacagaatcccccagcagagtcttcacagaagaggcaaaagattcactgaacacttctgaaaacgattctgagcatcagacaaatgtaacaagatccctttttgagcatgagggggcttgtagtctaaagtccagttgctgtccacccagtgtattgagtggtgttgttcagatgccagagtctacagtaaccagtaccgtgggtgacaagaaaactgaccagatggttttccatttagaaacaaactccaattcagaatcacatgataaaaggcaaagtgacaacattttatgttcagaagactcaggttttgtgcctgttgagaaaacacctaatttggtgaattcagtcacttctaacaactgtgctgatgacattttgaaaactgatgagtgtagtagaaccagtatttcaaattgtgaaagtgcagactcaacatggcagtcatcacttgacactaataacaacagccattatcaaaagaagaggatgttttcagaaaacgaggaaaatgttaaacgcatgaaaacttcagagcaaattaatgaaaatatttgtgtaagtttggaaaggcaaacagcattcctggaacaggtcagacatttgattcagcaggagatctatagcataaattatgaactatttgataagaaactgaaagaattgaaccaacgcattgggaagacagagtgcagaaataagcatgaaggaatagctgataaacttttggcaaaaatagcaaaacttcaaagacgtattaaaacagtattattatttcaaaggaattgtttgaaaccaaacatgttatccagtaatggagcctctaaggttgcaaattcagaggctatgattttggataagaatcttgagtcagttaatagtccaattgaaaagtcttctgtgaattatgagccttctaacccttccgaaaaaggaagtaaaaaaattaatttgtcatcagatcaaaataagtctgtttctgaaagtaacaatgatgatgttatgttgatttctgtggaaagtcctaatttgacaactccaattacatcaaatccaacagataccagaaaaattacatcaggaaattctagcaattctcccaatgctgaagttatggctgtacagaagaaacttgattctataattgatttgacaaaagaaggcctatccaactgcaatacagaaagtccagtatcccccctggagtcacattcgaaagctgcttcaaactcaaaggaaacaaccccattggcacaaaatgcagtccaggttcctgagtcctttgagcacctgccacctctcccagaaccaccagcaccactacctgaattagtagacaaaacccgagacacacttcctccccagaagcctgagctcaaagtgaaacgggttttcagacccaatggcattgccctgacttggaatataaccaaaatcaatcccaagtgtgctcctgtagaaagctaccacctcttcctgtgtcatgagaactctaataataagttgatttggaagaagattggagaaattaaagctttaccactccccatggcctgtactttatctcagtttttagcttccaacagatactattttactgtccaatcaaaagatatttttggacgatatggaccattctgtgatataaaatctatccctgggttttctgaaaatcttacgtaaaaggtgtttaataatgatatactactttttttttcatatttgtttgtttgcaatgttactgtaatactatttgccattgtaaaaggccagctcagattgtgagccctttctattgggacagtcctcttctatatgttttaagtggccagtaatttaatgaatttctggtttgtattaaatatgtccttccaatggataagttctaaaacatacgctatcattggcccatgttgctgaggtgcattgtgaacaatacctttagtgactgtggaactgctgcttctatcagaagacctaggatacaagcagccactgtttcctccgttaacaatcagcttttagtaacctgctgtggtcagcatagctacaggaaaagtcagcccttgactgagggccagatcatccctggagtgcacctctactaagattttatgaaaagatgacatgttgggctgcatgataaaagttaattataaaaattaaaagatttttttttttgagatggaatattgctctgttgcccaggctggagtacagtggtcactgcaacctccatctccctggttcaagcaattctcctatgtcagcctcccaagtagctgggactatagtcacttgccaccatgcccggctaatttatttttagtagagatgaggtttcaccttgttggtcaggctggtctcaaactcctgacctcaggggatccacccgcctcggcctcccgaagtgctgggattataggcgtaagccaccatgcctggccaaaaattaaaagattttatgaaacgaaatggcttcccattctttctattcagcttctaagtgggctattcatttgtgctctcctcttttttgttttgttttgcactttgtcaatcatttggggaaatagcctggaggtctttcctgaatctgtttgtagacataataaaatttgtgtgctgtgtacacaaaaacataatgtatcttatgaaagcattacccaacctgtttgagttgagaatgcatttgtccacctttgatttgaggctttagtttgctgatttcctaaatgctaccctttgatcatttcctggccaccatcacaatactaaggggctcagatgtgtcttgtgcccacctcttcctgagaagagatggaagtggagctgtgactagtacaagcagcccaagaaactctgaacggggcccaatggaggcaaacttgagcaaataattgggatgataagaaacaaaaataatcccaactgtttgaaagttcgaaagaggggcattcttttctggtacatggtgagagttcaggctccagagactcaaaacggaatggttttccttggcattttgtaaatgctctcacatctgtagcaataaagctgttattttctgc

SEQ ID NO: 756 - DNA, 3641 bp, Homo sapiens
  source 1..3641: mol_type = unassigned DNA
agcattgttaacggctgcggttcgaagtggctgtgggtattgctgcggctggtgcgtcgtcgctctaggttttcttccgccgtctgtgacagcttcttgatctgtccccaggaatcctgctttttttttttctttgagacacggtctcactctgtcacccttgctggagtgcagtggtgcaatcacagatcacggcagtgtctaattcctgggctcaagtgaaccttttgcatcagcctcctgaatagctgagaccacaggatatgaaagatggcaagtccagatagaagtaaacggaagatattaaaagccaaaaagacaatgcccctaagttgccggaagcaagtagagatgctgaataagtcaaggaatgttgaagcgctgaaaacagcaattgggagtaatgttccaagcggtaatcagagtttcagtcctagtgtcataactaggacgactgaaataaccaaatgtagcccttctgaaaatggtgcatcctcattggactctaataaaaattcaatatcagagaaaagtaaagtattctctcagaattgcataaaaccagtagaagaaattgttcattcagaaacaaaattggaacaagttgtttgttcgtaccaaaagccaagtagaacaacagaatcccccagcagagtcttcacagaagaggcaaaagattcactgaacacttctgaaaacgattctgagcatcagacaaatgtaacaagatccctttttgagcatgagggggcttgtagtctaaagtccagttgctgtccacccagtgtattgagtggtgttgttcagatgccagagtctacagtaaccagtaccgtgggtgacaagaaaactgaccagatggttttccatttagaaacaaactccaattcagaatcacatgataaaaggcaaagtgacaacattttatgttcagaagactcaggttttgtgcctgttgagaaaacacctaatttggtgaattcagtcacttctaacaactgtgctgatgacattttgaaaactgatgagtgtagtagaaccagtatttcaaattgtgaaagtgcagactcaacatggcagtcatcacttgacactaataacaacagccattatcaaaagaagaggatgttttcagaaaacgaggaaaatgttaaacgcatgaaaacttcagagcaaattaatgaaaatatttgtgtaagtttggaaaggcaaacagcattcctggaacaggtcagacatttgattcagcaggagatctatagcataaattatgaactatttgataagaaactgaaagaattgaaccaacgcattgggaagacagagtgcagaaataagcatgaaggaatagctgataaacttttggcaaaaatagcaaaacttcaaagacgtattaaaacagtattattatttcaaaggaattgtttgaaaccaaacatgttatccagtaatggagcctctaaggttgcaaattcagaggctatgattttggataagaatcttgagtcagttaatagtccaattgaaaagtcttctgtgaattatgagccttctaacccttccgaaaaaggaagtaaaaaaattaatttgtcatcagatcaaaataagtctgtttctgaaagtaacaatgatgatgttatgttgatttctgtggaaagtcctaatttgacaactccaattacatcaaatccaacagataccagaaaaattacatcaggaaattctagcaattctcccaatgctgaagttatgaaagtccagtatcccccctggagtcacattcgaaagctgcttcaaactcaaaggaaacaaccccattggcacaaaatgcagtccaggttcctgagtcctttgagcacctgccacctctcccagaaccaccagcaccactacctgaattagtagacaaaacccgagacacacttcctccccagaagcctgagctcaaagtgaaacgggttttcagacccaatggcattgccctgacttggaatataaccaaaatcaatcccaagtgtgctcctgtagaaagctaccacctcttcctgtgtcatgagaactctaataataagttgatttggaagaagattggagaaattaaagctttaccactccccatggcctgtactttatctcagtttttagcttccaacagatactattttactgtccaatcaaaagatatttttggacgatatggaccattctgtgatataaaatctatccctgggttttctgaaaatcttacgtaaaaggtgtttaataatgatatactactttttttttcatatttgtttgtttgcaatgttactgtaatactatttgccattgtaaaaggccagctcagattgtgagccctttctattgggacagtcctcttctatatgttttaagtggccagtaatttaatgaatttctggtttgtattaaatatgtccttccaatggataagttctaaaacatacgctatcattggcccatgttgctgaggtgcattgtgaacaatacctttagtgactgtggaactgctgcttctatcagaagacctaggatacaagcagccactgtttcctccgttaacaatcagcttttagtaacctgctgtggtcagcatagctacaggaaaagtcagcccttgactgagggccagatcatccctggagtgcacctctactaagattttatgaaaagatgacatgttgggctgcatgataaaagttaattataaaaattaaaagatttttttttttgagatggaatattgctctgttgcccaggctggagtacagtggtcactgcaacctccatctccctggttcaagcaattctcctatgtcagcctcccaagtagctgggactatagtcacttgccaccatgcccggctaatttatttttagtagagatgaggtttcaccttgttggtcaggctggtctcaaactcctgacctcaggggatccacccgcctcggcctcccgaagtgctgggattataggcgtaagccaccatgcctggccaaaaattaaaagattttatgaaacgaaatggcttcccattctttctattcagcttctaagtgggctattcatttgtgctctcctcttttttgttttgttttgcactttgtcaatcatttggggaaatagcctggaggtctttcctgaatctgtttgtagacataataaaatttgtgtgctgtgtacacaaaaacataatgtatcttatgaaagcattacccaacctgtttgagttgagaatgcatttgtccacctttgatttgaggctttagtttgctgatttcctaaatgctaccctttgatcatttcctggccaccatcacaatactaaggggctcagatgtgtcttgtgcccacctcttcctgagaagagatggaagtggagctgtgactagtacaagcagcccaagaaactctgaacggggcccaatggaggcaaacttgagcaaataattgggatgataagaaacaaaaataatcccaactgtttgaaagttcgaaagaggggcattcttttctggtacatggtgagagttcaggctccagagactcaaaacggaatggttttccttggcattttgtaaatgctctcacatctgtagcaataaagctgttattttctgca

SEQ ID NO: 757 - DNA, 3659 bp, Homo sapiens
  source 1..3659: mol_type = unassigned DNA
gttaacggctgcggttcgaagtggctgtgggtattgctgcggctggtgcgtcgtcgctctaggaatcctgctttttttttttctttgagacacggtctcactctgtcacccttgctggagtgcagtggtgcaatcacagatcacggcagtgtctaattcctgggctcaagtgaaccttttgcatcagcctcctgaatagctgagaccacaggatatgaaagatggcaagtccagatagaagtaaacggaagatattaaaagccaaaaagacaatgcccctaagttgccggaagcaagtagagatgctgaataagtcaaggaatgttgaagcgctgaaaacagcaattgggagtaatgttccaagcggtaatcagagtttcagtcctagtgtcataactaggacgactgaaataaccaaatgtagcccttctgaaaatggtgcatcctcattggactctaataaaaattcaatatcagagaaaagtaaagtattctctcagaattgcataaaaccagtagaagaaattgttcattcagaaacaaaattggaacaagttgtttgttcgtaccaaaagccaagtagaacaacagaatcccccagcagagtcttcacagaagaggcaaaagattcactgaacacttctgaaaacgattctgagcatcagacaaatgtaacaagatccctttttgagcatgagggggcttgtagtctaaagtccagttgctgtccacccagtgtattgagtggtgttgttcagatgccagagtctacagtaaccagtaccgtgggtgacaagaaaactgaccagatggttttccatttagaaacaaactccaattcagaatcacatgataaaaggcaaagtgacaacattttatgttcagaagactcaggttttgtgcctgttgagaaaacacctaatttggtgaattcagtcacttctaacaactgtgctgatgacattttgaaaactgatgagtgtagtagaaccagtatttcaaattgtgaaagtgcagactcaacatggcagtcatcacttgacactaataacaacagccattatcaaaagaagaggatgttttcagaaaacgaggaaaatgttaaacgcatgaaaacttcagagcaaattaatgaaaatatttgtgtaagtttggaaaggcaaacagcattcctggaacaggtcagacatttgattcagcaggagatctatagcataaattatgaactatttgataagaaactgaaagaattgaaccaacgcattgggaagacagagtgcagaaataagcatgaaggaatagctgataaacttttggcaaaaatagcaaaacttcaaagacgtattaaaacagtattattatttcaaaggaattgtttgaaaccaaacatgttatccagtaatggagcctctaaggttgcaaattcagaggctatgattttggataagaatcttgagtcagttaatagtccaattgaaaagtcttctgtgaattatgagccttctaacccttccgaaaaaggaagtaaaaaaattaatttgtcatcagatcaaaataagtctgtttctgaaagtaacaatgatgatgttatgttgatttctgtggaaagtcctaatttgacaactccaattacatcaaatccaacagataccagaaaaattacatcaggaaattctagcaattctcccaatgctgaagttatggctgtacagaagaaacttgattctataattgatttgacaaaagaaggcctatccaactgcaatacagaaagtccagtatcccccctggagtcacattcgaaagctgcttcaaactcaaaggaaacaaccccattggcacaaaatgcagtccaggttcctgagtcctttgagcacctgccacctctcccagaaccaccagcaccactacctgaattagtagacaaaacccgagacacacttcctccccagaagcctgagctcaaagtgaaacgggttttcagacccaatggcattgccctgacttggaatataaccaaaatcaatcccaagtgtgctcctgtagaaagctaccacctcttcctgtgtcatgagaactctaataataagttgatttggaagaagattggagaaattaaagctttaccactccccatggcctgtactttatctcagtttttagcttccaacagatactattttactgtccaatcaaaagatatttttggacgatatggaccattctgtgatataaaatctatccctgggttttctgaaaatcttacgtaaaaggtgtttaataatgatatactactttttttttcatatttgtttgtttgcaatgttactgtaatactatttgccattgtaaaaggccagctcagattgtgagccctttctattgggacagtcctcttctatatgttttaagtggccagtaatttaatgaatttctggtttgtattaaatatgtccttccaatggataagttctaaaacatacgctatcattggcccatgttgctgaggtgcattgtgaacaatacctttagtgactgtggaactgctgcttctatcagaagacctaggatacaagcagccactgtttcctccgttaacaatcagcttttagtaacctgctgtggtcagcatagctacaggaaaagtcagcccttgactgagggccagatcatccctggagtgcacctctactaagattttatgaaaagatgacatgttgggctgcatgataaaagttaattataaaaattaaaagatttttttttttgagatggaatattgctctgttgcccaggctggagtacagtggtcactgcaacctccatctccctggttcaagcaattctcctatgtcagcctcccaagtagctgggactatagtcacttgccaccatgcccggctaatttatttttagtagagatgaggtttcaccttgttggtcaggctggtctcaaactcctgacctcaggggatccacccgcctcggcctcccgaagtgctgggattataggcgtaagccaccatgcctggccaaaaattaaaagattttatgaaacgaaatggcttcccattctttctattcagcttctaagtgggctattcatttgtgctctcctcttttttgttttgttttgcactttgtcaatcatttggggaaatagcctggaggtctttcctgaatctgtttgtagacataataaaatttgtgtgctgtgtacacaaaaacataatgtatcttatgaaagcattacccaacctgtttgagttgagaatgcatttgtccacctttgatttgaggctttagtttgctgatttcctaaatgctaccctttgatcatttcctggccaccatcacaatactaaggggctcagatgtgtcttgtgcccacctcttcctgagaagagatggaagtggagctgtgactagtacaagcagcccaagaaactctgaacggggcccaatggaggcaaacttgagcaaataattgggatgataagaaacaaaaataatcccaactgtttgaaagttcgaaagaggggcattcttttctggtacatggtgagagttcaggctccagagactcaaaacggaatggttttccttggcattttgtaaatgctctcacatctgtagcaataaagctgttattttctgca

SEQ ID NO: 758 - DNA, 1907 bp, Homo sapiens
  source 1..1907: mol_type = unassigned DNA
gttaacggctgcggttcgaagtggctgtgggtattgctgcggctggtgcgtcgtcgctctaggaatcctgctttttttttttctttgagacacggtctcactctgtcacccttgctggagtgcagtggtgcaatcacagatcacggcagtgtctaattcctgggctcaagtgaaccttttgcatcagcctcctgaatagctgagaccacaggatatgaaagatggcaagtccagatagaagtaaacggaagatattaaaagccaaaaagacaatgcccctaagttgccggaagcaagtagagatgctgaataagtcaaggaatgttgaagcgctgaaaacagcaattgggagtaatgttccaagcggtaatcagagtttcagtcctagtgtcataactaggacgactgaaataaccaaatgtagcccttctgaaaatggtgcatcctcattggactctaataaaaattcaatatcagagaaaagtaaagtattctctcagaattgcataaaaccagtagaagaaattgttcattcagaaacaaaattggaacaagttgtttgttcgtaccaaaagccaagtagaacaacagaatcccccagcagagtcttcacagaagaggcaaaagattcactgaacacttctgaaaacgattctgagcatcagacaaatgtaacaagatccctttttgagcatgagggggcttgtagtctaaagtccagttgctgtccacccagtgtattgagtggtgttgttcagatgccagagtctacagtaaccagtaccgtgggtgacaagaaaactgaccagatggttttccatttagaaacaaactccaattcagaatcacatgataaaaggcaaagtgacaacattttatgttcagaagactcaggttttgtgcctgttgagaaaacacctaatttggtgaattcagtcacttctaacaactgtgctgatgacattttgaaaactgatgagtgtagtagaaccagtatttcaaattgtgaaagtgcagactcaacatggcagtcatcacttgacactaataacaacagccattatcaaaagaagaggatgttttcagaaaacgaggaaaatgttaaacgcatgaaaacttcagagcaaattaatgaaaatatttgtgtaagtttggaaaggcaaacagcattcctggaacaggtcagacatttgattcagcaggagatctatagcataaattatgaactatttgataagaaactgaaagaattgaaccaacgcattgggaagacagagtgcagaaataagcatgaaggaatagctgataaacttttggcaaaaatagcaaaacttcaaagacgtattaaaacagtattattatttcaaaggaattgtttgaaaccaaacatgttatccagtaatggagcctctaagataccagaaaaattacatcaggaaattctagcaattctcccaatgctgaagttatggctgtacagaagaaacttgattctataattgatttgacaaaagaaggcctatccaactgcaatacagaaagtccagtatcccccctggagtcacattcgaaagctgcttcaaactcaaaggaaacaaccccattggcacaaaatgcagtccaggttcctgagtcctttgagcacctgccacctctcccagaaccaccagcaccactacctgaattagtagacaaaacccgagacacacttcctccccagaagcctgagctcaaagtgaaacgggttttcagacccaatggcattgccctgacttggaatataaccaaaatcaatcccaagtgtgctcctgtagaaagctaccacctcttcctgtgtcatgagaactctaataataagttgatttggaagaagattggagaaattaaagctttaccactccccatgg

SEQ ID NO: 759 - DNA, 998 bp, Homo sapiens
  source 1..998: mol_type = unassigned DNA
ttgttaacggctgcggttcgaagtggctgtgggtattgctgcggctggtgcgtcgtcgctctagtaacaatgatgatgttatgttgatttctgtggaaagtcctaatttgacaactccaattacatcaaatccaacagataccagaaaaattacatcaggaaattctagcaattctcccaatgctgaagttatggctgtacagaagaaacttgattctataattgatttgacaaaagaaggcctatccaactgcaatacagaaagtccagtatcccccctggagtcacattcgaaagctgcttcaaactcaaaggaaacaaccccattggcacaaaatgcagtccaggttcctgagtcctttgagcacctgccacctctcccagaaccaccagcaccactacctgaattagtagacaaaacccgagacacacttcctccccagaagcctgagctcaaagtgaaacgggttttcagacccaatggcattgccctgacttggaatataaccaaaatcaatcccaagtgtgctcctgtagaaagctaccacctcttcctgtgtcatgagaactctaataataagttgatttggaagaagattggagaaattaaagctttaccactccccatggcctgtactttatctcagtttttagcttccaacagatactattttactgtccaatcaaaagatatttttggacgatatggaccattctgtgatataaaatctatccctgggttttctgaaaatcttacgtaaaaggtgtttaataatgatatactactttttttttcatatttgtttgtttgcaatgttactgtaatactatttgccattgtaaaaggccagctcagattgtgagccctttctattgggacagtcctcttctatatgttttaagtggccagtaatttaatgaatttctggtttgtattaaatatgtccttccaatggataagttctaaaacatacgctatcattggcccatgttgctga

SEQ ID NO: 760 - DNA, 2819 bp, Homo sapiens
  source 1..2819: mol_type = unassigned DNA
ggccaatgcactgtcagactaagacagagaaccatcattaattgaagtgagatttttctggcctgagacttgcagggaggcaagaagacactctggacaccactatggacagcctcttgatgaaccggaggaagtttctttaccaattcaaaaatgtccgctgggctaagggtcggcgtgagacctacctgtgctacgtagtgaagaggcgtgacagtgctacatccttttcactggactttggttatcttcgcaataagaacggctgccacgtggaattgctcttcctccgctacatctcggactgggacctagaccctggccgctgctaccgcgtcacctggttcacctcctggagcccctgctacgactgtgcccgacatgtggccgactttctgcgagggaaccccaacctcagtctgaggatcttcaccgcgcgcctctacttctgtgaggaccgcaaggctgagcccgaggggctgcggcggctgcaccgcgccggggtgcaaatagccatcatgaccttcaaagattatttttactgctggaatacttttgtagaaaaccacgaaagaactttcaaagcctgggaagggctgcatgaaaattcagttcgtctctccagacagcttcggcgcatccttttgcccctgtatgaggttgatgacttacgagacgcatttcgtactttgggactttgatagcaacttccaggaatgtcacacacgatgaaatatctctgctgaagacagtggataaaaaacagtccttcaagtcttctctgtttttattcttcaactctcactttcttagagtttacagaaaaaatatttatatacgactctttaaaaagatctatgtcttgaaaatagagaaggaacacaggtctggccagggacgtgctgcaattggtgcagttttgaatgcaacattgtcccctactgggaataacagaactgcaggacctgggagcatcctaaagtgtcaacgtttttctatgacttttaggtaggatgagagcagaaggtagatcctaaaaagcatggtgagaggatcaaatgtttttatatcaacatcctttattatttgattcatttgagttaacagtggtgttagtgatagatttttctattcttttcccttgacgtttactttcaagtaacacaaactcttccatcaggccatgatctataggacctcctaatgagagtatctgggtgattgtgaccccaaaccatctctccaaagcattaatatccaatcatgcgctgtatgttttaatcagcagaagcatgtttttatgtttgtacaaaagaagattgttatgggtggggatggaggtatagaccatgcatggtcaccttcaagctactttaataaaggatcttaaaatgggcaggaggactgtgaacaagacaccctaataatgggttgatgtctgaagtagcaaatcttctggaaacgcaaactcttttaaggaagtccctaatttagaaacacccacaaacttcacatatcataattagcaaacaattggaaggaagttgcttgaatgttggggagaggaaaatctattggctctcgtgggtctcttcatctcagaaatgccaatcaggtcaaggtttgctacattttgtatgtgtgtgatgcttctcccaaaggtatattaactatataagagagttgtgacaaaacagaatgataaagctgcgaaccgtggcacacgctcatagttctagctgcttgggaggttgaggagggaggatggcttgaacacaggtgttcaaggccagcctgggcaacataacaagatcctgtctctcaaaaaaaaaaaaaaaaaaaagaaagagagagggccgggcgtggtggctcacgcctgtaatcccagcactttgggaggccgagccgggcggatcacctgtggtcaggagtttgagaccagcctggccaacatggcaaaaccccgtctgtactcaaaatgcaaaaattagccaggcgtggtagcaggcacctgtaatcccagctacttgggaggctgaggcaggagaatcgcttgaacccaggaggtggaggttgcagtaagctgagatcgtgccgttgcactccagcctgggcgacaagagcaagactctgtctcagaaaaaaaaaaaaaaaagagagagagagagaaagagaacaatatttgggagagaaggatggggaagcattgcaaggaaattgtgctttatccaacaaaatgtaaggagccaataagggatccctatttgtctcttttggtgtctatttgtccctaacaactgtctttgacagtgagaaaaatattcagaataaccatatccctgtgccgttattacctagcaacccttgcaatgaagatgagcagatccacaggaaaacttgaatgcacaactgtcttattttaatcttattgtacataagtttgtaaaagagttaaaaattgttacttcatgtattcatttatattttatattattttgcgtctaatgattttttattaacatgatttccttttctgatatattgaaatggagtctcaaagcttcataaatttataactttagaaatgattctaataacaacgtatgtaattgtaacattgcagtaatggtgctacgaagccatttctcttgatttttagtaaacttttatgacagcaaatttgcttctggctcactttcaatcagttaaataaatgataaataattttggaagctgtgaagataaaataccaaataaaataatataaaagtgatttatatgaagttaaaataaaaaatcagtatgatggaataaacttg

SEQ ID NO: 761 - DNA, 5045 bp, Homo sapiens
  source 1..5045: mol_type = unassigned DNA
gcgggctccggctgccatggaggaggaagaggaggcgataggcttgctggacaaggttctggaggacgaagatgtgtttctcctggaggagtgcgagctgggaaccccgaccagccccggctcagggtcccccttcctggtggctgtgaaggtggaagcagggaaaggcctggagatgaggaagctggttctctcggggttcttggccagcgaagagatctacattaaccagctggaagccctgttgctgcccatgaaacccctgaaggccaccgccaccacctcccagcccgtgctcaccatccagcagatcgagaccatcttctacaagatccaggacatctatgagatccacaaggagttctatgacaacctgtgccccaaggtgcaacagtgggacagccaggtcaccatgggccacctcttccagaagctggccagccagctcggtgtgtacaaagcgtttgtcgataactataaagtcgctctggagacagctgagaagtgcagccagtccaacaaccagttccagaagatctcagaggaactcaaagtgaaaggtcccaaggactccaaggacagccacacgtctgtcaccatggaagctctgctctacaagcccattgaccgggtcactcggagcaccctagtcctacacgacctgctgaagcacacacctgtggaccaccccgactacccgctgctgcaggatgccctccgcatctcccagaacttcctgtccagcatcaacgaggacatcgacccccgccggactgcagtgacaacgcccaagggggagacgcgacagctggtgaaggacggcttcctggtggaagtgtcagagagctcccggaagctgcggcacgtcttcctctttacagatgtcctactgtgtgccaagctgaagaagacctctgcagggaagcaccagcagtatgactgtaagtggtacatccccctggccgacctggtgtttccatcccccgaggagtctgaggccagcccccaggtgcaccccttcccagaccatgagctggaggacatgaagatgaagatctctgccctcaagagtgaaatccagaaggagaaagccaacaaaggccagagccgggccatcgagcgcctgaagaagaagatgtttgagaatgagttcctgctgctgctcaactcccccacaatcccgttcaggatccacaatcggaatggaaagagttacctgttcctactgtcctcggactacgagaggtcagagtggagagaagcaattcagaaactacagaagaaggatctccaggcctttgtcctgagctcagtggagctccaggtgctcacaggatcctgtttcaagcttaggactgtacacaacattcctgtcaccagcaataaagacgacgatgagtctccaggactctatggcttccttcatgtcatcgtccactctgccaagggatttaagcaatcagccaacctgtactgtaccctggaggtggattccttcggctattttgtcagcaaagccaaaaccagggtgttccgggacacagcggagcccaagtgggatgaggagtttgagatcgagctggagggctcccagtccctgaggatcctgtgctatgagaagtgctatgacaagaccaaggtcaacaaggacaacaatgagatcgtggacaagatcatgggcaaaggacagatccagctggacccacaaaccgtggagaccaagaactggcacacggacgtgattgagatgaacgggatcaaagtggaattttccatgaaattcaccagccgagatatgagcctgaagaggaccccgtccaaaaagcagaccggcgtcttcggtgtgaagatcagcgtggtgacgaagcgggagcgctccaaggtgccctacatcgtccggcagtgtgtggaggaggtggagaagaggggtatcgaggaggttggcatctacaggatatcgggcgtggccacggacatccaggcgctcaaggccgtcttcgatgccaataacaaggacatcctgctgatgctgagtgacatggacatcaacgccatcgccgggacgctcaagctgtacttccgggaactgcccgagccgctcctcacggaccgactctacccagccttcatggagggcatcgccctgtcagaccctgctgccaaggaaaactgcatgatgcacctgctccgctccctgcccgaccccaacctcatcaccttcctcttcctgctggaacacttgaaaagggttgccgagaaggagcccatcaacaaaatgtcacttcacaacctggctaccgtgtttggacccacgttactgagaccctcagaagtggagagcaaagcacacctcacctcggctgcggacatctggtcccatgacgtcatggcgcaggtccaggtcctcctctactacctgcagcacccccccatttccttcgcagaactcaagcggaacacactgtacttctccaccgacgtgtagcccgaggcagggtggctgcgggcgggtggtggaaccagcccctccagcctggggtccaactcagacttgaaagactgcaatagaaaactcccaaacccagcactccagactcgagggaagccagcttccaagaactggaatgcgtacgtcttttgtgccaccttgtacaaagccggctgcccagccccagcctcaccaccgcatcccacctcctgccctccatacctctagttgtgtctgatgctccgtgctgttcgggaattgttttatgtacacttgtcaggcagaaaaggtagtgaccggcccggcgtgggcacacagacagcccgctttgttctttcatttcctccagcactttctttccgcctgagtccagcccaaggccttttattttgcgctgtgtaactgctgccagcttctctcttggccctgctcccagatggcggtctcctggcagcctcccctcagtcttcctccacccgctcttccttcccagcctgcctgcatgcatgtgcacccttggtcttcgctccatcgccttgaaagctctgaagaggccctgggttgccgcggcagcagtggtctgtttgatgctgccgtttgccgctgccggcccctcctcagactccgcctttgggagcacacctgctttgccttgctgcctgtgcaaatgttggacaagcagacacactcacactcgtccccagcttagcacagagctggagcgcccatttctggaattttccgtttgggaatctccacttctggggtttacctgttcggcctcctgtctatcagtgaggcatctctgactgtttcttctactgcttttcagttcccttccctgctgttctatttcctttgagtgtaaagactcacaggtgacctgctatcgagatagccagagggtcaggagagaatgggggaggaggcggtcaggctgctgaggaaacaccacaggctgaacgggggaggaatgcacatgccacgctgggtgtcccgggtcgcggggaggcagctcagctcttaggagcaagttgtgggggcttttcaagaggggccaggcttcctggagggtgactgatgtggccgaagcaggtgtccaggcaggtaggctgcagccaggagctccctggcaccgcaggacctcgtggtactcttgccttagattttacacacactccacagccaagcactgccacggtcctccaggacctgggaagcaaaggcacaggcccacggtggccagccattgtggtgccgccccagcttctggatacagccttttgggtaaacactgggaactccagaagttgtggggagagtggggaatcagacagccgcctctaggggctgggttctgctggggcctccttgttggtgctgtaggcacccgccagggagcagggacccgacttgcagacgcattgcccggtactaggaaggagtgaggtgtgttcccaccgtacacttcccacacgagctgcggctgccagcctcgggccatcagcctaggagagcagatgcagctccaggggctcgacttatagccagttacagctccccggctcttctgtgtggcagagcgtcgtttccgggccctcagggctggggagctcagttcccattgcttgtgctcagggctgagtcttaaagaagggtttgccggccctaacgctgcagcgcgtgcgcggtgagaggccctttttgagcctgtttactcctgtggccttgggcagaacagtaaatactctgtgcacggaggaaagacatgcccaagaggaaggaagtactgaccatcggctgcctgtgagcagcttagcaaggagcccttgctccctgggaaaggcggtgaacttgagtctaaagatgcagtgcctggcccttcctaaggtccctgcctggcatccgagtgtcggtgtgtggcacagaaggctcctgcttgcttccaaagtgatggacaggaaggggcagagtgagtcacggcccagactgggcaccttcgcgtctcagcctcagggagccccacagccccaagctcgctgaggcaacgtgagaacaggctatgggaaggctgcaaaggctgagaaatgcaaaggctcatatttataaatcccacccccagagtggggagggtcaggtgccagacctggactaaactgcaccaaggaaacacccagcagggtctcctgtgagccggggaccatgcagcccgaaacctccagtcactgcgcccggcaggagtcaggagccagggactgtgcagcctggaacctccagtcactgtgcccagcagggtgggctgtgcccagcaggagtcaggctaagaaacgccaggtctgcctgttcttgctgggcaatggctgatggctgccagtttctgctgatacacaggtaggatgggacccttcatgaatatctgactttaataagttggtaaggatatatttttttgtctatgttctgtttcaacttatgtagattattataaattgatgtaaaccacgtgagaggaaaatgttaataaaaaatgcaaagccccatcatttgcacaaaactc

SEQ ID NO: 762 - DNA, 5252 bp, Homo sapiens
  source 1..5252: mol_type = unassigned DNA
ctcgcccctccgcgctcgcaacttcggcctcccccggctcccgcccgctctccctcctttgttgcgcgatgagggtcgggtttcggatctgaccgagccgccgccgcgggatggagccgctcagccaccggggcctgccgcgcctgtcctggatcgacaccctctacagcaacttcagctacgggacggacgagtacgacggagaggggaatgaggagcagaaggggcccccggagggctcagagaccatgccgtacatcgatgagtcgcccaccatgtccccgcagctcagcgcccgcagccagggcgggggggatggcgtctccccgactccacctgagggactggctcctggggtggaagcagggaaaggcctggagatgaggaagctggttctctcggggttcttggccagcgaagagatctacattaaccagctggaagccctgttgctgcccatgaaacccctgaaggccaccgccaccacctcccagcccgtgctcaccatccagcagatcgagaccatcttctacaagatccaggacatctatgagatccacaaggagttctatgacaacctgtgccccaaggtgcaacagtgggacagccaggtcaccatgggccacctcttccagaagctggccagccagctcggtgtgtacaaagcgtttgtcgataactataaagtcgctctggagacagctgagaagtgcagccagtccaacaaccagttccagaagatctcagaggaactcaaagtgaaaggtcccaaggactccaaggacagccacacgtctgtcaccatggaagctctgctctacaagcccattgaccgggtcactcggagcaccctagtcctacacgacctgctgaagcacacacctgtggaccaccccgactacccgctgctgcaggatgccctccgcatctcccagaacttcctgtccagcatcaacgaggacatcgacccccgccggactgcagtgacaacgcccaagggggagacgcgacagctggtgaaggacggcttcctggtggaagtgtcagagagctcccggaagctgcggcacgtcttcctctttacagatgtcctactgtgtgccaagctgaagaagacctctgcagggaagcaccagcagtatgactgtaagtggtacatccccctggccgacctggtgtttccatcccccgaggagtctgaggccagcccccaggtgcaccccttcccagaccatgagctggaggacatgaagatgaagatctctgccctcaagagtgaaatccagaaggagaaagccaacaaaggccagagccgggccatcgagcgcctgaagaagaagatgtttgagaatgagttcctgctgctgctcaactcccccacaatcccgttcaggatccacaatcggaatggaaagagttacctgttcctactgtcctcggactacgagaggtcagagtggagagaagcaattcagaaactacagaagaaggatctccaggcctttgtcctgagctcagtggagctccaggtgctcacaggatcctgtttcaagcttaggactgtacacaacattcctgtcaccagcaataaagacgacgatgagtctccaggactctatggcttccttcatgtcatcgtccactctgccaagggatttaagcaatcagccaacctgtactgtaccctggaggtggattccttcggctattttgtcagcaaagccaaaaccagggtgttccgggacacagcggagcccaagtgggatgaggagtttgagatcgagctggagggctcccagtccctgaggatcctgtgctatgagaagtgctatgacaagaccaaggtcaacaaggacaacaatgagatcgtggacaagatcatgggcaaaggacagatccagctggacccacaaaccgtggagaccaagaactggcacacggacgtgattgagatgaacgggatcaaagtggaattttccatgaaattcaccagccgagatatgagcctgaagaggaccccgtccaaaaagcagaccggcgtcttcggtgtgaagatcagcgtggtgacgaagcgggagcgctccaaggtgccctacatcgtccggcagtgtgtggaggaggtggagaagaggggtatcgaggaggttggcatctacaggatatcgggcgtggccacggacatccaggcgctcaaggccgtcttcgatgccaataacaaggacatcctgctgatgctgagtgacatggacatcaacgccatcgccgggacgctcaagctgtacttccgggaactgcccgagccgctcctcacggaccgactctacccagccttcatggagggcatcgccctgtcagaccctgctgccaaggaaaactgcatgatgcacctgctccgctccctgcccgaccccaacctcatcaccttcctcttcctgctggaacacttgaaaagggttgccgagaaggagcccatcaacaaaatgtcacttcacaacctggctaccgtgtttggacccacgttactgagaccctcagaagtggagagcaaagcacacctcacctcggctgcggacatctggtcccatgacgtcatggcgcaggtccaggtcctcctctactacctgcagcacccccccatttccttcgcagaactcaagcggaacacactgtacttctccaccgacgtgtagcccgaggcagggtggctgcgggcgggtggtggaaccagcccctccagcctggggtccaactcagacttgaaagactgcaatagaaaactcccaaacccagcactccagactcgagggaagccagcttccaagaactggaatgcgtacgtcttttgtgccaccttgtacaaagccggctgcccagccccagcctcaccaccgcatcccacctcctgccctccatacctctagttgtgtctgatgctccgtgctgttcgggaattgttttatgtacacttgtcaggcagaaaaggtagtgaccggcccggcgtgggcacacagacagcccgctttgttctttcatttcctccagcactttctttccgcctgagtccagcccaaggccttttattttgcgctgtgtaactgctgccagcttctctcttggccctgctcccagatggcggtctcctggcagcctcccctcagtcttcctccacccgctcttccttcccagcctgcctgcatgcatgtgcacccttggtcttcgctccatcgccttgaaagctctgaagaggccctgggttgccgcggcagcagtggtctgtttgatgctgccgtttgccgctgccggcccctcctcagactccgcctttgggagcacacctgctttgccttgctgcctgtgcaaatgttggacaagcagacacactcacactcgtccccagcttagcacagagctggagcgcccatttctggaattttccgtttgggaatctccacttctggggtttacctgttcggcctcctgtctatcagtgaggcatctctgactgtttcttctactgcttttcagttcccttccctgctgttctatttcctttgagtgtaaagactcacaggtgacctgctatcgagatagccagagggtcaggagagaatgggggaggaggcggtcaggctgctgaggaaacaccacaggctgaacgggggaggaatgcacatgccacgctgggtgtcccgggtcgcggggaggcagctcagctcttaggagcaagttgtgggggcttttcaagaggggccaggcttcctggagggtgactgatgtggccgaagcaggtgtccaggcaggtaggctgcagccaggagctccctggcaccgcaggacctcgtggtactcttgccttagattttacacacactccacagccaagcactgccacggtcctccaggacctgggaagcaaaggcacaggcccacggtggccagccattgtggtgccgccccagcttctggatacagccttttgggtaaacactgggaactccagaagttgtggggagagtggggaatcagacagccgcctctaggggctgggttctgctggggcctccttgttggtgctgtaggcacccgccagggagcagggacccgacttgcagacgcattgcccggtactaggaaggagtgaggtgtgttcccaccgtacacttcccacacgagctgcggctgccagcctcgggccatcagcctaggagagcagatgcagctccaggggctcgacttatagccagttacagctccccggctcttctgtgtggcagagcgtcgtttccgggccctcagggctggggagctcagttcccattgcttgtgctcagggctgagtcttaaagaagggtttgccggccctaacgctgcagcgcgtgcgcggtgagaggccctttttgagcctgtttactcctgtggccttgggcagaacagtaaatactctgtgcacggaggaaagacatgcccaagaggaaggaagtactgaccatcggctgcctgtgagcagcttagcaaggagcccttgctccctgggaaaggcggtgaacttgagtctaaagatgcagtgcctggcccttcctaaggtccctgcctggcatccgagtgtcggtgtgtggcacagaaggctcctgcttgcttccaaagtgatggacaggaaggggcagagtgagtcacggcccagactgggcaccttcgcgtctcagcctcagggagccccacagccccaagctcgctgaggcaacgtgagaacaggctatgggaaggctgcaaaggctgagaaatgcaaaggctcatatttataaatcccacccccagagtggggagggtcaggtgccagacctggactaaactgcaccaaggaaacacccagcagggtctcctgtgagccggggaccatgcagcccgaaacctccagtcactgcgcccggcaggagtcaggagccagggactgtgcagcctggaacctccagtcactgtgcccagcagggtgggctgtgcccagcaggagtcaggctaagaaacgccaggtctgcctgttcttgctgggcaatggctgatggctgccagtttctgctgatacacaggtaggatgggacccttcatgaatatctgactttaataagttggtaaggatatatttttttgtctatgttctgtttcaacttatgtagattattataaattgatgtaaaccacgtgagaggaaaatgttaataaaaaatgcaaagccccatcatttgcacaaaactcag

SEQ ID NO: 763 - DNA, 1550 bp, Homo sapiens
  source 1..1550: mol_type = unassigned DNA
ctcgcccctccgcgctcgcaacttcggcctcccccggctcccgcccgctctccctcctttgttgcgcgatgagggtcgggtttcggatctgaccgagccgccgccgcgggatggagccgctcagccaccggggcctgccgcgcctgtcctggatcgacaccctctacagcaacttcagctacgggacggacgagtacgacggagaggggaatgaggagcagaaggggcccccggagggctcagagaccatgccgtacatcgatgagtcgcccaccatgtccccgcagctcagcgcccgcagccagggcgggggggatggcgtctccccgactccacctgagggactggctcctggggtggaagcagggaaaggcctggagatgaggaagctggttctctcggggttcttggccagcgaagagatctacattaaccagctggaagccctgttgctgcccatgaaacccctgaaggccaccgccaccacctcccagcccgtgctcaccatccagcagatcgagaccatcttctacaagatccaggacatctatgagatccacaaggagttctatgacaacctgtgccccaaggtgcaacagtgggacagccaggtcaccatgggccacctcttccagaagctggccagccagctcggtgtgtacaaagcgtttgtcgataactataaagtcgctctggagacagctgagaagtgcagccagtccaacaaccagttccagaagatctcagaggaactcaaagtgaaaggtcccaaggactccaaggacagccacacgtctgtcaccatggaagctctgctctacaagcccattgaccgggtcactcggagcaccctagtcctacacgacctgctgaagcacacacctgtggaccaccccgactacccgctgctgcaggatgccctccgcatctcccagaacttcctgtccagcatcaacgaggacatcgacccccgccggactgcagtgacaacgcccaagggggagacgcgacagctggtgaaggacggcttcctggtggaagtgtcagagagctcccggaagctgcggcacgtcttcctctttacagatgtcctactgtgtgccaagctgaagaagacctctgcagggaagcaccagcagtatgactgtaagtggtacatccccctggccgacctggtgtttccatcccccgaggagtctgaggccagcccccaggtgcaccccttcccagaccatgagctggaggacatgaagatgaagatctctgccctcaagagtgaaatccagaaggaggaggtggagaagaggggtatcgaggaggttggcatctacaggatatcgggcgtggccacggacatccaggcgctcaaggccgtcttcgatgccaataacaaggacatcctgctgatgctgagtgacatggacatcaacgccatcgccgggacgctcaagctgtacttccgggaactgcccgagccgctcctcacggaccgactctctccctgcccgaccccaacctcatcaccttcctcttcctgctggaacacttga

SEQ ID NO: 764 - DNA, 2357 bp, Homo sapiens
  source 1..2357: mol_type = unassigned DNA
ggaagagcactccggagcggctgcccgatgctggagtccgtgcggcagcatcagcaaggtggctgagtggccgggctgctggtgggcgccggggagcctggagcgatggctgcacgctcccgccgcggggacagaggctgccatggagattctcctcattattcgcttctgctgtaactgcacctatgctctgctctacaagcccattgaccgggtcactcggagcaccctagtcctacacgacctgctgaagcacacacctgtggaccaccccgactacccgctgctgcaggatgccctccgcatctcccagaacttcctgtccagcatcaacgaggacatcgacccccgccggactgcagtgacaacgcccaagggggagacgcgacagctggtgaaggacggcttcctggtggaagtgtcagagagctcccggaagctgcggcacgtcttcctctttacagatgtcctactgtgtgccaagctgaagaagacctctgcagggaagcaccagcagtatgactgtaagtggtacatccccctggccgacctggtgtttccatcccccgaggagtctgaggccagcccccaggtgcaccccttcccagaccatgagctggaggacatgaagatgaagatctctgccctcaagagtgaaatccagaaggagaaagccaacaaaggccagagccgggccatcgagcgcctgaagaagaagatgtttgagaatgagttcctgctgctgctcaactcccccacaatcccgttcaggatccacaatcggaatggaaagagttacctgttcctactgtcctcggactacgagaggtcagagtggagagaagcaattcagaaactacagaagaaggatctccaggcctttgtcctgagctcagtggagctccaggtgctcacaggatcctgtttcaagcttaggactgtacacaacattcctgtcaccagcaataaagacgacgatgagtctccaggactctatggcttccttcatgtcatcgtccactctgccaagggatttaagcaatcagccaacctgtactgtaccctggaggtggattccttcggctattttgtcagcaaagccaaaaccagggtgttccgggacacagcggagcccaagtgggatgaggagtttgagatcgagctggagggctcccagtccctgaggatcctgtgctatgagaagtgctatgacaagaccaaggtcaacaaggacaacaatgagatcgtggacaagatcatgggcaaaggacagatccagctggacccacaaaccgtggagaccaagaactggcacacggacgtgattgagatgaacgggatcaaagtggaattttccatgaaattcaccagccgagatatgagcctgaagaggaccccgtccaaaaagcagaccggcgtcttcggtgtgaagatcagcgtggtgacgaagcgggagcgctccaaggtgccctacatcgtccggcagtgtgtggaggaggtggagaagaggggtatcgaggaggttggcatctacaggatatcgggcgtggccacggacatccaggcgctcaaggccgtcttcgatgccaataacaaggacatcctgctgatgctgagtgacatggacatcaacgccatcgccgggacgctcaagctgtacttccgggaactgcccgagccgctcctcacggaccgactctacccagccttcatggagggcatcgccctgtcagaccctgctgccaaggaaaactgcatgatgcacctgctccgctccctgcccgaccccaacctcatcaccttcctcttcctgctggaacacttgaaaagggttgccgagaaggagcccatcaacaaaatgtcacttcacaacctggctaccgtgtttggacccacgttactgagaccctcagaagtggagagcaaagcacacctcacctcggctgcggacatctggtcccatgacgtcatggcgcaggtccaggtcctcctctactacctgcagcacccccccatttccttcgcagaactcaagcggaacacactgtacttctccaccgacgtgtagcccgaggcagggtggctgcgggcgggtggtggaaccagcccctccagcctggggtccaactcagacttgaaagactgcaatagaaaactcccaaacccagcactccagactcgagggaagccagcttccaagaactggaatgcgtacgtcttttgtgccaccttgtacaaagccggctgcccagccccagcctcaccaccgcatcccacctcctgccctccatacctctagttgtgtctgatgctccgtgctgttcgggaattgttttatgtacacttgtcaggcagaa

SEQ ID NO: 765 - DNA, 1033 bp, Homo sapiens
  source 1..1033: mol_type = unassigned DNA
agggaactagcgggactggcagccgggactgagcgctccacaggcgccttctctccagcgccgcgtcccgtcccccccggcatgaccgacgtcctgccccagcccgactgcagcccgaaggcggggcgcgaacccctggcgctggaggagtcggggagcaagcgcccccccaacaccggcgcccggctctggggccgcgtgcgcaacaagctgctccgaaacaagctggacccacaaaccgtggagaccaagaactggcacacggacgtgattgagatgaacgggatcaaagtggaattttccatgaaattcaccagccgagatatgagcctgaagaggaccccgtccaaaaagcagaccggcgtcttcggtgtgaagatcagcgtggtgacgaagcgggagcgctccaaggtgccctacatcgtccggcagtgtgtggaggaggtggagaagaggggtatcgaggaggttggcatctacaggatatcgggcgtggccacggacatccaggcgctcaaggccgtcttcgatgccaataacaaggacatcctgctgatgctgagtgacatggacatcaacgccatcgccgggacgctcaagctgtacttccgggaactgcccgagccgctcctcacggaccgactctacccagccttcatggagggcatcgccctgtcagaccctgctgccaaggaaaactgcatgatgcacctgctccgctccctgcccgaccccaacctcatcaccttcctcttcctgctggaacacttgaaaagggttgccgagaaggagcccatcaacaaaatgtcacttcacaacctggctaccgtgtttggacccacgttactgagaccctcagaagtggagagcaaagcacacctcacctcggctgcggacatctggtcccatgacgtcatggcgcaggtccaggtcctcctctactacctgcagcacccccccatttccttcgcagaactcaagcggaacacactgtacttctccaccgacgtgtagcccgaggcagggtggctgc

SEQ ID NO: 766 - DNA, 5603 bp, Homo sapiens
  source 1..5603: mol_type = unassigned DNA
ggactgcagagggaacttgccttgaagaggcctggtccttaaagagacacagcacacacggcccgaccggcagccccagagcagaggctccactgatggcaggcgcccctggctaggctctgaggttcctttgccctcgccttgctgaatggtgagccgctgcctctcggagcccgtctccttgacagcctgccctcggctcctgcagccactcctgggcctgatggggacagggccagcctggtgggtggtgtcagaggtcctggcagagcagcgtaggcctgggatgcgtctgcagaattctggctgaacgagcgaggagcacggccagcttcggggccgtcgtgaccacaggagggcagagggccagcccgtgagctctgaccccagctggacgtgctcttgtttcccttggggctaaggagattggagccactgaactgaatctctgggttttggagacttagagaatccattggactcttctgctggcgtctttctgaatgctgatggggacttggtgacttcagctacgggacggacgagtacgacggagaggggaatgaggagcagaaggggcccccggagggctcagagaccatgccgtacatcgatgagtcgcccaccatgtccccgcagctcagcgcccgcagccagggcgggggggatggcgtctccccgactccacctgagggactggctcctggggtggaagcagggaaaggcctggagatgaggaagctggttctctcggggttcttggccagcgaagagatctacattaaccagctggaagccctgttgctgcccatgaaacccctgaaggccaccgccaccacctcccagcccgtgctcaccatccagcagatcgagaccatcttctacaagatccaggacatctatgagatccacaaggagttctatgacaacctgtgccccaaggtgcaacagtgggacagccaggtcaccatgggccacctcttccagaagctggccagccagctcggtgtgtacaaagcgtttgtcgataactataaagtcgctctggagacagctgagaagtgcagccagtccaacaaccagttccagaagatctcagaggaactcaaagtgaaaggtcccaaggactccaaggacagccacacgtctgtcaccatggaagctctgctctacaagcccattgaccgggtcactcggagcaccctagtcctacacgacctgctgaagcacacacctgtggaccaccccgactacccgctgctgcaggatgccctccgcatctcccagaacttcctgtccagcatcaacgaggacatcgacccccgccggactgcagtgacaacgcccaagggggagacgcgacagctggtgaaggacggcttcctggtggaagtgtcagagagctcccggaagctgcggcacgtcttcctctttacagatgtcctactgtgtgccaagctgaagaagacctctgcagggaagcaccagcagtatgactgtaagtggtacatccccctggccgacctggtgtttccatcccccgaggagtctgaggccagcccccaggtgcaccccttcccagaccatgagctggaggacatgaagatgaagatctctgccctcaagagtgaaatccagaaggagaaagccaacaaaggccagagccgggccatcgagcgcctgaagaagaagatgtttgagaatgagttcctgctgctgctcaactcccccacaatcccgttcaggatccacaatcggaatggaaagagttacctgttcctactgtcctcggactacgagaggtcagagtggagagaagcaattcagaaactacagaagaaggatctccaggcctttgtcctgagctcagtggagctccaggtgctcacaggatcctgtttcaagcttaggactgtacacaacattcctgtcaccagcaataaagacgacgatgagtctccaggactctatggcttccttcatgtcatcgtccactctgccaagggatttaagcaatcagccaacctgtactgtaccctggaggtggattccttcggctattttgtcagcaaagccaaaaccagggtgttccgggacacagcggagcccaagtgggatgaggagtttgagatcgagctggagggctcccagtccctgaggatcctgtgctatgagaagtgctatgacaagaccaaggtcaacaaggacaacaatgagatcgtggacaagatcatgggcaaaggacagatccagctggacccacaaaccgtggagaccaagaactggcacacggacgtgattgagatgaacgggatcaaagtggaattttccatgaaattcaccagccgagatatgagcctgaagaggaccccgtccaaaaagcagaccggcgtcttcggtgtgaagatcagcgtggtgacgaagcgggagcgctccaaggtgccctacatcgtccggcagtgtgtggaggaggtggagaagaggggtatcgaggaggttggcatctacaggatatcgggcgtggccacggacatccaggcgctcaaggccgtcttcgatgccaataacaaggacatcctgctgatgctgagtgacatggacatcaacgccatcgccgggacgctcaagctgtacttccgggaactgcccgagccgctcctcacggaccgactctacccagccttcatggagggcatcgccctgtcagaccctgctgccaaggaaaactgcatgatgcacctgctccgctccctgcccgaccccaacctcatcaccttcctcttcctgctggaacacttgaaaagggttgccgagaaggagcccatcaacaaaatgtcacttcacaacctggctaccgtgtttggacccacgttactgagaccctcagaagtggagagcaaagcacacctcacctcggctgcggacatctggtcccatgacgtcatggcgcaggtccaggtcctcctctactacctgcagcacccccccatttccttcgcagaactcaagcggaacacactgtacttctccaccgacgtgtagcccgaggcagggtggctgcgggcgggtggtggaaccagcccctccagcctggggtccaactcagacttgaaagactgcaatagaaaactcccaaacccagcactccagactcgagggaagccagcttccaagaactggaatgcgtacgtcttttgtgccaccttgtacaaagccggctgcccagccccagcctcaccaccgcatcccacctcctgccctccatacctctagttgtgtctgatgctccgtgctgttcgggaattgttttatgtacacttgtcaggcagaaaaggtagtgaccggcccggcgtgggcacacagacagcccgctttgttctttcatttcctccagcactttctttccgcctgagtccagcccaaggccttttattttgcgctgtgtaactgctgccagcttctctcttggccctgctcccagatggcggtctcctggcagcctcccctcagtcttcctccacccgctcttccttcccagcctgcctgcatgcatgtgcacccttggtcttcgctccatcgccttgaaagctctgaagaggccctgggttgccgcggcagcagtggtctgtttgatgctgccgtttgccgctgccggcccctcctcagactccgcctttgggagcacacctgctttgccttgctgcctgtgcaaatgttggacaagcagacacactcacactcgtccccagcttagcacagagctggagcgcccatttctggaattttccgtttgggaatctccacttctggggtttacctgttcggcctcctgtctatcagtgaggcatctctgactgtttcttctactgcttttcagttcccttccctgctgttctatttcctttgagtgtaaagactcacaggtgacctgctatcgagatagccagagggtcaggagagaatgggggaggaggcggtcaggctgctgaggaaacaccacaggctgaacgggggaggaatgcacatgccacgctgggtgtcccgggtcgcggggaggcagctcagctcttaggagcaagttgtgggggcttttcaagaggggccaggcttcctggagggtgactgatgtggccgaagcaggtgtccaggcaggtaggctgcagccaggagctccctggcaccgcaggacctcgtggtactcttgccttagattttacacacactccacagccaagcactgccacggtcctccaggacctgggaagcaaaggcacaggcccacggtggccagccattgtggtgccgccccagcttctggatacagccttttgggtaaacactgggaactccagaagttgtggggagagtggggaatcagacagccgcctctaggggctgggttctgctggggcctccttgttggtgctgtaggcacccgccagggagcagggacccgacttgcagacgcattgcccggtactaggaaggagtgaggtgtgttcccaccgtacacttcccacacgagctgcggctgccagcctcgggccatcagcctaggagagcagatgcagctccaggggctcgacttatagccagttacagctccccggctcttctgtgtggcagagcgtcgtttccgggccctcagggctggggagctcagttcccattgcttgtgctcagggctgagtcttaaagaagggtttgccggccctaacgctgcagcgcgtgcgcggtgagaggccctttttgagcctgtttactcctgtggccttgggcagaacagtaaatactctgtgcacggaggaaagacatgcccaagaggaaggaagtactgaccatcggctgcctgtgagcagcttagcaaggagcccttgctccctgggaaaggcggtgaacttgagtctaaagatgcagtgcctggcccttcctaaggtccctgcctggcatccgagtgtcggtgtgtggcacagaaggctcctgcttgcttccaaagtgatggacaggaaggggcagagtgagtcacggcccagactgggcaccttcgcgtctcagcctcagggagccccacagccccaagctcgctgaggcaacgtgagaacaggctatgggaaggctgcaaaggctgagaaatgcaaaggctcatatttataaatcccacccccagagtggggagggtcaggtgccagacctggactaaactgcaccaaggaaacacccagcagggtctcctgtgagccggggaccatgcagcccgaaacctccagtcactgcgcccggcaggagtcaggagccagggactgtgcagcctggaacctccagtcactgtgcccagcagggtgggctgtgcccagcaggagtcaggctaagaaacgccaggtctgcctgttcttgctgggcaatggctgatggctgccagtttctgctgatacacaggtaggatgggacccttcatgaatatctgactttaataagttggtaaggatatatttttttgtctatgttctgtttcaacttatgtagattattataaattgatgtaaaccacgtgagaggaaaatgttaataaaaaatgcaaagccccatcatttgcacaaaactca

SEQ ID NO: 767 - DNA, 1786 bp, Homo sapiens
  source 1..1786: mol_type = unassigned DNA
gttgcgctgccgtcgggcaggtggccgagccccgcgggagctgtcgtcggggccgaattcactgcgccaaggtccagcggaaagctggggcatcccggcgaccgcagggtgtcccttcgcaaattcatcaggcgaaggggaggcggaagctcctggccgctgctctgggggagggctccgagctccaacctgcaagtccaggactgaagtgtgtatgtcttttgtgtgattcttcaaacttcacctgccaaacagaaggagcatgttgggcatcagtcatgctaaccaatggaaaagagcaggtgatcaaatcctgtgtctcccttccagaactgaatgctcaagtcttctgtcatagttccaacaatgttaccaaaaccgaatgctgcttcacagatttttgcaacaacataacactgcaccttccaacagcatcaccaaatgccccaaaacttggacccatggagctggccatcattattactgtgcctgtttgcctcctgtccatagctgcgatgctgacagtatgggcatgccagggtcgacagtgctcctacaggaagaaaaagagaccaaatgtggaggaaccactctctgagtgcaatctggtaaatgctggaaaaactctgaaagatctgatttatgatgtgaccgcctctggatctggctctggtctacctctgttggttcaaaggacaattgcaaggacgattgtgcttcaggaaatagtaggaaaaggtagatttggtgaggtgtggcatggaagatggtgtggggaagatgtggctgtgaaaatattctcctccagagatgaaagatcttggtttcgtgaggcagaaatttaccagacggtcatgctgcgacatgaaaacatccttggtttcattgctgctgacaacaaagataatggaacttggactcaactttggctggtatctgaatatcatgaacagggctccttatatgactatttgaatagaaatatagtgaccgtggctggaatgatcaagctggcgctctcaattgctagtggtctggcacaccttcatatggagattgttggtacacaaggtaaacctgctattgctcatcgagacataaaatcaaagaatatcttagtgaaaaagtgtgaaacttgtgccatagcggacttagggttggctgtgaagcatgattcaatactgaacactatcgacatacctcagaatcctaaagtgggaaccaagaggtatatggctcctgaaatgcttgatgatacaatgaatgtgaatatctttgagtccttcaaacgagctgacatctattctgttggtctggtttactgggaaatagcccggaggtgttcagtcggaggaattgttgaggagtaccaattgccttattatgacatggtgccttcagatccctcgatagaggaaatgagaaaggttgtttgtgaccagaagtttcgaccaagtatcccaaaccagtggcaaagttgtgaagcactccgagtcatggggagaataatgcgtgagtgttggtatgccaacggagcggcccgcctaactgctcttcgtattaagaagactatatctcaactttgtgtcaaagaagactgcaaagcctaatgatgataattatgttaaaaagaaatctctcatagctttcttttccattttcccctttatgtgaatgtttttgccattttttttttgttctacctcaaagataagacagtacagtatttaagtgcccataaggcagcatgaaaagataactctaaagttaagcatgggcaggagtt

SEQ ID NO: 768 - DNA, 4263 bp, Homo sapiens
  source 1..4263: mol_type = unassigned DNA
aggaaacggtttattaggagggagtggtggagctgggccaggcaggaagacgctggaataagaaacatttttgctccagcccccatcccagtcccgggaggctgccgcgccagctgcgccgagcgagcccctccccggctccagcccggtccggggccgcgcccggaccccagcccgccgtccagcgctggcggtgcaactgcggccgcgcggtggaggggaggtggccccggtccgccgaaggctagcgccccgccacccgcagagcgggcccagagggaccatgaccttgggctcccccaggaaaggccttctgatgctgctgatggccttggtgacccagggagaccctgtgaagccgtctcggggcccgctggtgacctgcacgtgtgagagcccacattgcaaggggcctacctgccggggggcctggtgcacagtagtgctggtgcgggaggaggggaggcacccccaggaacatcggggctgcgggaacttgcacagggagctctgcagggggcgccccaccgagttcgtcaaccactactgctgcgacagccacctctgcaaccacaacgtgtccctggtgctggaggccacccaacctccttcggagcagccgggaacagatggccagctggccctgatcctgggccccgtgctggccttgctggccctggtggccctgggtgtcctgggcctgtggcatgtccgacggaggcaggagaagcagcgtggcctgcacagcgagctgggagagtccagtctcatcctgaaagcatctgagcagggcgacagcatgttgggggacctcctggacagtgactgcaccacagggagtggctcagggctccccttcctggtgcagaggacagtggcacggcaggttgccttggtggagtgtgtgggaaaaggccgctatggcgaagtgtggcggggcttgtggcacggtgagagtgtggccgtcaagatcttctcctcgagggatgaacagtcctggttccgggagactgagatctataacacagtgttgctcagacacgacaacatcctaggcttcatcgcctcagacatgacctcccgcaactcgagcacgcagctgtggctcatcacgcactaccacgagcacggctccctctacgactttctgcagagacagacgctggagccccatctggctctgaggctagctgtgtccgcggcatgcggcctggcgcacctgcacgtggagatcttcggtacacagggcaaaccagccattgcccaccgcgacttcaagagccgcaatgtgctggtcaagagcaacctgcagtgttgcatcgccgacctgggcctggctgtgatgcactcacagggcagcgattacctggacatcggcaacaacccgagagtgggcaccaagcggtacatggcacccgaggtgctggacgagcagatccgcacggactgctttgagtcctacaagtggactgacatctgggcctttggcctggtgctgtgggagattgcccgccggaccatcgtgaatggcatcgtggaggactatagaccacccttctatgatgtggtgcccaatgaccccagctttgaggacatgaagaaggtggtgtgtgtggatcagcagacccccaccatccctaaccggctggctgcagacccggtcctctcaggcctagctcagatgatgcgggagtgctggtacccaaacccctctgcccgactcaccgcgctgcggatcaagaagacactacaaaaaattagcaacagtccagagaagcctaaagtgattcaatagcccaggagcacctgattcctttctgcctgcagggggctgggggggtggggggcagtggatggtgccctatctgggtagaggtagtgtgagtgtggtgtgtgctggggatgggcagctgcgcctgcctgctcggcccccagcccacccagccaaaaatacagctgggctgaaacctgatcccctgctgtctggcctgctcaaagcggcaggctccctgacgcctggctctctccccacccctatggccagcatggtgcaccccctaccactcccgggacaggatgcaaaagaggctccagagtcagagtgccaagccagggaatcccagtcccagactcagagcccgggcctgcactttgccccctgcccttgatcaaccccactgccccaccagagctgccagggtggcacagggccctgtccagcccctggcacacacttccctgccaggcctcagcctctagcataagctccagagagccagggcccatcagtttctctctgtggatttgtatctcagctccatgatgccttgggctttctgtctcctcaacaagagtgcagcttgctgaatgtcagctgcctgagagagctggggcctgacttactagggcattaaatcctaagaggtcctactgaggtgtggcaggatcacaggccagtggaaaaagggcaggtcagatgggcaaggcccaggactttcagattaactgagaggatatcgaggccaagcatggcagggggaaggtcagtgggtgtcaagagacccaggtctgaccccggatgtttgctccatgtgacaaaagcaggcctgtctcaggaccttttcttttcttttttccttctttttttttttgacacggagtttcgctcttgttgtccaggctagagtgcaatggcatgatcccagctcaccgcaacgtctacctcccaggttcaaatcattctcttgcctcagactcccgagtagctgggattacaggcacatgccaccatgcctggctaattttgtatatttagtagaaacagggtttcaccatgctggccatgctggtctcgaactcctgacctcaggtgttccacctacctcagcctcccaaagtgctggggttacaggtgtgagccatcgcgcctggccaggacctttgtttcttatctacatattggaagatttggtcctgatgtcctttgaggcttctttagctctagttctctgacacttcagcctatatcacagctaacttcttcagtctcatctattccttatgctccagcccctggcaatttgcctcaagatgggggtttgaaaataactttacctgactcaaggagtgtctggagcacctcctagtctaagtctgcaagctccagttcttgcctaaaaccatgccagtggccacccttgggctcagacagctctgggccttttgaccacaagccagcccctcgccctctctgtggcatagtcttctctgccccaggactgcagggcggcttcctccaaggcttccaaggctcaaaagaaatttggctccatccaagaaggctccagctcccctactggcccctggctcaggcccacacccctggccaggcccagagagtgtgtctcaggagaattcaatggctctagagagacacacagaaagtttggcatttggaaatttcaaggatgtatgtatgctcacgtatggagcaggttgtcctggtccctgggtgcagggaagtgggctgcagggaagtggattggaggggagcttgaggaatataaggagcgggggtggagactcaggctatggacaaggacagccccaaggttgggaagacctggccttagtcgtcctcagcctaggggcagggcagtgaagaaagctctccccgctcctgctgtaatgacccagagtagcctccccaggccggcatcttatgtgtgtcttccaccatcctcatggtggcacttttctaggcctgtctcccagcattgtgcaaggctcggaagagaaccaggaagtgaaactgggtgaaaacagaaagctcaatggatgggctaggttcccagatcattagggcagagtttgcacgtcctctggtcactggaatccacccagcccacgaatcatctccctcttgaaggattttatttctactgggttttggaacaaactcctgctgagaccccacagccagaaactgaaagcagcagctccccaaagcctggaaaatccctaagagaaggcctggggcaggaagtggagtgacaggggacaggtagagagaagggggcccaatggccagggagtgaaggaggtggcgttgctgagagcagtctgcacatgcttctgtctgagtgcaggaaggtgttccagggtcgaaattacacttctcgtacctggagacgctgtttgtgggagcactgggctcatgcctggcacacaataggtctgcaataaaccatggttaaatcctga

SEQ ID NO: 769 - DNA, 1971 bp, Homo sapiens
  source 1..1971: mol_type = unassigned DNA
aggaaacggtttattaggagggagtggtggagctgggccaggcaggaagacgctggaataagaaacatttttgctccagcccccatcccagtcccgggaggctgccgcgccagctgcgccgagcgagcccctccccggctccagcccggtccggggccgcgcccggaccccagcccgccgtccagcgctggcggtgcaactgcggccgcgcggtggaggggaggtggccccggtccgccgaaggctagcgccccgccacccgcagagcgggcccagagggaccatgaccttgggctcccccaggaaaggccttctgatgctgctgatggccttggtgacccagggagaccctgtgaagccgtctcggggcccgctggtgacctgcacgtgtgagagcccacattgcaaggggcctacctgccggggggcctggtgcacagtagtgctggtgcgggaggaggggaggcacccccaggaacatcggggctgcgggaacttgcacagggagctctgcagggggcgccccaccgagttcgtcaaccactactgctgcgacagccacctctgcaaccacaacgtgtccctggtgctggaggccacccaacctccttcggagcagccgggaacagatggccagctggccctgatcctgggccccgtgctggccttgctggccctggtggccctgggtgtcctgggcctgtggcatgtccgacggaggcaggagaagcagcgtggcctgcacagcgagctgggagagtccagtctcatcctgaaagcatctgagcagggcgacagcatgttgggggacctcctggacagtgactgcaccacagggagtggctcagggctccccttcctggtgcagaggacagtggcacggcaggttgccttggtggagtgtgtgggaaaaggccgctatggcgaagtgtggcggggcttgtggcacggtgagagtgtggccgtcaagatcttctcctcgagggatgaacagtcctggttccgggagactgagatctataacacagtgttgctcagacacgacaacatcctaggcttcatcgcctcagacatgacctcccgcaactcgagcacgcagctgtggctcatcacgcactaccacgagcacggctccctctacgactttctgcagagacagacgctggagccccatctggctctgaggctagctgtgtccgcggcatgcggcctggcgcacctgcacgtggagatcttcggtacacagggcaaaccagccattgcccaccgcgacttcaagagccgcaatgtgctggtcaagagcaacctgcagtgttgcatcgccgacctgggcctggctgtgatgcactcacagggcagcgattacctggacatcggcaacaacccgagagtgggcaccaagcggtacatggcacccgaggtgctggacgagcagatccgcacggactgctttgagtcctacaagtggactgacatctgggcctttggcctggtgctgtgggagattgcccgccggaccatcgtgaatggcatcgtggaggactatagaccacccttctatgatgtggtgcccaatgaccccagctttgaggacatgaagaaggtggtgtgtgtggatcagcagacccccaccatccctaaccggctggctgcagacccggtcctctcaggcctagctcagatgatgcgggagtgctggtacccaaacccctctgcccgactcaccgcgctgcggatcaagaagacactacaaaaaattagcaacagtccagagaagcctaaagtgattcaatagcccaggagcacctgattcctttctgcctgcagggggctgggggggtggggggcagtggatggtgccctatctgggtagaggtagtgtgagtgtggtgtgtgctggggatgggcagctgcgcctgcctgctcggcccccagcccacccagccaaaaatacagctgggctgaaacctg

SEQ ID NO: 770 - DNA, 1356 bp, Homo sapiens
  source 1..1356: mol_type = unassigned DNA
aaaaaaaactctgtgatttcctctgggcaggagggagccacggccagcggctgtcacacttcatggctcttactccacctctcttgctcctctctgcagggaccatgaccttgggctcccccaggaaaggccttctgatgctgctgatggccttggtgacccagggaaaaggccgctatggcgaagtgtggcggggcttgtggcacggtgagagtgtggccgtcaagatcttctcctcgagggatgaacagtcctggttccgggagactgagatctataacacagtgttgctcagacacgacaacatcctaggcttcatcgcctcagacatgacctcccgcaactcgagcacgcagctgtggctcatcacgcactaccacgagcacggctccctctacgactttctgcagagacagacgctggagccccatctggctctgaggctagctgtgtccgcggcatgcggcctggcgcacctgcacgtggagatcttcggtacacagggcaaaccagccattgcccaccgcgacttcaagagccgcaatgtgctggtcaagagcaacctgcagtgttgcatcgccgacctgggcctggctgtgatgcactcacagggcagcgattacctggacatcggcaacaacccgagagtgggcaccaagcggtacatggcacccgaggtgctggacgagcagatccgcacggactgctttgagtcctacaagtggactgacatctgggcctttggcctggtgctgtgggagattgcccgccggaccatcgtgaatggcatcgtggaggactatagaccacccttctatgatgtggtgcccaatgaccccagctttgaggacatgaagaaggtggtgtgtgtggatcagcagacccccaccatccctaaccggctggctgcagacccggtcctctcaggcctagctcagatgatgcgggagtgctggtacccaaacccctctgcccgactcaccgcgctgcggatcaagaagacactacaaaaaattagcaacagtccagagaagcctaaagtgattcaatagcccaggagcacctgattcctttctgcctgcagggggctgggggggtggggggcagtggatggtgccctatctgggtagaggtagtgtgagtgtggtgtgtgctggggatgggcagctgcgcctgcctgctcggcccccagcccacccagccaaaaatacagctgggctgaaacctgatcccctgctgtctggcctgctcaaagcggcaggctccctgacgcctggctctctccccacccctatggccagcatggtgcaccccctaccactcccgggacaggatgcaaaagaggctccagagtca

SEQ ID NO: 771 - DNA, 582 bp, Homo sapiens
  source 1..582: mol_type = unassigned DNA
aggcggcagggagtagggaggcggcctccctgcctcccctccaaaaaaaactctgtgatttcctctgggcaggagggagccacggccagcggctgtcacacttcatggctcttactccacctctcttgctcctctctgcagggaccatgaccttgggctcccccaggaaaggccttctgatgctgctgatggccttggtgacccagggagaccctgtgaagccgtctcggggcccgctggtgacctgcacgtgtgagagcccacattgcaaggggcctacctgccggggggcctggtgcacagtagtgctggtgcgggaggaggggaggcacccccaggaacatcggggctgcgggaacttgcacagggagctctgcagggggcgccccaccgagttcgtcaaccactactgctgcgacagccacctctgcaaccacaacgtgtccctggtgctggagggaaaaggccgctatggcgaagtgtggcggggcttgtggcacggtgagagtgtggccgtcaagatcttctcctcgagggatgaacagtcctggttccgggagactgagatctataacacagtgt

SEQ ID NO: 772 - DNA, 4121 bp, Homo sapiens
  source 1..4121: mol_type = unassigned DNA
cggcagggagtagggaggcggcctccctgcctcccctccaaaaaaaactctgtgatttcctctgggcaggagggagccacggccagcggctgtcacacttcatggctcttactccacctctcttgctcctctctgcagggaccatgaccttgggctcccccaggaaaggccttctgatgctgctgatggccttggtgacccagggagaccctgtgaagccgtctcggggcccgctggtgacctgcacgtgtgagagcccacattgcaaggggcctacctgccggggggcctggtgcacagtagtgctggtgcgggaggaggggaggcacccccaggaacatcggggctgcgggaacttgcacagggagctctgcagggggcgccccaccgagttcgtcaaccactactgctgcgacagccacctctgcaaccacaacgtgtccctggtgctggaggccacccaacctccttcggagcagccgggaacagatggccagctggccctgatcctgggccccgtgctggccttgctggccctggtggccctgggtgtcctgggcctgtggcatgtccgacggaggcaggagaagcagcgtggcctgcacagcgagctgggagagtccagtctcatcctgaaagcatctgagcagggcgacagcatgttgggggacctcctggacagtgactgcaccacagggagtggctcagggctccccttcctggtgcagaggacagtggcacggcaggttgccttggtggagtgtgtgggaaaaggccgctatggcgaagtgtggcggggcttgtggcacggtgagagtgtggccgtcaagatcttctcctcgagggatgaacagtcctggttccgggagactgagatctataacacagtgttgctcagacacgacaacatcctaggcttcatcgcctcagacatgacctcccgcaactcgagcacgcagctgtggctcatcacgcactaccacgagcacggctccctctacgactttctgcagagacagacgctggagccccatctggctctgaggctagctgtgtccgcggcatgcggcctggcgcacctgcacgtggagatcttcggtacacagggcaaaccagccattgcccaccgcgacttcaagagccgcaatgtgctggtcaagagcaacctgcagtgttgcatcgccgacctgggcctggctgtgatgcactcacagggcagcgattacctggacatcggcaacaacccgagagtgggcaccaagcggtacatggcacccgaggtgctggacgagcagatccgcacggactgctttgagtcctacaagtggactgacatctgggcctttggcctggtgctgtgggagattgcccgccggaccatcgtgaatggcatcgtggaggactatagaccacccttctatgatgtggtgcccaatgaccccagctttgaggacatgaagaaggtggtgtgtgtggatcagcagacccccaccatccctaaccggctggctgcagacccggtcctctcaggcctagctcagatgatgcgggagtgctggtacccaaacccctctgcccgactcaccgcgctgcggatcaagaagacactacaaaaaattagcaacagtccagagaagcctaaagtgattcaatagcccaggagcacctgattcctttctgcctgcagggggctgggggggtggggggcagtggatggtgccctatctgggtagaggtagtgtgagtgtggtgtgtgctggggatgggcagctgcgcctgcctgctcggcccccagcccacccagccaaaaatacagctgggctgaaacctgatcccctgctgtctggcctgctcaaagcggcaggctccctgacgcctggctctctccccacccctatggccagcatggtgcaccccctaccactcccgggacaggatgcaaaagaggctccagagtcagagtgccaagccagggaatcccagtcccagactcagagcccgggcctgcactttgccccctgcccttgatcaaccccactgccccaccagagctgccagggtggcacagggccctgtccagcccctggcacacacttccctgccaggcctcagcctctagcataagctccagagagccagggcccatcagtttctctctgtggatttgtatctcagctccatgatgccttgggctttctgtctcctcaacaagagtgcagcttgctgaatgtcagctgcctgagagagctggggcctgacttactagggcattaaatcctaagaggtcctactgaggtgtggcaggatcacaggccagtggaaaaagggcaggtcagatgggcaaggcccaggactttcagattaactgagaggatatcgaggccaagcatggcagggggaaggtcagtgggtgtcaagagacccaggtctgaccccggatgtttgctccatgtgacaaaagcaggcctgtctcaggaccttttcttttcttttttccttctttttttttttgacacggagtttcgctcttgttgtccaggctagagtgcaatggcatgatcccagctcaccgcaacgtctacctcccaggttcaaatcattctcttgcctcagactcccgagtagctgggattacaggcacatgccaccatgcctggctaattttgtatatttagtagaaacagggtttcaccatgctggccatgctggtctcgaactcctgacctcaggtgttccacctacctcagcctcccaaagtgctggggttacaggtgtgagccatcgcgcctggccaggacctttgtttcttatctacatattggaagatttggtcctgatgtcctttgaggcttctttagctctagttctctgacacttcagcctatatcacagctaacttcttcagtctcatctattccttatgctccagcccctggcaatttgcctcaagatgggggtttgaaaataactttacctgactcaaggagtgtctggagcacctcctagtctaagtctgcaagctccagttcttgcctaaaaccatgccagtggccacccttgggctcagacagctctgggccttttgaccacaagccagcccctcgccctctctgtggcatagtcttctctgccccaggactgcagggcggcttcctccaaggcttccaaggctcaaaagaaatttggctccatccaagaaggctccagctcccctactggcccctggctcaggcccacacccctggccaggcccagagagtgtgtctcaggagaattcaatggctctagagagacacacagaaagtttggcatttggaaatttcaaggatgtatgtatgctcacgtatggagcaggttgtcctggtccctgggtgcagggaagtgggctgcagggaagtggattggaggggagcttgaggaatataaggagcgggggtggagactcaggctatggacaaggacagccccaaggttgggaagacctggccttagtcgtcctcagcctaggggcagggcagtgaagaaagctctccccgctcctgctgtaatgacccagagtagcctccccaggccggcatcttatgtgtgtcttccaccatcctcatggtggcacttttctaggcctgtctcccagcattgtgcaaggctcggaagagaaccaggaagtgaaactgggtgaaaacagaaagctcaatggatgggctaggttcccagatcattagggcagagtttgcacgtcctctggtcactggaatccacccagcccacgaatcatctccctcttgaaggattttatttctactgggttttggaacaaactcctgctgagaccccacagccagaaactgaaagcagcagctccccaaagcctggaaaatccctaagagaaggcctggggcaggaagtggagtgacaggggacaggtagagagaagggggcccaatggccagggagtgaaggaggtggcgttgctgagagcagtctgcacatgcttctgtctgagtgcaggaaggtgttccagggtcgaaattacacttctcgtacctggagacgctgtttgtgggagcactgggctcatgcctggcacacaataggtctgcaataaaccatggttaaatcct

SEQ ID NO: 773 - DNA, 3045 bp, Homo sapiens
  source 1..3045: mol_type = unassigned DNA
gaagagatgtgggcctctggggccgctggattcagtaacttccgtcgggttctagactggctcggctctgtccagtttgtgccagatagtctcccaccccctccccacccctcctttcccctggagatttgaacgctgcttgcatgggagaaaagctacttagagaagaaaacgttccacttagtaacagaagaaaagtcttggttaaaaagttgtcatgaatttggcttttggagagaggcagcaagcctggagcattggtaagcgtcacactgccaaagtgagagctgctggagaactcataatcccaggaacgcctcttctactctccgagtaccccagtgaccagagtgagagaagctctgaacgagggcacgcggcttgaaggactgtgggcagatgtgaccaagagcctgcattaagttgtacaatggtagatggagtgatgattcttcctgtgcttatcatgattgctctcccctcccctagtatggaagatgagaagcccaaggtcaaccccaaactctacatgtgtgtgtgtgaaggtctctcctgcggtaatgaggaccactgtgaaggccagcagtgcttttcctcactgagcatcaacgatggcttccacgtctaccagaaaggctgcttccaggtttatgagcagggaaagatgacctgtaagaccccgccgtcccctggccaagccgtggagtgctgccaaggggactggtgtaacaggaacatcacggcccagctgcccactaaaggaaaatccttccctggaacacagaatttccacttggaggttggcctcattattctctctgtagtgttcgcagtatgtcttttagcctgcctgctgggagttgctctccgaaaatttaaaaggcgcaaccaagaacgcctcaatccccgagacgtggagtatggcactatcgaagggctcatcaccaccaatgttggagacagcactttagcagatttattggatcattcgtgtacatcaggaagtggctctggtcttccttttctggtacaaagaacagtggctcgccagattacactgttggagtgtgtcgggaaaggcaggtatggtgaggtgtggaggggcagctggcaaggggagaatgttgccgtgaagatcttctcctcccgtgatgagaagtcatggttcagggaaacggaattgtacaacactgtgatgctgaggcatgaaaatatcttaggtttcattgcttcagacatgacatcaagacactccagtacccagctgtggttaattacacattatcatgaaatgggatcgttgtacgactatcttcagcttactactctggatacagttagctgccttcgaatagtgctgtccatagctagtggtcttgcacatttgcacatagagatatttgggacccaagggaaaccagccattgcccatcgagatttaaagagcaaaaatattctggttaagaagaatggacagtgttgcatagcagatttgggcctggcagtcatgcattcccagagcaccaatcagcttgatgtggggaacaatccccgtgtgggcaccaagcgctacatggcccccgaagttctagatgaaaccatccaggtggattgtttcgattcttataaaagggtcgatatttgggcctttggacttgttttgtgggaagtggccaggcggatggtgagcaatggtatagtggaggattacaagccaccgttctacgatgtggttcccaatgacccaagttttgaagatatgaggaaggtagtctgtgtggatcaacaaaggccaaacatacccaacagatggttctcagacccgacattaacctctctggccaagctaatgaaagaatgctggtatcaaaatccatccgcaagactcacagcactgcgtatcaaaaagactttgaccaaaattgataattccctcgacaaattgaaaactgactgttgacattttcatagtgtcaagaaggaagatttgacgttgttgtcattgtccagctgggacctaatgctggcctgactggttgtcagaatggaatccatctgtctccctccccaaatggctgctttgacaaggcagacgtcgtacccagccatgtgttggggagacatcaaaaccaccctaacctcgctcgatgactgtgaactgggcatttcacgaactgttcacactgcagagactaatgttggacagacactgttgcaaaggtagggactggaggaacacagagaaatcctaaaagagatctgggcattaagtcagtggctttgcatagctttcacaagtctcctagacactccccacgggaaactcaaggaggtggtgaatttttaatcagcaatattgcctgtgcttctcttctttattgcactaggaattctttgcattccttacttgcactgttactcttaattttaaagacccaacttgccaaaatgttggctgcgtactccactggtctgtctttggataataggaattcaatttggcaaaacaaaatgtaatgtcagactttgctgcattttacacatgtgctgatgtttacaatgatgccgaacattaggaattgtttatacacaactttgcaaattatttattacttgtgcacttagtagtttttacaaaactgctttgtgcatatgttaaagcttatttttatgtggtcttatgattttattacagaaatgtttttaacactatactctaaaatggacattttcttttattatcagttaaaatcacattttaagtgcttcacatttgtatgtgtgtagactgtaactttttttcagttcatatgcagaacgtatttagccattacccacgtgacaccaccgaatatattactgatttagaagcaaagatttcagtagaattttagtcctgaacgctacggggaaaatgcattttcttcagaattatccattacgtgcatttaaactctgccagaaaaaaataactattttgttttaatctactttttgtatttagtagttatttgtataaattaaataaactgttttcaagtcaaa

SEQ ID NO: 774 - DNA, 2879 bp, Homo sapiens
  source 1..2879: mol_type = unassigned DNA
gataaacggatccagggcctggttttcagttctataggacttgtccaagaagctatttgtattcatctatcatgaaagatcaaattacatgctaatattctgaaagtaacaccccgccagaaaccctccagcagcagtgaagtctatataaaaccaagccttggcaatttgcacattgccagttccgacagagtgtggtgttaaaaatatttaacaggtcatttttgaaccgtagaaaagaccctgacttaacttacatgttgtacaatggtagatggagtgatgattcttcctgtgcttatcatgattgctctcccctcccctagtatggaagatgagaagcccaaggtcaaccccaaactctacatgtgtgtgtgtgaaggtctctcctgcggtaatgaggaccactgtgaaggccagcagtgcttttcctcactgagcatcaacgatggcttccacgtctaccagaaaggctgcttccaggtttatgagcagggaaagatgacctgtaagaccccgccgtcccctggccaagccgtggagtgctgccaaggggactggtgtaacaggaacatcacggcccagctgcccactaaaggaaaatccttccctggaacacagaatttccacttggaggttggcctcattattctctctgtagtgttcgcagtatgtcttttagcctgcctgctgggagttgctctccgaaaatttaaaaggcgcaaccaagaacgcctcaatccccgagacgtggagtatggcactatcgaagggctcatcaccaccaatgttggagacagcactttagcagatttattggatcattcgtgtacatcaggaagtggctctggtcttccttttctggtacaaagaacagtggctcgccagattacactgttggagtgtgtcgggaaaggcaggtatggtgaggtgtggaggggcagctggcaaggggagaatgttgccgtgaagatcttctcctcccgtgatgagaagtcatggttcagggaaacggaattgtacaacactgtgatgctgaggcatgaaaatatcttaggtttcattgcttcagacatgacatcaagacactccagtacccagctgtggttaattacacattatcatgaaatgggatcgttgtacgactatcttcagcttactactctggatacagttagctgccttcgaatagtgctgtccatagctagtggtcttgcacatttgcacatagagatatttgggacccaagggaaaccagccattgcccatcgagatttaaagagcaaaaatattctggttaagaagaatggacagtgttgcatagcagatttgggcctggcagtcatgcattcccagagcaccaatcagcttgatgtggggaacaatccccgtgtgggcaccaagcgctacatggcccccgaagttctagatgaaaccatccaggtggattgtttcgattcttataaaagggtcgatatttgggcctttggacttgttttgtgggaagtggccaggcggatggtgagcaatggtatagtggaggattacaagccaccgttctacgatgtggttcccaatgacccaagttttgaagatatgaggaaggtagtctgtgtggatcaacaaaggccaaacatacccaacagatggttctcagacccgacattaacctctctggccaagctaatgaaagaatgctggtatcaaaatccatccgcaagactcacagcactgcgtatcaaaaagactttgaccaaaattgataattccctcgacaaattgaaaactgactgttgacattttcatagtgtcaagaaggaagatttgacgttgttgtcattgtccagctgggacctaatgctggcctgactggttgtcagaatggaatccatctgtctccctccccaaatggctgctttgacaaggcagacgtcgtacccagccatgtgttggggagacatcaaaaccaccctaacctcgctcgatgactgtgaactgggcatttcacgaactgttcacactgcagagactaatgttggacagacactgttgcaaaggtagggactggaggaacacagagaaatcctaaaagagatctgggcattaagtcagtggctttgcatagctttcacaagtctcctagacactccccacgggaaactcaaggaggtggtgaatttttaatcagcaatattgcctgtgcttctcttctttattgcactaggaattctttgcattccttacttgcactgttactcttaattttaaagacccaacttgccaaaatgttggctgcgtactccactggtctgtctttggataataggaattcaatttggcaaaacaaaatgtaatgtcagactttgctgcattttacacatgtgctgatgtttacaatgatgccgaacattaggaattgtttatacacaactttgcaaattatttattacttgtgcacttagtagtttttacaaaactgctttgtgcatatgttaaagcttatttttatgtggtcttatgattttattacagaaatgtttttaacactatactctaaaatggacattttcttttattatcagttaaaatcacattttaagtgcttcacatttgtatgtgtgtagactgtaactttttttcagttcatatgcagaacgtatttagccattacccacgtgacaccaccgaatatattactgatttagaagcaaagatttcagtagaattttagtcctgaacgctacggggaaaatgcattttcttcagaattatccattacgtgcatttaaactctgccagaaaaaaataactattttgttttaatctactttttgtatttagtagttatttgtataaattaaataaactgttttcaagtc

SEQ ID NO: 775 - DNA, 2084 bp, Homo sapiens
  source 1..2084: mol_type = unassigned DNA
gaagcgaatagcgtttcagagatattgggcggctcaagggtcttactctgtcgcccagtctgtaatgcagtgctgtgaccatagcccactgcagcctccacctcccaggctcaagcagtccttcccccctcgccctcatgaatagctgggactacagcctggagcattggtaagcgtcacactgccaaagtgagagctgctggagaactcataatcccaggaacgcctcttctactctccgagtaccccagtgaccagagtgagagaagctctgaacgagggcacgcggcttgaaggactgtgggcagatgtgaccaagagcctgcattaagttgtacaatggtagatggagtgatgattcttcctgtgcttatcatgattgctctcccctcccctagtatggaagatgagaagcccaaggtcaaccccaaactctacatgtgtgtgtgtgaaggtctctcctgcggtaatgaggaccactgtgaaggccagcagtgcttttcctcactgagcatcaacgatggcttccacgtctaccagaaaggctgcttccaggtttatgagcagggaaagatgacctgtaagaccccgccgtcccctggccaagccgtggagtgctgccaaggggactggtgtaacaggaacatcacggcccagctgcccactaaaggaaaatccttccctggaacacagaatttccacttggaggttggcctcattattctctctgtagtgttcgcagtatgtcttttagcctgcctgctgggagttgctctccgaaaatttaaaaggcgcaaccaagaacgcctcaatccccgagacgtggagtatggcactatcgaagggctcatcaccaccaatgttggagacagcactttagcagatttattggatcattcgtgtacatcaggaagtggctctggtcttccttttctggtacaaagaacagtggctcgccagattacactgttggagtgtgtcgggaaaggcaggtatggtgaggtgtggaggggcagctggcaaggggagaatgttgccgtgaagatcttctcctcccgtgatgagaagtcatggttcagggaaacggaattgtacaacactgtgatgctgaggcatgaaaatatcttaggtttcattgcttcagacatgacatcaagacactccagtacccagctgtggttaattacacattatcatgaaatgggatcgttgtacgactatcttcagcttactactctggatacagttagctgccttcgaatagtgctgtccatagctagtggtcttgcacatttgcacatagagatatttgggacccaagggaaaccagccattgcccatcgagatttaaagagcaaaaatattctggttaagaagaatggacagtgttgcatagcagatttgggcctggcagtcatgcattcccagagcaccaatcagcttgatgtggggaacaatccccgtgtgggcaccaagcgctacatggcccccgaagttctagatgaaaccatccaggtggattgtttcgattcttataaaagggtcgatatttgggcctttggacttgttttgtgggaagtggccaggcggatggtgagcaatggtatagtggaggattacaagccaccgttctacgatgtggttcccaatgacccaagttttgaagatatgaggaaggtagtctgtgtggatcaacaaaggccaaacatacccaacagatggttctcagacccgacattaacctctctggccaagctaatgaaagaatgctggtatcaaaatccatccgcaagactcacagcactgcgtatcaaaaagactttgaccaaaattgataattccctcgacaaattgaaaactgactgttgacattttcatagtgtcaagaaggaagatttgacgttgttgtcattgtccagctgggacctaatgctggcctgactggttgtcagaatggaatccatctgtctccctccccaaatggctgctttgacaaggcagacgtcgtacccagccatgtgttggggagacatcaaaaccaccctaacctcgctcgatgactgtgaactgggcatttcacgaac

SEQ ID NO: 776 - DNA, 531 bp, Homo sapiens
  source 1..531: mol_type = unassigned DNA
ggtctatcggaagtttaaagcaatgcagcgggaagtaccttgcctttttgaagcgaatagcgtttcagagatattgggcggctcaagcctggagcattggtaagcgtcacactgccaaagtgagagctgctggagaactcataatcccaggaacgcctcttctactctccgagtaccccagtgaccagagtgagagaagctctgaacgagggcacgcggcttgaaggactgtgggcagatgtgaccaagagcctgcattaagttgtacaatggtagatggagtgatgattcttcctgtgcttatcatgattgctctcccctcccctagtatggaagatgagaagcccaaggtcaaccccaaactctacatgtgtgtgtgtgaaggtctctcctgcggtaatgaggaccactgtgaaggccagcagtgcttttcctcactgagcatcaacgatggcttccacgtctaccagaaaggctgcttccaggtttatgagcagggaaagatgacctgtaagaccccgccgtcccctg

SEQ ID NO: 777 - DNA, 536 bp, Homo sapiens
  source 1..536: mol_type = unassigned DNA
actccgcctcccccggctcagcccccggccgcggcgggacccgaggtgggctcagccttctttccttcaattcctgtttcagtctcattttcatggactggtccccaaacttgtctgcattggaagcacctggggagtttctagacctgagcctgtgcccacctcatgagggtcttactctgtcgcccagtctgtaatgcagtgctgtgaccatagcccactgcagcctccacctcccaggctcaagcagtccttcccccctcgccctcatgaatagctgggactacagcctggagcattggtaagcgtcacactgccaaagtgagagctgctggagaactcataatcccaggaacgcctcttctactctccgagtaccccagtgaccagagtgagagaagctctgaacgagggcacgcggcttgaaggactgtgggcagatgtgaccaagagcctgcattaagttgtacaatggtagatggagtgatgattcttcctgtgcttatcatgattgctctcccctcccctagtatgga

SEQ ID NO: 778 - DNA, 550 bp, Homo sapiens
  source 1..550: mol_type = unassigned DNA
ctgcagcgcccggctgcctcgcactccgcctcccccggctcagcccccggccgcggcgggacccgagagtttcgctcttgttgtccaggctggagtggaatggcgtgatctcggctcaccgtgatctcggctcaccgtaacctccgcctctcagcctggagcattggtaagcgtcacactgccaaagtgagagctgctggagaactcataatcccaggaacgcctcttctactctccgagtaccccagtgaccagagtgagagaagctctgaacgagggcacgcggcttgaaggactgtgggcagatgtgaccaagagcctgcattaagttgtacaatggtagatggagtgatgattcttcctgtgcttatcatgattgctctcccctcccctagtatggaagatgagaagcccaaggtcaaccccaaactctacatgtgtgtgtgtgaaggtctctcctgcggtaatgaggaccactgtgaaggccagcagtgcttttcctcactgagcatcaacgatggcttccacgtctaccagaaaggctgcttcc

SEQ ID NO: 779 - DNA, 2861 bp, Homo sapiens
  source 1..2861: mol_type = unassigned DNA
ctgcagcgcccggctgcctcgcactccgcctcccccggctcagcccccggccgcggcgggacccgagcctggagcattggtaagcgtcacactgccaaagtgagagctgctggagaactcataatcccaggaacgcctcttctactctccgagtaccccagtgaccagagtgagagaagctctgaacgagggcacgcggcttgaaggactgtgggcagatgtgaccaagagcctgcattaagttgtacaatggtagatggagtgatgattcttcctgtgcttatcatgattgctctcccctcccctagtatggaagatgagaagcccaaggtcaaccccaaactctacatgtgtgtgtgtgaaggtctctcctgcggtaatgaggaccactgtgaaggccagcagtgcttttcctcactgagcatcaacgatggcttccacgtctaccagaaaggctgcttccaggtttatgagcagggaaagatgacctgtaagaccccgccgtcccctggccaagccgtggagtgctgccaaggggactggtgtaacaggaacatcacggcccagctgcccactaaaggaaaatccttccctggaacacagaatttccacttggaggttggcctcattattctctctgtagtgttcgcagtatgtcttttagcctgcctgctgggagttgctctccgaaaatttaaaaggcgcaaccaagaacgcctcaatccccgagacgtggagtatggcactatcgaagggctcatcaccaccaatgttggagacagcactttagcagatttattggatcattcgtgtacatcaggaagtggctctggtcttccttttctggtacaaagaacagtggctcgccagattacactgttggagtgtgtcgggaaaggcaggtatggtgaggtgtggaggggcagctggcaaggggagaatgttgccgtgaagatcttctcctcccgtgatgagaagtcatggttcagggaaacggaattgtacaacactgtgatgctgaggcatgaaaatatcttaggtttcattgcttcagacatgacatcaagacactccagtacccagctgtggttaattacacattatcatgaaatgggatcgttgtacgactatcttcagcttactactctggatacagttagctgccttcgaatagtgctgtccatagctagtggtcttgcacatttgcacatagagatatttgggacccaagggaaaccagccattgcccatcgagatttaaagagcaaaaatattctggttaagaagaatggacagtgttgcatagcagatttgggcctggcagtcatgcattcccagagcaccaatcagcttgatgtggggaacaatccccgtgtgggcaccaagcgctacatggcccccgaagttctagatgaaaccatccaggtggattgtttcgattcttataaaagggtcgatatttgggcctttggacttgttttgtgggaagtggccaggcggatggtgagcaatggtatagtggaggattacaagccaccgttctacgatgtggttcccaatgacccaagttttgaagatatgaggaaggtagtctgtgtggatcaacaaaggccaaacatacccaacagatggttctcagacccgacattaacctctctggccaagctaatgaaagaatgctggtatcaaaatccatccgcaagactcacagcactgcgtatcaaaaagactttgaccaaaattgataattccctcgacaaattgaaaactgactgttgacattttcatagtgtcaagaaggaagatttgacgttgttgtcattgtccagctgggacctaatgctggcctgactggttgtcagaatggaatccatctgtctccctccccaaatggctgctttgacaaggcagacgtcgtacccagccatgtgttggggagacatcaaaaccaccctaacctcgctcgatgactgtgaactgggcatttcacgaactgttcacactgcagagactaatgttggacagacactgttgcaaaggtagggactggaggaacacagagaaatcctaaaagagatctgggcattaagtcagtggctttgcatagctttcacaagtctcctagacactccccacgggaaactcaaggaggtggtgaatttttaatcagcaatattgcctgtgcttctcttctttattgcactaggaattctttgcattccttacttgcactgttactcttaattttaaagacccaacttgccaaaatgttggctgcgtactccactggtctgtctttggataataggaattcaatttggcaaaacaaaatgtaatgtcagactttgctgcattttacacatgtgctgatgtttacaatgatgccgaacattaggaattgtttatacacaactttgcaaattatttattacttgtgcacttagtagtttttacaaaactgctttgtgcatatgttaaagcttatttttatgtggtcttatgattttattacagaaatgtttttaacactatactctaaaatggacattttcttttattatcagttaaaatcacattttaagtgcttcacatttgtatgtgtgtagactgtaactttttttcagttcatatgcagaacgtatttagccattacccacgtgacaccaccgaatatattactgatttagaagcaaagatttcagtagaattttagtcctgaacgctacggggaaaatgcattttcttcagaattatccattacgtgcatttaaactctgccagaaaaaaataactattttgttttaatctactttttgtatttagtagttatttgtataaattaaataaactgttttcaagtc

SEQ ID NO: 780 - DNA, 534 bp, Homo sapiens
  source 1..534: mol_type = unassigned DNA
gcagccgcggaacaaaactgtcttgctttgggcctgaactgctggtgggatatggggggtgggggggcagaggcgtggagcgggggtctcagcctggagcattggtaagcgtcacactgccaaagtgagagctgctggagaactcataatcccaggaacgcctcttctactctccgagtaccccagtgaccagagtgagagaagctctgaacgagggcacgcggcttgaaggactgtgggcagatgtgaccaagagcctgcattaagttgtacaatggtagatggagtgatgattcttcctgtgcttatcatgattgctctcccctcccctagtatggaagatgagaagcccaaggtcaaccccaaactctacatgtgtgtgtgtgaaggtctctcctgcggtaatgaggaccactgtgaaggccagcagtgcttttcctcactgagcatcaacgatggcttccacgtctaccagaaaggctgcttccaggtttatgagcagggaaagatgacctgtaagaccccgccgtcccc

SEQ ID NO: 781 - DNA, 564 bp, Homo sapiens
  source 1..564: mol_type = unassigned DNA
actccgcctcccccggctcagcccccggccgcggcgggacccgagggtcttactctgtcgcccagtctgtaatgcagtgctgtgaccatagcccactgcagcctccacctcccaggctcaagcagtccttcccccctcgccctcatgaatagctgggactacagcctggagcattggtaagcgtcacactgccaaagtgagagctgctggagaactcataatcccaggaacgcctcttctactctccgagtaccccagtgaccagagtgagagaagctctgaacgagggcacgcggcttgaaggactgtgggcagatgtgaccaagagcctgcattaagttgtacaatggtagatggagtgatgattcttcctgtgcttatcatgattgctctcccctcccctagtatggaagatgagaagcccaaggtcaaccccaaactctacatgtgtgtgtgtgaaggtctctcctgcggtaatgaggaccactgtgaaggccagcagtgcttttcctcactgagcatcaacgatggcttccacgtctaccagaaaggctgcttccaggt

SEQ ID NO: 782 - DNA, 4563 bp, Homo sapiens
  source 1..4563: mol_type = unassigned DNA
ggggaggcgccgggggcgcgcgcgcgcgcgctgggcgctgctgggctgcggcggcggcggcggcggcggtggttactatggcggagtcggccggagcctcctccttcttcccccttgttgtcctcctgctcgccggcagcggcgggtccgggccccggggggtccaggctctgctgtgtgcgtgcaccagctgcctccaggccaactacacgtgtgagacagatggggcctgcatggtttccattttcaatctggatgggatggagcaccatgtgcgcacctgcatccccaaagtggagctggtccctgccgggaagcccttctactgcctgagctcggaggacctgcgcaacacccactgctgctacactgactactgcaacaggatcgacttgagggtgcccagtggtcacctcaaggagcctgagcacccgtccatgtggggcccggtggagctggtaggcatcatcgccggcccggtgttcctcctgttcctcatcatcatcattgttttccttgtcattaactatcatcagcgtgtctatcacaaccgccagagactggacatggaagatccctcatgtgagatgtgtctctccaaagacaagacgctccaggatcttgtctacgatctctccacctcagggtctggctcagggttacccctctttgtccagcgcacagtggcccgaaccatcgttttacaagagattattggcaagggtcggtttggggaagtatggcggggccgctggaggggtggtgatgtggctgtgaaaatattctcttctcgtgaagaacggtcttggttcagggaagcagagatataccagacggtcatgctgcgccatgaaaacatccttggatttattgctgctgacaataaagataatggcacctggacacagctgtggcttgtttctgactatcatgagcacgggtccctgtttgattatctgaaccggtacacagtgacaattgaggggatgattaagctggccttgtctgctgctagtgggctggcacacctgcacatggagatcgtgggcacccaagggaagcctggaattgctcatcgagacttaaagtcaaagaacattctggtgaagaaaaatggcatgtgtgccatagcagacctgggcctggctgtccgtcatgatgcagtcactgacaccattgacattgccccgaatcagagggtggggaccaaacgatacatggcccctgaagtacttgatgaaaccattaatatgaaacactttgactcctttaaatgtgctgatatttatgccctcgggcttgtatattgggagattgctcgaagatgcaattctggaggagtccatgaagaatatcagctgccatattacgacttagtgccctctgacccttccattgaggaaatgcgaaaggttgtatgtgatcagaagctgcgtcccaacatccccaactggtggcagagttatgaggcactgcgggtgatggggaagatgatgcgagagtgttggtatgccaacggcgcagcccgcctgacggccctgcgcatcaagaagaccctctcccagctcagcgtgcaggaagacgtgaagatctaactgctccctctctccacacggagctcctggcagcgagaactacgcacagctgccgcgttgagcgtacgatggaggcctacctctcgtttctgcccagccctctgtggccaggagccctggcccgcaagagggacagagcccgggagagactcgctcactcccatgttgggtttgagacagacaccttttctatttacctcctaatggcatggagactctgagagcgaattgtgtggagaactcagtgccacacctcgaactggttgtagtgggaagtcccgcgaaacccggtgcatctggcacgtggccaggagccatgacaggggcgcttgggaggggccggaggaaccgaggtgttgccagtgctaagctgccctgagggtttccttcggggaccagcccacagcacaccaaggtggcccggaagaaccagaagtgcagcccctctcacaggcagctctgagccgcgctttcccctcctccctgggatggacgctgccgggagactgccagtggagacggaatctgccgctttgtctgtccagccgtgtgtgcatgtgccgaggtgcgtcccccgttgtgcctggttcgtgccatgcccttacacgtgcgtgtgagtgtgtgtgtgtgtctgtaggtgcgcacttacctgcttgagctttctgtgcatgtgcaggtcgggggtgtggtcgtcatgctgtccgtgcttgctggtgcctcttttcagtagtgagcagcatctagtttccctggtgcccttccctggaggtctctccctcccccagagcccctcatgccacagtggtactctgtgtctggcaggctactctgcccaccccagcatcagcacagctctcctcctccatctcagactgtggaaccaaagctggcccagttgtccatgacaaaagaggcttttgggccaaaatgtgagggtggtgggtgggatgggcagggaaggaatcctggtggaagtcttgggtgttagtgtcagccatgggaaatgagccagcccaagggcatcatcctcagcagcatcgaggaagggccgaggaatgtgaagccagatctcgggactcagattggaatgttacatctgtctttcatctcccagatcctggaaacagcagtgtatatttttggtggtggtgggtttggggtggggaagggaagggcgggcaaggagtggggagggagtctggggtgggagggaggcatctgcatgggtcttcttttactggactgtctgatcagggtggagggaaggtgagaggtttgcatccacttcaggagccctactgaagggaacagcctgagccgaacatgttatttaacctgagtatagtatttaacgaagcctagaagcacggctgtgggtggtgatttggtcagcatatcttaggtatataataactttgaagccataacttttaactggagtggtttgatttctttttttaattttattgggagggtttggattttaactttttttaatgttgttaaatattaagtttttgtaaaaggaaaaccatctctgtgattacctctcaatctatttgtttttaaagaaatccctaaaaaaaaaaattatccaattgaacgcacatagctcaatcacactggaaatgtttgtccttgcacctgagcctgttcccactcagcagtgagagttcctctttgccctgaggctcagtctctctcgtattttgtccccacccccaattccttgagtggtttttgctctagggccctttcttgcactgtccagctggttgtaccctctccaggcatttattcaacaaatgtgggtgaagtgcctgctgggtgccaggtgctgggaatacatctgtggacaagacatgcttgggtcctactcctggagcactgtaaaaagagctgattcaagtaagtagatgcctgttttgagaccagaaggtttcataattggttctacgacccttttgagcctagaattattgttcttatataagatcactgaagaaagaggaacccccacaaccccctccacaaagagaccaggggcgggtgatgagacctggggtttagaaccccaggtgagacctcaaatcactgcattcattctgagcccccttcctgtccccaggggaggtgtattgtgtatgtagccttagagcatctctgcctccaacccagcagttctctgccaaagcttgtggaggagggagagccctgtccctgccctcaggctccccagtgctcctggcccttctatttatttgactgattattgcttctttccttgcattaaaggagatcttcccctaacctttgggccaatttactggccactaatttcgtttaaataccattgtgtcattggggggaccgtctttacccctgctgacctcccacctatccgccctgcagcagaaccttggcggtttataggtaatgatggaacttagactcctcttcccagagtcacaagtagcctctgggatctgccaacacacgtccactcccaagccactagcccactccccagttggcccttctgcccttaccccacacacagtccaactcttccacctctggggaagatggagcaggtctttgggaagctcccacacccacctctgccactcttaacactaagtgagagttggggagaaactgaagccgtgtttttggccccccgaggctaaccctgatccatagtgctacctgcacctctggattctggattcacagaccaagtccaagcccgttcttacgtcgccataaaggcccccgaacggcattctcggtacttctgtttgtttttgtacattttattagaaaggactgtaaaatagccacttagacactttacctcttcagtatgcaaatgtaaataaattgtaatataggaaatcttttgttttaatataagaatgagcctgtccaatttctgctgtacattattaaaagttttattcacaga

SEQ ID NO: 783 - DNA, 1665 bp, Homo sapiens
  source 1..1665: mol_type = unassigned DNA
atggcggagtcggccggagcctcctccttcttcccccttgttgtcctcctgctcgccggcagcggcgggtccgggccccggggggtccaggctctgctgtgtgcgtgcaccagctgcctccaggccaactacacgtgtgagacagatggggcctgcatggtttccattttcaatctggatgggatggagcaccatgtgcgcacctgcatccccaaagtggagctggtccctgccgggaagcccttctactgcctgagctcggaggacctgcgcaacacccactgctgctacactgactactgcaacaggatcgacttgagggtgcccagtggtcacctcaaggagcctgagcacccgtccatgtggggcccggtggagctggtaggcatcatcgccggcccggtgttcctcctgttcctcatcatcatcattgttttccttgtcattaactatcatcagcgtgtctatcacaaccgccagagactggacatggaagatccctcatgtgagatgtgtctctccaaagacaagacgctccaggatcttgtctacgatctctccacctcagggtctggctcagggttacccctctttgtccagcgcacagtggcccgaaccatcgttttacaagagattattggcaagggtcggtttggggaagtatggcggggccgctggaggggtggtgatgtggctgtgaaaatattctcttctcgtgaagaacggtcttggttcagggaagcagagatataccagacggtcatgctgcgccatgaaaacatccttggatttattgctgctgacaataaagataatggcacctggacacagctgtggcttgtttctgactatcatgagcacgggtccctgtttgattatctgaaccggtacacagtgacaattgaggggatgattaagctggccttgtctgctgctagtgggctggcacacctgcacatggagatcgtgggcacccaagggaagcctggaattgctcatcgagacttaaagtcaaagaacattctggtgaagaaaaatggcatgtgtgccatagcagacctgggcctggctgtccgtcatgatgcagtcactgacaccattgacattgccccgaatcagagggtggggaccaaacgatacatggcccctgaagtacttgatgaaaccattaatatgaaacactttgactcctttaaatgtgctgatatttatgccctcgggcttgtatattgggagattgctcgaagatgcaattctggaggtacctttcttttttgcctttgctcctacctcccattccaggatgctggatcacccaaagctgttttactgccccctttctttttacaacctgttggatgcctgttgccagagcctgaatcatcgtttaaggttgccatcaaaggtgtggaggtagctgtgcttagggtgcgtttattcttcagggatcagtttgttgaatagcgttgtgtgttatggtaaccattctgaaggctcgtttggctttataaacaaacaaacattgttttattagtccgtggcggggagtgccccggtgcgcatagcacgggattcatgcagtggtctccttcacatcagaagcagtatattctaacgcggtggctcccaagccacattcatgggaaaccctgctgtttcattgtt

SEQ ID NO: 784 - DNA, 1782 bp, Homo sapiens
  source 1..1782: mol_type = unassigned DNA
cgctgctgggctgcggcggcggcggcggcggcggtggttactatggcggagtcggccggagcctcctccttcttcccccttgttgtcctcctgctcgccggcagcggcgggtccgggccccggggggtccaggctctgctgtgtgcgtgcaccagctgcctccaggccaactacacgtgtgagacagatggggcctgcatggtttccattttcaatctggatgggatggagcaccatgtgcgcacctgcatccccaaagtggagctggtccctgccgggaagcccttctactgcctgagctcggaggacctgcgcaacacccactgctgctacactgactactgcaacaggatcgacttgagggtgcccagtggtcacctcaaggagcctgagcacccgtccatgtggggcccggtggagctggtaggcatcatcgccggcccggtgttcctcctgttcctcatcatcatcattgttttccttgtcattaactatcatcagcgtgtctatcacaaccgccagagactggacatggaagatccctcatgtgagatgtgtctctccaaagacaagacgctccaggatcttgtctacgatctctccacctcagggtctggctcagggttacccctctttgtccagcgcacagtggcccgaaccatcgttttacaagagattattggcaagggtcggtttggggaagtatggcggggccgctggaggggtggtgatgtggctgtgaaaatattctcttctcgtgaagaacggtcttggttcagggaagcagagatataccagacggtcatgctgcgccatgaaaacatccttggatttattgctgctgacaataaagataatggcacctggacacagctgtggcttgtttctgactatcatgagcacgggtccctgtttgattatctgaaccggtacacagtgacaattgaggggatgattaagctggccttgtctgctgctagtgggctggcacacctgcacatggagatcgtgggcacccaagggaagcctggaattgctcatcgagacttaaagtcaaagaacattctggtgaagaaaaatggcatgtgtgccatagcagacctgggcctggctgtccgtcatgatgcagtcactgacaccattgacattgccccgaatcagagggtggggaccaaacgatacatggcccctgaagtacttgatgaaaccattaatatgaaacactttgactcctttaaatgtgctgatatttatgccctcgggcttgtatattgggagattgctcgaagatgcaattctggaggagtccatgaagaatatcagctgccatattacgacttagtgccctctgacccttccattgaggaaatgcgaaaggttgtatgtgatcagaagctgcgtcccaacatccccaactggtggcagagttatgaggtaagaagctggcctcctgcggctttcccatcagcctgatttctccaccttagaaaagggtttcttgacaatggggtcaggccccagaggagccccctgagagtgtcagttattatttactattacgtgctattttacatatcccaagccctttagggctacagtctcttgtcctggaccctgtagggtgccatttggagttcacagcctagaagaagaaaaggctttgggcctggtgtggtggcataggcctgtaatcgtagcgctttgagaggctgaggcaggaagatagcttgagctcagaagttcgagacaaacctgggcaatgtggggagaccccatctctac

SEQ ID NO: 785 - DNA, 1791 bp, Homo sapiens
  source 1..1791: mol_type = unassigned DNA
gcgctgctgggctgcggcggcggcggcggcggcggtggttactatggcggagtcggccggagcctcctccttcttcccccttgttgtcctcctgctcgccggcagcggcgggtccgggccccggggggtccaggctctgctgtgtgcgtgcaccagctgcctccaggccaactacacgtgtgagacagatggggcctgcatggtttccattttcaatctggatgggatggagcaccatgtgcgcacctgcatccccaaagtggagctggtccctgccgggaagcccttctactgcctgagctcggaggacctgcgcaacacccactgctgctacactgactactgcaacaggatcgacttgagggtgcccagtggtcacctcaaggagcctgagcacccgtccatgtggggcccggtggagctggtaggcatcatcgccggcccggtgttcctcctgttcctcatcatcatcattgttttccttgtcattaactatcatcagcgtgtctatcacaaccgccagagactggacatggaagatccctcatgtgagatgtgtctctccaaagacaagacgctccaggatcttgtctacgatctctccacctcagggtctggctcagggttacccctctttgtccagcgcacagtggcccgaaccatcgttttacaagagattattggcaagggtcggtttggggaagtatggcggggccgctggaggggtggtgatgtggctgtgaaaatattctcttctcgtgaagaacggtcttggttcagggaagcagagatataccagacggtcatgctgcgccatgaaaacatccttggatttattgctgctgacaataaagcagactgctcattcctcacattgccatgggaagttgtaatggtctctgctgcccccaagctgaggagccttagactccaatacaagggaggaaggggaagagcaagatttttattcccactgaataatggcacctggacacagctgtggcttgtttctgactatcatgagcacgggtccctgtttgattatctgaaccggtacacagtgacaattgaggggatgattaagctggccttgtctgctgctagtgggctggcacacctgcacatggagatcgtgggcacccaagggaagcctggaattgctcatcgagacttaaagtcaaagaacattctggtgaagaaaaatggcatgtgtgccatagcagacctgggcctggctgtccgtcatgatgcagtcactgacaccattgacattgccccgaatcagagggtggggaccaaacgatacatggcccctgaagtacttgatgaaaccattaatatgaaacactttgactcctttaaatgtgctgatatttatgccctcgggcttgtatattgggagattgctcgaagatgcaattctggaggagtccatgaagaatatcagctgccatattacgacttagtgccctctgacccttccattgaggaaatgcgaaaggttgtatgtgatcagaagctgcgtcccaacatccccaactggtggcagagttatgaggcactgcgggtgatggggaagatgatgcgagagtgttggtatgccaacggcgcagcccgcctgacggccctgcgcatcaagaagaccctctcccagctcagcgtgcaggaagacgtgaagatctaactgctccctctctccacacggagctcctggcagcgagaactacgcacagctgccgcgttgagcgtacgatggaggcctacctctcgtttctgcccagccctctgtgg

SEQ ID NO: 786 - DNA, 2362 bp, Homo sapiens
  source 1..2362: mol_type = unassigned DNA
aatgcttctcctaagcacctcgtgtgtgttcttcggcctcactgctctgtggcttaggtatctgtgctgtggggtttgagaaacatggtgaaggtgtatgaacagagcttgacatttgtgctctgctgtgtgcgtgcaccagctgcctccaggccaactacacgtgtgagacagatggggcctgcatggtttccattttcaatctggatgggatggagcaccatgtgcgcacctgcatccccaaagtggagctggtccctgccgggaagcccttctactgcctgagctcggaggacctgcgcaacacccactgctgctacactgactactgcaacaggatcgacttgagggtgcccagtggtcacctcaaggagcctgagcacccgtccatgtggggcccggtggagctggtaggcatcatcgccggcccggtgttcctcctgttcctcatcatcatcattgttttccttgtcattaactatcatcagcgtgtctatcacaaccgccagagactggacatggaagatccctcatgtgagatgtgtctctccaaagacaagacgctccaggatcttgtctacgatctctccacctcagggtctggctcagggttacccctctttgtccagcgcacagtggcccgaaccatcgttttacaagagattattggcaagggtcggtttggggaagtatggcggggccgctggaggggtggtgatgtggctgtgaaaatattctcttctcgtgaagaacggtcttggttcagggaagcagagatataccagacggtcatgctgcgccatgaaaacatccttggatttattgctgctgacaataaagataatggcacctggacacagctgtggcttgtttctgactatcatgagcacgggtccctgtttgattatctgaaccggtacacagtgacaattgaggggatgattaagctggccttgtctgctgctagtgggctggcacacctgcacatggagatcgtgggcacccaagggaagcctggaattgctcatcgagacttaaagtcaaagaacattctggtgaagaaaaatggcatgtgtgccatagcagacctgggcctggctgtccgtcatgatgcagtcactgacaccattgacattgccccgaatcagagggtggggaccaaacgatacatggcccctgaagtacttgatgaaaccattaatatgaaacactttgactcctttaaatgtgctgatatttatgccctcgggcttgtatattgggagattgctcgaagatgcaattctggaggagtccatgaagaatatcagctgccatattacgacttagtgccctctgacccttccattgaggaaatgcgaaaggttgtatgtgatcagaagctgcgtcccaacatccccaactggtggcagagttatgaggcactgcgggtgatggggaagatgatgcgagagtgttggtatgccaacggcgcagcccgcctgacggccctgcgcatcaagaagaccctctcccagctcagcgtgcaggaagacgtgaagatctaactgctccctctctccacacggagctcctggcagcgagaactacgcacagctgccgcgttgagcgtacgatggaggcctacctctcgtttctgcccagccctctgtggccaggagccctggcccgcaagagggacagagcccgggagagactcgctcactcccatgttgggtttgagacagacaccttttctatttacctcctaatggcatggagactctgagagcgaattgtgtggagaactcagtgccacacctcgaactggttgtagtgggaagtcccgcgaaacccggtgcatctggcacgtggccaggagccatgacaggggcgcttgggaggggccggaggaaccgaggtgttgccagtgctaagctgccctgagggtttccttcggggaccagcccacagcacaccaaggtggcccggaagaaccagaagtgcagcccctctcacaggcagctctgagccgcgctttcccctcctccctgggatggacgctgccgggagactgccagtggagacggaatctgccgctttgtctgtccagccgtgtgtgcatgtgccgaggtgcgtcccccgttgtgcctggttcgtgccatgcccttacacgtgcgtgtgagtgtgtgtgtgtgtctgtaggtgcgcacttacctgcttgagctttctgtgcatgtgcaggtcgggggtgtggtcgtcatgctgtccgtgcttgctggtgcctcttttcagtagtgagcagcatctagtttccctggtgcccttccctggaggtctctccctcccccagagcccctcatgccacagtggtactctgtgt

SEQ ID NO: 787 - DNA, 3385 bp, Homo sapiens
  source 1..3385: mol_type = unassigned DNA
gccgggcacagggccgcctttgcctgcctgccctgcagcagcaggcccgggcggctgcgagagggcgcagggggcggaggcgcggcaggggcgggctctgccgcccgccccaccacccgctccccgcccggctgcggggccagtggcaggagcgccgcgcaccgccagccgcagggggcgtgggatgggggcggccggggaggggggcgcccacactgactagagccaaccgcgcacttcaaaagggtgtcggtgccgcgctcccctcccgcggcccgggaacttcaaagcgggccgtgctgccccggctgcctcgctctgctctggggcctcgcagccccggcgcggccgcctggtggcgatgacccgggcgctctgctcagcgctccgccaggctctcctgctgctcgcagcggccgccgagctctcgccaggactgaagtgtgtatgtcttttgtgtgattcttcaaacttcacctgccaaacagaaggagcatgttgggcatcagtcatgctaaccaatggaaaagagcaggtgatcaaatcctgtgtctcccttccagaactgaatgctcaagtcttctgtcatagttccaacaatgttaccaaaaccgaatgctgcttcacagatttttgcaacaacataacactgcaccttccaacagcatcaccaaatgccccaaaacttggacccatggagctggccatcattattactgtgcctgtttgcctcctgtccatagctgcgatgctgacagtatgggcatgccagggtcgacagtgctcctacaggaagaaaaagagaccaaatgtggaggaaccactctctgagtgcaatctggtaaatgctggaaaaactctgaaagatctgatttatgatgtgaccgcctctggatctggctctggtctacctctgttggttcaaaggacaattgcaaggacgattgtgcttcaggaaatagtaggaaaaggtagatttggtgaggtgtggcatggaagatggtgtggggaagatgtggctgtgaaaatattctcctccagagatgaaagatcttggtttcgtgaggcagaaatttaccagacggtcatgctgcgacatgaaaacatccttggtttcattgctgctgacaacaaagataatggaacttggactcaactttggctggtatctgaatatcatgaacagggctccttatatgactatttgaatagaaatatagtgaccgtggctggaatgatcaagctggcgctctcaattgctagtggtctggcacaccttcatatggagattgttggtacacaaggtaaacctgctattgctcatcgagacataaaatcaaagaatatcttagtgaaaaagtgtgaaacttgtgccatagcggacttagggttggctgtgaagcatgattcaatactgaacactatcgacatacctcagaatcctaaagtgggaaccaagaggtatatggctcctgaaatgcttgatgatacaatgaatgtgaatatctttgagtccttcaaacgagctgacatctattctgttggtctggtttactgggaaatagcccggaggtgttcagtcggaggaattgttgaggagtaccaattgccttattatgacatggtgccttcagatccctcgatagaggaaatgagaaaggttgtttgtgaccagaagtttcgaccaagtatcccaaaccagtggcaaagttgtgaagcactccgagtcatggggagaataatgcgtgagtgttggtatgccaacggagcggcccgcctaactgctcttcgtattaagaagactatatctcaactttgtgtcaaagaagactgcaaagcctaatgatgataattatgttaaaaagaaatctctcatagctttcttttccattttcccctttatgtgaatgtttttgccattttttttttgttctacctcaaagataagacagtacagtatttaagtgcccataaggcagcatgaaaagataactctaaagttaagcatgggcaggagttgacttcatccaatctctatgttatgtttaattttattttgaaagcaacacctcaactcatctttttatttaataaggaagaaatatattacaaaagtataaaataagctctataaaaatgttatagtcattaagtttttattttacttgaaccaagagcacatgaatgaacaggaaaagatgtaaaaacatttttttctgagatgaaaacatattaattaaacatgcaaattagagcatgctatctttaggtgatgcaatctatgtttccccctttttaagttagcaggactttttaaaaataaatattgctctaaactttaatatatcgaacgtgagagtggagctgcttagtggaagatgtaagtgaggtgggtgtcccatgtgcttggtctccccttctgctgttctcctgttcttcataatccactactgcagcagtccctgaaccactaaacttgttcctttcatttacaaaagagatacctgacatcctgagacactgagaaatgtcctgaagtcacacagctaatggcagaactggcactaggtccaaatcttgtgataatgaacaccgtaaggttagctagcttcctactttcccttgaatagtgcttttctccctatgtaatatcttttattatgatatttgtggtttagaaggcatattgagttattttgcagaatcataatggacccgcacaaaatctcagaaccatatctgttgacattttttctcatagaaatatcatggttaccccatttgttaatgagcattaatgttttctgaacacttccaaagattaatcaaacataaatattcattgtctgaaaatgtctttaagatacaattcagaggtccctatttcctttgtacatacacacttagaaagaaaagacagaaaaggaagaggaaggaaggaaatattttgagaatatattgagaagaattaagaaaactcttcaatgaagtgttaacaaccaaaccctacagacggtatcagaaacagcaaatagatattcctctaccctttcacagtgagtgagtgagtacagaagaatgctcatgatagttttgccttcattctactttctgtggacacagagtaatgaatatttaatgggacattaaatatgcccttcaaatctataattttactttggtaaacgagatttaacatgatgtcttttatgctcctaaaacatcttttttcaaactccattccttagaacattcttctactgagatgatccaagaccaaaagtgttctttggtacttgcttataaagtgatagtacatgttagcatataatgtattttgaagagtgaagtaaatgctattgataacagtaaaaaaaaaaaaaaa

SEQ ID NO: 788 - DNA, 1501 bp, Homo sapiens
  source 1..1501: mol_type = unassigned DNA
ggaacttcaaagcgggccgtgctgccccggctgcctcgctctgctctggggcctcgcagccccggcgcggccgcctggtggcgatgacccgggcgctctgctcagcgctccgccaggctctcctgctgctcgcagcggccgccgagctctcgccaggactgaagtgtgtatgtcttttgtgtgattcttcaaacttcacctgccaaacagaaggagcatgttgggcatcagtcatgctaaccaatggaaaagagcaggtgatcaaatcctgtgtctcccttccagaactgaatgctcaagtcttctgtcatagttccaacaatgttaccaaaaccgaatgctgcttcacagatttttgcaacaacataacactgcaccttccaacaggtctacctctgttggttcaaaggacaattgcaaggacgattgtgcttcaggaaatagtaggaaaaggtagatttggtgaggtgtggcatggaagatggtgtggggaagatgtggctgtgaaaatattctcctccagagatgaaagatcttggtttcgtgaggcagaaatttaccagacggtcatgctgcgacatgaaaacatccttggtttcattgctgctgacaacaaagataatggaacttggactcaactttggctggtatctgaatatcatgaacagggctccttatatgactatttgaatagaaatatagtgaccgtggctggaatgatcaagctggcgctctcaattgctagtggtctggcacaccttcatatggagattgttggtacacaaggtaaacctgctattgctcatcgagacataaaatcaaagaatatcttagtgaaaaagtgtgaaacttgtgccatagcggacttagggttggctgtgaagcatgattcaatactgaacactatcgacatacctcagaatcctaaagtgggaaccaagaggtatatggctcctgaaatgcttgatgatacaatgaatgtgaatatctttgagtccttcaaacgagctgacatctattctgttggtctggtttactgggaaatagcccggaggtgttcagtcggaggaattgttgaggagtaccaattgccttattatgacatggtgccttcagatccctcgatagaggaaatgagaaaggttgtttgtgaccagaagtttcgaccaagtatcccaaaccagtggcaaagttgtgaagcactccgagtcatggggagaataatgcgtgagtgttggtatgccaacggagcggcccgcctaactgctcttcgtattaagaagactatatctcaactttgtgtcaaagaagactgcaaagcctaatgatgataattatgttaaaaagaaatctctcatagctttcttttccattttcccctttatgtgaatgtttttgccattttttttttgttctacctcaaagataagacagtacagtatttaagtgcccataaggcagcatgaaaagataactctaaagttaagcatgggcaggagtt

SEQ ID NO: 789 - DNA, 1270 bp, Homo sapiens
  source 1..1270: mol_type = unassigned DNA
ggaacttcaaagcgggccgtgctgccccggctgcctcgctctgctctggggcctcgcagccccggcgcggccgcctggtggcgatgacccgggcgctctgctcagcgctccgccaggctctcctgctgctcgcagcggccgccgagctctcgccaggactgaagtgtgtatgtcttttgtgtgattcttcaaacttcacctgccaaacagaaggagcatgttgggcatcagtcatgctaaccaatggaaaagagcaggtgatcaaatcctgtgtctcccttccagaactgaatgctcaagtcttctgtcatagttccaacaatgttaccaaaaccgaatgctgcttcacagatttttgcaacaacataacactgcaccttccaacagataatggaacttggactcaactttggctggtatctgaatatcatgaacagggctccttatatgactatttgaatagaaatatagtgaccgtggctggaatgatcaagctggcgctctcaattgctagtggtctggcacaccttcatatggagattgttggtacacaaggtaaacctgctattgctcatcgagacataaaatcaaagaatatcttagtgaaaaagtgtgaaacttgtgccatagcggacttagggttggctgtgaagcatgattcaatactgaacactatcgacatacctcagaatcctaaagtgggaaccaagaggtatatggctcctgaaatgcttgatgatacaatgaatgtgaatatctttgagtccttcaaacgagctgacatctattctgttggtctggtttactgggaaatagcccggaggtgttcagtcggaggaattgttgaggagtaccaattgccttattatgacatggtgccttcagatccctcgatagaggaaatgagaaaggttgtttgtgaccagaagtttcgaccaagtatcccaaaccagtggcaaagttgtgaagcactccgagtcatggggagaataatgcgtgagtgttggtatgccaacggagcggcccgcctaactgctcttcgtattaagaagactatatctcaactttgtgtcaaagaagactgcaaagcctaatgatgataattatgttaaaaagaaatctctcatagctttcttttccattttcccctttatgtgaatgtttttgccattttttttttgttctacctcaaagataagacagtacagtatttaagtgcccataaggcagcatgaaaagataactctaaagttaagcatgggcaggagtt

SEQ ID NO: 790 - DNA, 5728 bp, Homo sapiens
  source 1..5728: mol_type = unassigned DNA
aggagaccgaaaacgcggccgagcccggagcccggagctggagccagagcctggaccagaacttggccgccgcctgcaccgccgccgccgctgccgcccgccgccccttccccgcgccgcagccgcctcgccgccaccgccgcgagctcggccgccagtggtcctcggactttaggtgtctgggttgaaggtcggtccggacatcggacccagtcagttcccagactgtccgggcggcagcggacgccgctgccgccgccgcctcttcgtcgcctcagcctggcgttttgttccgagagacgggagaggcgagcggagctgacagtgattttgacagtgatttaaacccgcttttgttgttgttggcttttcgttgtttggttttgtgtgttgtgcgtgtgtgtggcggtttttcccccgtggtgcattttattttttatcgttgtgctcttttttttcttttttttttttaacccagtgagcgtttttttttttttttttttttttttttggtctgggcttccgaatatgttttatgacggttgattttacaccaggaggtttgtctccgaggaagacccagggaactggatatctagcgagaacttcctccggattccccggcgcctcgggaaaatgggagctgctgcaaagttggcgtttgccgtctttcttatctcctgttcttcaggtgctatacttggtagatcagaaactcaggagtgtcttttctttaatgctaattgggaaaaagacagaaccaatcaaactggtgttgaaccgtgttatggtgacaaagataaacggcggcattgttttgctacctggaagaatatttctggttccattgaaatagtgaaacaaggttgttggctggatgatatcaactgctatgacaggactgattgtgtagaaaaaaaagacagccctgaagtatatttttgttgctgtgagggcaatatgtgtaatgaaaagttttcttattttccggagatggaagtcacacagcccacttcaaatccagttacacctaagccaccctattacaacatcctgctctattccttggtgccacttatgttaattgcggggattgtcatttgtgcattttgggtgtacaggcatcacaagatggcctaccctcctgtacttgttccaactcaagacccaggaccacccccaccttctccattactaggtttgaaaccactgcagttattagaagtgaaagcaaggggaagatttggttgtgtctggaaagcccagttgcttaacgaatatgtggctgtcaaaatatttccaatacaggacaaacagtcatggcaaaatgaatacgaagtctacagtttgcctggaatgaagcatgagaacatattacagttcattggtgcagaaaaacgaggcaccagtgttgatgtggatctttggctgatcacagcatttcatgaaaagggttcactatcagactttcttaaggctaatgtggtctcttggaatgaactgtgtcatattgcagaaaccatggctagaggattggcatatttacatgaggatatacctggcctaaaagatggccacaaacctgccatatctcacagggacatcaaaagtaaaaatgtgctgttgaaaaacaacctgacagcttgcattgctgactttgggttggccttaaaatttgaggctggcaagtctgcaggcgatacccatggacaggttggtacccggaggtacatggctccagaggtattagagggtgctataaacttccaaagggatgcatttttgaggatagatatgtatgccatgggattagtcctatgggaactggcttctcgctgtactgctgcagatggacctgtagatgaatacatgttgccatttgaggaggaaattggccagcatccatctcttgaagacatgcaggaagttgttgtgcataaaaaaaagaggcctgttttaagagattattggcagaaacatgctggaatggcaatgctctgtgaaaccattgaagaatgttgggatcacgacgcagaagccaggttatcagctggatgtgtaggtgaaagaattacccagatgcagagactaacaaatattattaccacagaggacattgtaacagtggtcacaatggtgacaaatgttgactttcctcccaaagaatctagtctatgatggttgcgccatctgtgcacactaagaaatgggactctgaactggagctgctaagctaaagaaactgcttacagtttattttctgtgtaaaatgagtaggatgtctcttggaaatgttaagaaagaagaccctttgttgaaaaatgttgctctgggagacttactgcattgccgacagcacagatgtgaaggacatgagactaagagaaaccttgcaaactctataaagaaacttttgaaaaagtgtacatgaagaatgtagccctctccaaatcaaggatcttttggacctggctaatggagtgtttgaaaactgacatcagatttcttaatgtctgtcagaagacactaattccttaaatgaactactgctattttttttaaatcaaaaacttttcatttcagattttaaaaagggtaacttgtttttattgcatttgctgttgtttctataaatgactattgtaatgccaatatgacacagcttgtgaatgtttagtgtgctgctgttctgtgtacataaagtcatcaaagtggggtacagtaaagaggcttccaagcattactttaacctccctcaacaaggtatacctcagttccacggttgctaaattataaaattgaaaacactaacaaaatttgaataataaatcgatccatgttttgtaacaaattcactgtgttatttaaggaaaaaaaggtaagctatgcttagtgccaacaataagtggccattcgtaaagcagtgttttagcatttcttgtgctggcttgtaatgtagggaaaaaaagtgctgttttttgaaaagatggtgtcatttcccccttcttcccatgttttaaagccccatcttatatccagttcccaaaatttgcatacttacctaagtattttttttaggtgtgctgtgtttggggaatatttgaaaatttaaagcatgatttaaaattttttaaagtgagctgtgacactggaaagctcttcattttatcttttaaaatagagttttttctatttatatatgtaaaattgtagtgtatttcttttcaccaaacagtgtgtgggacattctttatcactgttttaggatcacctcaggaagtgtcgttacccagaattccccactgtctgctatgagacttgtaactttatcactatacttctgcttggtgccatcttgtcagagtaatatttgatgtctgtgatatgtaaagaattatcctaggataaagatattaaactttaagcagatttcagatgttactgctttaaaacaaatcagggataacaaattaaacgtataacttaaaatatgcaatgacatttagaggtaaccaatgttgatataggtagcatagcctagcctcctccccaaaattgcttttacaactaacactgatactaatttaggatagttcatgccttatccttgctaagaaaatggaattgatggtaggcaggtgctaaagtgcttttcaaaacaatattacgttagaatacaattggattcttcctcaaatttatacaggccaaaaagtaaaacattaattttctgaatttccagattaccaatcaattaatcaacaaatagccagtattatgctgtgtatttctgtcaggtcattttaaaatccatgttaattttataaaagaattttttacatgtcactgtcaggagctcactgtgaatgtgttgtcttcaaatggttatttaaccacacagtacactacattttacatatatgtacgtaatctctgggaatagtaaattaattatgttatttataaacaatacataggtcaacagactttaagcagggaggaaaagaagagtaatagcgtctgtgtgctgcagaccattcagaactgtcacgtgtgtccccatggtctcattcattgtattcctagcaattcccttttcaatgttgagttcacctctttatttcacaaagtacttggtctctcaatttcttgatctggttttgcttccatttaaaaactaatcaagaagggaaaatattgagaatgtgcatacaagaaaatcattaatttcctgaagatgaatttctacctgttgtgaacatttaactttctttttaaaagttaaacaaaaataaacaagggatattatgatgaatgtttggcttatgtgagtactagagataaaatttttaaacccagttattcacaatataaaatgttttcaagttagaaaaaatttttagaaatcctgggtattgtatttaactgtagctaaccaattttaaaacttgtattcttttgagaactattattaatagaaaaactttttataagcagtaaaataagaatgttccagtgactacctgtccttatacctagtcttgttaaaactttcttttgcagggtatttagtgtttggtttacagtcagtgcagagtgggcaagttaacagaaagtttgagctagagatactggaaaaaaaaaagatcaaagaatgagaaaaatggtgatccattttggggcaaactgagaccccccaaataactctttcctcatgtgtatggtgctcctcatgactcgtcttgtattttgcctttctgatacccatcagaactgctgctgctctaacttatactctttaccttgcccagatctccgcgtaaggaatgctttatgatcaacttgccataggactgatggattaaccagtgttcggctttatttgaagtctatgccctgcacagctcttgtatgtattttagatgctagaagtttttttagcatgtgatgtgtgattcttgtttgaattctaggtaccttgtgaattccagaaaaagagactgtgcttcacgattgttagtcccatgaacttgcactatctatctttcatggtgatgttttgaaaatacaatcaggaaaaaacccaacacctttggaatttaaaatagaatcatatcatgaaatttaaaaagaatctcttctgttgcatttcctcacccctaagtaacagctacatttaagtaaaatgcaggtggtaggggaaaaaaaaccatggcgagatggtggtttagtggaataaactgattactggtttttttgtttttttttttttttttaaagaaagaagcttcatcacagatactttccagtttctcttttatacttttttgaaagattactttttaggaacatttggtatgatatgcataaaattatttatccatttatgggcaaaatgatacaagtagcatcttgattgaacatcatttacctcagatattcaaccagcagtacgttttttatgcagtctcaacccatatcccatttgttacctctcagaatattggtaagcagttattttcgctttactctgtatttcttgtgttttgggcacaggttattgtactactgtcaaatcgtacttgctattttttctgcaagtatttaacagaaagcttaaaatccccataaaaccccaccttggataagtgattgttaaatattgtacaaataaaatgtatgctatccccattccatccccaagttaaataaaaaaatgaatacggta

SEQ ID NO: 791 - DNA, 2367 bp, Homo sapiens
  source 1..2367: mol_type = unassigned DNA
gccgccccttccccgcgccgcagccgcctcgccgccaccgccgcgagctcggccgccagtggtcctcggactttaggtgtctgggttgaaggaggtttgtctccgaggaagacccagggaactggatatctagcgagaacttcctccggattccccggcgcctcgggaaaatgggagctgctgcaaagttggcgtttgccgtctttcttatctcctgttcttcaggtgctatacttggtagatcagaaactcaggagtgtcttttctttaatgctaattgggaaaaagacagaaccaatcaaactggtgttgaaccgtgttatggtgacaaagataaacggcggcattgttttgctacctggaagaatatttctggttccattgaaatagtgaaacaaggttgttggctggatgatatcaactgctatgacaggactgattgtgtagaaaaaaaagacagccctgaagtatatttttgttgctgtgagggcaatatgtgtaatgaaaagttttcttattttccggagatggaagtcacacagcccacttcaaatccagttacacctaagccaccctattacaacatcctgctctattccttggtgccacttatgttaattgcggggattgtcatttgtgcattttgggtgtacaggcatcacaagatggcctaccctcctgtacttgttccaactcaagacccaggaccacccccaccttctccattactaggtttgaaaccactgcagttattagaagtgaaagcaaggggaagatttggttgtgtctggaaagcccagttgcttaacgaatatgtggctgtcaaaatatttccaatacaggacaaacagtcatggcaaaatgaatacgaagtctacagtttgcctggaatgaagcatgagaacatattacagttcattggtgcagaaaaacgaggcaccagtgttgatgtggatctttggctgatcacagcatttcatgaaaagggttcactatcagactttcttaaggctaatgtggtctcttggaatgaactgtgtcatattgcagaaaccatggctagaggattggcatatttacatgaggatatacctggcctaaaagatggccacaaacctgccatatctcacagggacatcaaaagtaaaaatgtgctgttgaaaaacaacctgacagcttgcattgctgactttgggttggccttaaaatttgaggctggcaagtctgcaggcgatacccatggacaggttggtacccggaggtacatggctccagaggtattagagggtgctataaacttccaaagggatgcatttttgaggatagatatgtatgccatgggattagtcctatgggaactggcttctcgctgtactgctgcagatggacctgtagatgaatacatgttgccatttgaggaggaaattggccagcatccatctcttgaagacatgcaggaagttgttgtgcataaaaaaaagaggcctgttttaagagattattggcagaaacatgctggaatggcaatgctctgtgaaaccattgaagaatgttgggatcacgacgcagaagccaggttatcagctggatgtgtaggtgaaagaattacccagatgcagagactaacaaatattattaccacagaggacattgtaacagtggtcacaatggtgacaaatgttgactttcctcccaaagaatctagtctatgatggttgcgccatctgtgcacactaagaaatgggactctgaactggagctgctaagctaaagaaactgcttacagtttattttctgtgtaaaatgagtaggatgtctcttggaaatgttaagaaagaagaccctttgttgaaaaatgttgctctgggagacttactgcattgccgacagcacagatgtgaaggacatgagactaagagaaaccttgcaaactctataaagaaacttttgaaaaagtgtacatgaagaatgtagccctctccaaatcaaggatcttttggacctggctaatggagtgtttgaaaactgacatcagatttcttaatgtctgtcagaagacactaattccttaaatgaactactgctattttttttaaatcaaaaacttttcatttcagattttaaaaagggtaacttgtttttattgcatttgctgttgtttctataaatgactattgtaatgccaatatgacacagcttgtgaatgtttagtgtgctgctgttctgtgtacataaagtcatcaaagtggggtacagtaaagaggcttccaagcattactttaacctccctcaacaaggtatacctcagttccacggttgctaaattataaaattgaaaacactaacaaaatttgaataataaatcga

SEQ ID NO: 792 - DNA, 1956 bp, Homo sapiens
  source 1..1956: mol_type = unassigned DNA
aggagaccgaaaacgcggccgagcccggagcccggagctggagccagagcctggaccagaacttggccgccgcctgcaccgccgccgccgctgccgcccgccgccccttccccgcgccgcagccgcctcgccgccaccgccgcgagctcggccgccagtggtcctcggactttaggtgtctgggttgaagacagaaccaatcaaactggtgttgaaccgtgttatggtgacaaagataaacggcggcattgttttgctacctggaagaatatttctggttccattgaaatagtgaaacaaggttgttggctggatgatatcaactgctatgacaggactgattgtgtagaaaaaaaagacagccctgaagtatatttttgttgctgtgagggcaatatgtgtaatgaaaagttttcttattttccggagatggaagtcacacagcccacttcaaatccagttacacctaagccaccctattacaacatcctgctctattccttggtgccacttatgttaattgcggggattgtcatttgtgcattttgggtgtacaggcatcacaagatggcctaccctcctgtacttgttccaactcaagacccaggaccacccccaccttctccattactaggtttgaaaccactgcagttattagaagtgaaagcaaggggaagatttggttgtgtctggaaagcccagttgcttaacgaatatgtggctgtcaaaatatttccaatacaggacaaacagtcatggcaaaatgaatacgaagtctacagtttgcctggaatgaagcatgagaacatattacagttcattggtgcagaaaaacgaggcaccagtgttgatgtggatctttggctgatcacagcatttcatgaaaagggttcactatcagactttcttaaggctaatgtggtctcttggaatgaactgtgtcatattgcagaaaccatggctagaggattggcatatttacatgaggatatacctggcctaaaagatggccacaaacctgccatatctcacagggacatcaaaagtaaaaatgtgctgttgaaaaacaacctgacagcttgcattgctgactttgggttggccttaaaatttgaggctggcaagtctgcaggcgatacccatggacaggttggtacccggaggtacatggctccagaggtattagagggtgctataaacttccaaagggatgcatttttgaggatagatatgtatgccatgggattagtcctatgggaactggcttctcgctgtactgctgcagatggacctgtagatgaatacatgttgccatttgaggaggaaattggccagcatccatctcttgaagacatgcaggaagttgttgtgcataaaaaaaagaggcctgttttaagagattattggcagaaacatgctggaatggcaatgctctgtgaaaccattgaagaatgttgggatcacgacgcagaagccaggttatcagctggatgtgtaggtgaaagaattacccagatgcagagactaacaaatattattaccacagaggacattgtaacagtggtcacaatggtgacaaatgttgactttcctcccaaagaatctagtctatgatggttgcgccatctgtgcacactaagaaatgggactctgaactggagctgctaagctaaagaaactgcttacagtttattttctgtgtaaaatgagtaggatgtctcttggaaatgttaagaaagaagaccctttgttgaaaaatgttgctctgggagacttactgcattgccgacagcacagatgtgaaggacatgagactaagagaaaccttgcaaactctataaagaaacttttgaaaaagtgtacatgaagaatgtagccctctccaaatcaaggatcttttggacctggctaatggagtgtttgaaaactgacatcagatttcttaatgtctgtcag

SEQ ID NO: 793 - DNA, 2136 bp, Homo sapiens
  source 1..2136: mol_type = unassigned DNA
cgcccgcctctttgtatccaacatccgggtttccccgctggctcggctccgtggccgccgctcaggagccattttggactcggttcagctcccctcccccccacccctccccccgttcatggcccctccggactcggcccctgcgcccggggcccgggcccagccccgccgcgctatgcctgagtcgggcgcgccccggcccgtgccccgccgccgccccccggcccccgcgtcgccccggagcccgggccgcagcctgcgccgcccgcagcggccctgagcccggccccgccgaccggcccttggagcccgaacgctgctcggggacgaaggcgcaggaagcgcgcagggaacgagaccgaaggaaggagcgggaaggagagcgcagccgccgcctggccctgcgcgccccgggagcgccgtgcggccctgcccgcgggctccgggtgtgcgcggggcggcgccgcggaacatgacggcgccctgggtggccctcgccctcctctggggatcgctgtgcgccggctctgggcgtggggaggctgagacacgggagtgcatctactacaacgccaactgggagctggagcgcaccaaccagagcggcctggagcgctgcgaaggcgagcaggacaagcggctgcactgctacgcctcctggcgcaacagctctggcaccatcgagctcgtgaagaagggctgctggctagatgacttcaactgctacgataggcaggagtgtgtggccactgaggagaacccccaggtgtacttctgctgctgtgaaggcaacttctgcaacgaacgcttcactcatttgccagaggctgggggcccggaagtcacgtacgagccacccccgacagcccccaccctgctcacggtgctggcctactcactgctgcccatcgggggcctttccctcatcgtcctgctggccttttggatgtaccggcatcgcaagcccccctacggtcatgtggacatccatgaggaccctgggcctccaccaccatcccctctggtgggcctgaagccactgcagctgctggagatcaaggctcgggggcgctttggctgtgtctggaaggcccagctcatgaatgactttgtagctgtcaagatcttcccactccaggacaagcagtcgtggcagagtgaacgggagatcttcagcacacctggcatgaagcacgagaacctgctacagttcattgctgccgagaagcgaggctccaacctcgaagtagagctgtggctcatcacggccttccatgacaagggctccctcacggattacctcaaggggaacatcatcacatggaacgaactgtgtcatgtagcagagacgatgtcacgaggcctctcatacctgcatgaggatgtgccctggtgccgtggcgagggccacaagccgtctattgcccacagggactttaaaagtaagaatgtattgctgaagagcgacctcacagccgtgctggctgactttggcttggctgttcgatttgagccagggaaacctccaggggacacccacggacaggtaggcacgagacggtacatggctcctgaggtgctcgagggagccatcaacttccagagagatgccttcctgcgcattgacatgtatgccatggggttggtgctgtgggagcttgtgtctcgctgcaaggctgcagacggacccgtggatgagtacatgctgccctttgaggaagagattggccagcacccttcgttggaggagctgcaggaggtggtggtgcacaagaagatgaggcccaccattaaagatcactggttgaaacacccgggcctggcccagctttgtgtgaccatcgaggagtgctgggaccatgatgcagaggctcgcttgtccgcgggctgtgtggaggagcgggtgtccctgattcggaggtcggtcaacggcactacctcggactgtctcgtttccctggtgacctctgtcaccaatgtggacctgccccctaaagagtcaagcatctaagcccaggacatgagtgtctgtccagactcagtggatctgaagaaaaaaggaaaaaaagttgtgttttgttttggaaatcccataaaaccaacaaacacataaaatgcagctgctattttaccttg

SEQ ID NO: 794 - DNA, 2943 bp, Homo sapiens
  source 1..2943: mol_type = unassigned DNA
tcgggcgcggcgtcctccctccgcagcagccgagccggacctgcctccccgggcgtgctccgccggccccgccgccggcccgcagcgacagacaggcgctccccgcagctccgcacgggacccaggccgccggaccccagcgccggaccaccctctgtccgccccgaggagtttgccgcctgccggagcacctgcgcacagatggagctggaccaccggaccagcggcgggctccacgcctaccccgggccgcggggcgggcaggtggccaagcccaacgtgatcctgcagatcgggaagtgccgggccgagatgctggagcacgtgcggcggacgcaccggcacctgctggccgaggtgtccaagcaggtggagcgcgagctgaaggggctgcaccggtcggtcgggaagctggagagcaacctggacggctacgtgcccacgagcgactcgcagcgctggaagaagtccatcaaggcctgcctgtgccgctgccaggagaccatcgccaacctggagcgctgggtcaagcgcgagatgcacgtgtggcgcgaggtgttctaccgcctggagcgctgggccgaccgcctggagtccacgggcggcaagtacccggtgggcagcgagtcagcccgccacaccgtttccgtgggcgtggggggtcccgagagctactgccacgaggcagacggctacgactacaccgtcagcccctacgccatcaccccgcccccagccgctggcgagctgcccgggcaggagcccgccgaggcccagcagtaccagccgtgggtccccggcgaggacgggcagcccagccccggcgtggacacgcagatcttcgaggaccctcgagagttcctgagccacctagaggagtacttgcggcaggtgggcggctctgaggagtactggctgtcccagatccagaatcacatgaacgggccggccaagaagtggtgggagttcaagcagggctccgtgaagaactgggtggagttcaagaaggagttcctgcagtacagcgagggcacgctgtcccgagaggccatccagcgcgagctggacctgccgcagaagcagggcgagccgctggaccagttcctgtggcgcaagcgggacctgtaccagacgctctacgtggacgcggacgaggaggagatcatccagtacgtggtgggcaccctgcagcccaagctcaagcgtttcctgcgccaccccctgcccaagaccctggagcagctcatccagaggggcatggaggtgcaggatgacctggagcaggcggccgagccggccggcccccacctcccggtggaggatgaggcggagaccctcacgcccgcccccaacagcgagtccgtggccagtgaccggacccagcccgagtagagggcatcccggagcccccagcctgcccactacatccagcctgtggctttgcccaccaggacttttgagctggggctgactcctgcaggggaagccctggtccagctgggtgccccctcgagctccgggcggactcgcacacactcgtgtcatccagatgtgagcaccgcacccagcggcaaagagccctcccccctgcagggctccacccatcaccctccctccgtctgtctttccggcctggaccccaccctccacactctcaggccatcacagaacaccccagcttcctcattctgctacaacacccaggccctctggacatccagaaaaccaagtgtccggatggcaggggccagcggccaccaagctcatgggacacccagagcagaagctagggcagagccaatgctgagggagcctcgacttccggcgccgccgccctctcccggcatccgcagagccagctgacgccctccctgcctcccagggcagctggccagcctcgggcagcgcggccccctcctcccaggggagagtagaagtcgcacacgcagcagagcagacctgatgtcccggtgcttcctggcccctcagctccagtgattcacgcccgcctggagaagaatcagagctcagctcatgactcacccatggcaggcggagggtcccagaggggctgagtcctcaaatccggctgaggcagcagctggcaccatcagagccaggagagtgacaacaggtctcaaggttcccacaaagtctttgctgctgtgctgggcaccacccacccctcaccttgcaggctgcctgcgtgggaggcgaagtcccaggacagcccagaggggggctacagagaggagtcggctgcagcagagggcaggagccccagcttagccctgagcgccagcgcgaggaccagggcctgccactaagcccgccccgctggccgccagctgcccgtccccagagccactgcagcaggagtcgggccctgcctccctcccagcagggaaaccccgcccgctgccaggccatcctctctgccagaggctttcatgagccccaaggctggggccacagctcctacccctgcccagcagccctgagctcagctgcaggaaggacatcccagaagccatggctcctggggcgcttccaggcattctgccctgccccgacaccagaaccctggtgctggtgggccactagcgtctgcagcctaagcaggtgctggctcagggttcatcgttctgccttgtccactgggggaccagccctgcagaccactctgacaagtcttcagcccacaccctgccagccccacagattttatttttgcacataagccataaccaatcctcaaggctggcacaggctttggggaagccctggagcctgtgaagaccctggaaacctcatgaggctgtggccaacccctgccccttgccccacacagaccaggccttaaatgtcggtccaggccctgtgcaccttaccccagagacagactctttttgtaagattttgttaataaaacactgaaacttc

SEQ ID NO: 795 - DNA, 3573 bp, Homo sapiens
  source 1..3573: mol_type = unassigned DNA
ggaagtcgatacgtggctgccgtctgtccccgctgaggaggtgcagcagccggagatggcggcggtgctgaacgcagagcgactcgaggtgtccgtcgacggcctcacgctcagcccggacccggaggagcggcctggggcggagggcgccccgctgctgccgccaccgctgccaccgccctcgccacctggatccggtcgcggcccgggcgcctcaggggagcagcccgagcccggggaggcggcggctgggggcgcggcggaggaggcgcggcggctggagcagcgctggggtttcggcctggaggagttgtacggcctggcactgcgcttcttcaaagaaaaagatggcaaagcatttcatccaacttatgaagaaaaattgaagcttgtggcactgcataagcaagttcttatgggcccatataatccagacacttgtcctgaggttggattctttgatgtgttggggaatgacaggaggagagaatgggcagccctgggaaacatgtctaaagaggatgccatggtggagtttgtcaagctcttaaataggtgttgccatctcttttcaacatatgttgcgtcccacaaaatagagaaggaagagcaagaaaaaaaaaggaaggaggaagaggagcgaaggcggcgtgaagaggaagaaagagaacgtctgcaaaaggaggaagagaaacgtaggagagaagaagaggaaaggcttcgacgggaggaagaggaaaggagacggatagaagaagaaaggcttcggttggagcagcaaaagcagcagataatggcagctttaaactcccagactgccgtgcagttccagcagtatgcagcccaacagtatccagggaactacgaacagcagcaaattctcatccgccagttgcaggagcaacactatcagcagtacatgcagcagttgtatcaagtccagcttgcacagcaacaggcagcattacagaaacaacaggaagtagtagtggctgggtcttccttgcctacatcatcaaaagtgaatgcaactgtaccaagtaatatgatgtcagttaatggacaggccaaaacacacactgacagctccgaaaaagaactggaaccagaagctgcagaagaagccctggagaatggaccaaaagaatctcttccagtaatagcagctccatccatgtggacacgacctcagatcaaagacttcaaagagaagattcagcaggatgcagattccgtgattacagtgggccgaggagaagtggtcactgttcgagtacccacccatgaagaaggatcatatctcttttgggaatttgccacagacaattatgacattgggtttggggtgtattttgaatggacagactctccaaacactgctgtcagcgtgcatgtcagtgagtccagcgatgacgacgaggaggaagaagaaaacatcggttgtgaagagaaagccaaaaagaatgccaacaagcctttgctggatgagattgtgcctgtgtaccgacgggactgtcatgaggaggtgtatgctggcagccatcaatatccagggagaggagtctatctcctcaagtttgacaactcctactctttgtggcggtcaaaatcagtctactacagagtctattatactagataaaaatgttgttacaaagtctggagtctagggttgggcagaagatgacatttaatttggaaatttctttttacttttgtggagcattagagtcacagtttaccttattgatattggtctgatggtttgtgaactcttgctgggaatcaaaatttccttgagactctttagcattcatactttggggttaaaggagattcctcagactcatccagcccttgggtgctgaccagcagagtcactagtggatgctgaagttacatgagctacatgttaaatatttaaagtctccaaaataaaacaccccaacgttgaccttacccggctgatggttagccccttgctgcctgctccatgtgtcttatgagagcccgtagttacagtgtcctctaatttgaaatccataagttaacaagtctatatcaggtgcagctggctttgattaaaggccatttttaaaacttaaaaactcaacacctcacagattataatagaaaaagaaatggcctcagtttgatctcgttcagaatgacccagattgtttctgctttgggtgcagctgtttagttcagagttatattacagagaattattttctgagataatcttaaactagaatgttcaaaactaattgataattgaagtatcaagatacgtagaacacctcagagatttttcttcaggaacttccacaaactttgaatccttgtatctttatttggtattcatactactagtagcaaaatacaggttttttgttttgttttgttttgttttggcttcatagagtatctcaaattgaaacttttctgcacaaagaataaaattaaggattttataaactcaaattggcacctactgaattaaaatacataaaatcatttaaatataattcagcatatgggaagtaacattgcactaatatggaaatcactgccagagacagtctattttcttttaatttgttactacttagtcacaaaccccacattattccagtttggaattacttattaaggagaattggaaatacatatgcccatgcttaaattttatagctttaatttgtgttatttctttattgacgggaagaggtacatctttttttccttactgaaaacaaatatggattaattgcctcaaatttgtataagtgattggctagtgattcttgttttcagaagggagagtggtatagatagaaaatgacaaagatggcaatatacacttaatgttgttattgtatgttgttactgaagtacttagatttttaaaatttcaaatcctaaatcacttcttgtaggagggttttcattaactgcagtatatacagttcactacatatgggttgtttgagttttttgtgtgctgtatttctttctgttttttaatacctggttttgtacatatctaactctgttctcttttggttgttcagaaactggattttttttttcttaagcagtgcttaatttgtgttttttaattttgattcagaagtagtcccagctcataggtgttcatactgttacatccagaacatttgtcaggctctctgtcagctttcatgtacatatggtatagaaaccatggagttaggcacttcctggattttttttttatgagaaaaatactgtatttaaaatgtaaaataaacttttaaaaagcaggcactaatatatatttcttccagcctttgattacaaatttgtccttgcacatgttaagatgaattatctcctaaaaatatcattgttcttgggagcagtgtatgttactttacatagcagcggttcctgtcatgtgttcatgtcagaatatttttggttttaaactttcttattgcctttggctgttgattagtacagtacaagtgcgatttcaaaaagatcttgaaagtaatatatttaatcaattaaaatgtttatctgtaa

SEQ ID NO: 796 - DNA, 4142 bp, Homo sapiens
  source 1..4142: mol_type = unassigned DNA
gcctccgaccggcgacgcaggttacctgtagggattcgaatccaccacctctgagctcatcttctcgatgcggacccggccgccccctccgtcgccgctcctcgggacctgcagactcctctcctgggcaagttcccgctccagctcctggacccgctgctgcaggcgctccacagactccgccatggctgggactccggccgccaacgctcccagcccgggccttcgccgccgccttcgccccacgttgctcggctgggcccgcgaggggtacgtggggaggcacctcgccgctgccttcctagcccagagccctggggacgtgcacccagcgcctcacagacagacacgtctccgagactcccacaggccttcctcggagccgcttccggtgcgtcgcagacatcgctccccctcatcaaaaacctggctctttcggcttccttcctcgctgggccggctaaacccggccgcagcagcaccggggtgataagtgtccagggcaggaggccagcgatgttgccttgctaaccgggtatctaagagaaacagggtctttttattcttaggctcgacagtctgacggccctttttctgaacgggaccctgcaggtcttccgcctgctgttgcattaaatttgggggtggaagaggcttctgcgttgttccttacccgcaacgatgaccatggctttgccttctttaaaattgaggcctccaactctgacgctgactggagaattgaaacccgaacacacattgggctcttttggcacttgactagagctaaaacctcgggattcagcgggcaagcgttgctcagcaacggcgcgtaggctgtgtgcggttggctggagccagaccccaccccggcctcggcccatgctctagaggggacgttgccccaatcctgaaggacttcggcactcgagacctgtggatgccgcgttgctgtggcctgcgggggtgatcatgaagccaggtgctactggcgagtccgatttggccgaagtgctgccccagcacaagttcgacagcaagtccctggaggcctacctaaaccagcacttgtctggctttggggccgaacgtgaggctacgctgaccattgcccagtacagagcaggaaagtccaatccaaccttttatctccagaagggctttcaaacatatgtgctcaggaaaaaaccaccaggttcacttcttcctaaagcacatcagattgatagagaatttaaagtccagaaagccttgttttcaattggattccccgttcccaagcctatactgtactgcagtgatacttctgtcattggaacagaattttacgtaatggaacatgtgcagggtcgaatcttccgtgatttaacaattcctggacttagcccagcagaacgttcagccatatatgtggccacggtagaaacattggctcagttacgttccttgaatatacagtcactgcagctggaaggatatggtataggtgctgggtactgcaaaagacaggtatcaacctggacaaagcaatatcaagctgcagctcatcaggacatccctgccatgcaacagctatcggagtggctaatgaagaacttgcccgataatgacaatgaagagaatttgattcatggagatttcagactagataacatagttttccaccctaaagagtgtcgagttatagcagtgctggattgggagctgtcaaccattggtcatcctttgtcagacttagctcatttttccctgttctacttttggccaaggacagttccaatgataaatcaaggttcttatagtgaaaactcagggataccatcaatggaagaactgatttcaatatattgccgctgcaggggaattaattctattcttcctaactggaatttctttcttgccctttcatattttaagatggctggaatagcacagggagtatatagcagatatcttctgggaaataattcatctgaggatagctttttatttgccaatattgtgcaacctctggcagaaactggactacaactctccaaacgaactttcagtactgtactaccacagattgatactactggacagttgtttgtacagactcggaaaggtcaggaagttcttattaaggtgaagcatttcatgaaacaacacattcttccagctgaaaaggaggtaactgagttctatgttcaaaatgaaaattcagtggacaagtggggaaaacctttagtgattgataaactcaaggaaatggccaaagtcgagggtctctggaacttgtttttgccagctgtcagcggactcagccacgtggactatgccttgattgctgaagaaacaggaaaatgcttttttgctccagatgtctttaactgccaagcaccagacacagggaatatggaggttctgcacctgtatggaagtgaggaacagaagaaacagtggcttgagcctcttcttcaagggaacattacctcttgcttctgtatgacagaacctgatgtagcttcaagtgatgccacgaatattgaatgcagcatccaacgagatgaagatagctatgtaattaacggcaaaaaatggtggagcagtggagctgggaatcccaagtgcaaaattgcaattgttttgggaagaactcaaaatacttctctctccagacacaaacagcacagcatgattcttgttcccatgaacacacctggagtaaaaataataaggcctttgtcagtttttggctacacagataattttcatggaggacattttgagatccattttaatcaagtgcgagttcctgccacaaatctaatactaggtgaaggtaggggatttgaaatttcccaaggccgccttggacctggcagaatccaccactgtatgagaacagtaggtttggcggaacgcgctttgcagatcatgtgtgagcgggcaacacaaaggatagctttcaagaagaagttgtatgcacatgaggttgtggctcactggattgctgaaagccgcattgccattgagaagatccgcttgttgactctgaaagctgctcacagcatggacactctgggcagtgctggcgctaagaaagagattgcaatgatcaaagtggctgccccacgggctgtcagcaaaatcgttgactgggccatccaggtgtgcggaggtgctggtgtttcccaggattaccctctggctaacatgtatgctataacccgagttttgcgtttagcagatggacctgacgaagttcatctttcagcaatcgcaacaatggagctgcgggaccaagccaaaagactgacagccaagatataaggagggtggcactgccacatcccactggcagaaactctcctttatacaaacttcattggctccaacatttgaatctcatatttttgtagcagtttgagcacagggttaattattcatttgtggtaaagattatagcatctattttgatcagtgggttttattatttcaagggtcacacagggttaagttcagtaagaaatgctgtagctgttgtcattcaatctagtgcctccttgaggccaggagttcaggaccagcctgggcaacatagcgagacccccattgctacaaaaaatttaaaaatgaaacaagtgtggtggcacatgcttgtagtcctagctacttgggaggctgaggcaggaggattgcttgagtctaggagtttgaggttacagtaagctgtgatcgtgacatggcctccagcctgggtgaccgagtgagactgtttctaaaaataaaaacaaaaaataaatttcttcttgaggtggggtggaggtggggagcaagaatttgacctggctctgatccctggtgtgttgtgtgggcctctttaacgtttgccactgagccttaacctcactgtacttcactgtacttcacacgcattggtgttaacattttaatcttagaagaccctgacccactgagggtttgttgtgagaattgctgaagccacgtagaagcaccttgaaatctgtaaaaccacaagaaagtactttataaaaggtatccttatttgaagtggataaatcttgtaactcgaaaagttgtgatttagaagacaggattgtttttgaacattaggaattaaaggctatatctggtcc

SEQ ID NO: 797 - DNA, 3244 bp, Homo sapiens
  source 1..3244: mol_type = unassigned DNA
ttctgaacgggaccctgcaggtcttccgcctgctgttgcattaaatttgggggtggaagaggcttctgcgttgttccttacccgcaacgatgaccatggctttgccttctttaaaattgaggcctccaactctgacgctgactggagaattgaaacccgaacacacattgggctcttttggcacttgactagagctaaaacctcgggattcagcgggcaagcgttgctcagcaacggcgcgtaggctgtgtgcggttggctggagccagaccccaccccggcctcggcccatgctctagaggggacgttgccccaatcctgaaggacttcggcactcgagacctgtggatgccgcgttgctgtggcctgcgggggtgatcatgaagccaggtgctactggcgagtccgatttggccgaagtgctgccccagcacaagttcgacagcaagtccctggaggcctacctaaaccagcacttgtctggctttggggccgaacgtgaggctacgctgaccattgcccagtacagagcaggaaagtccaatccaaccttttatctccagaagggctttcaaacatatgtgctcaggaaaaaaccaccaggttcacttcttcctaaagcacatcagattgatagagaatttaaagtccagaaagccttgttttcaattggattccccgttcccaagcctatactgtactgcagtgatacttctgtcattggaacagaattttacgtaatggaacatgtgcagggtcgaatcttccgtgatttaacaattcctggacttagcccagcagaacgttcagccatatatgtggccacggtagaaacattggctcagttacgttccttgaatatacagtcactgcagctggaaggatatggtataggtgctgggtactgcaaaagacaggtatcaacctggacaaagcaatatcaagctgcagctcatcaggacatccctgccatgcaacagctatcggagtggctaatgaagaacttgcccgataatgacaatgaagagaatttgattcatggagatttcagactagataacatagttttccaccctaaagagtgtcgagttatagcagtgctggattgggagctgtcaaccattggtcatcctttgtcagacttagctcatttttccctgttctacttttggccaaggacagttccaatgataaatcaaggttcttatagtgaaaactcagggataccatcaatggaagaactgatttcaatatattgccgctgcaggggaattaattctattcttcctaactggaatttctttcttgccctttcatattttaagatggctggaatagcacagggagtatatagcagatatcttctgggaaataattcatctgaggatagctttttatttgccaatattgtgcaacctctggcagaaactggactacaactctccaaacgaactttcagtactgtactaccacagattgatactactggacagttgtttgtacagactcggaaaggtcaggaagttcttattaaggtgaagcatttcatgaaacaacacattcttccagctgaaaaggaggtaactgagttctatgttcaaaatgaaaattcagtggacaagtggggaaaacctttagtgattgataaactcaaggaaatggccaaagtcgagggtctctggaacttgtttttgccagctgtcagcggactcagccacgtggactatgccttgattgctgaagaaacaggaaaatgcttttttgctccagatgtctttaactgccaagcaccagacacagggaatatggaggttctgcacctgtatggaagtgaggaacagaagaaacagtggcttgagcctcttcttcaagggaacattacctcttgcttctgtatgacagaacctgatgtagcttcaagtgatgccacgaatattgaatgcagcatccaacgagatgaagatagctatgtaattaacggcaaaaaatggtggagcagtggagctgggaatcccaagtgcaaaattgcaattgttttgggaagaactcaaaatacttctctctccagagaggttgtggctcactggattgctgaaagccgcattgccattgagaagatccgcttgttgactctgaaagctgctcacagcatggacactctgggcagtgctggcgctaagaaagagattgcaatgatcaaagtggctgccccacgggctgtcagcaaaatcgttgactgggccatccaggtgtgcggaggtgctggtgtttcccaggattaccctctggctaacatgtatgctataacccgagttttgcgtttagcagatggacctgacgaagttcatctttcagcaatcgcaacaatggagctgcgggaccaagccaaaagactgacagccaagatataaggagggtggcactgccacatcccactggcagaaactctcctttatacaaacttcattggctccaacatttgaatctcatatttttgtagcagtttgagcacagggttaattattcatttgtggtaaagattatagcatctattttgatcagtgggttttattatttcaagggtcacacagggttaagttcagtaagaaatgctgtagctgttgtcattcaatctagtgcctccttgaggccaggagttcaggaccagcctgggcaacatagcgagacccccattgctacaaaaaatttaaaaatgaaacaagtgtggtggcacatgcttgtagtcctagctacttgggaggctgaggcaggaggattgcttgagtctaggagtttgaggttacagtaagctgtgatcgtgacatggcctccagcctgggtgaccgagtgagactgtttctaaaaataaaaacaaaaaataaatttcttcttgaggtggggtggaggtggggagcaagaatttgacctggctctgatccctggtgtgttgtgtgggcctctttaacgtttgccactgagccttaacctcactgtacttcactgtacttcacacgcattggtgttaacattttaatcttagaagaccctgacccactgagggtttgttgtgagaattgctgaagccacgtagaagcaccttgaaatctgtaaaaccacaagaaagtactttataaaaggtatccttatttgaagtggataaatcttgtaactcgaaaagttgtgatttagaagacaggattgtttttgaacattaggaattaaaggctatatctggtccttacaa

SEQ ID NO: 798 - DNA, 2940 bp, Homo sapiens
  source 1..2940: mol_type = unassigned DNA
ctgcgttgttccttacccgcaacgatgaccatggctttgccttctttaaaattgaggcctccaactctgacgctgactggagaattgaaacccgaacacacattgggctcttttggcacttgactagagctaaaacctcgggattcagcgggcaagcgttgctcagcaacggcgcgtaggctgtgtgcggttggctggagccagaccccaccccggcctcggcccatgctctagaggggacgttgccccaatcctgaaggacttcggcactcgagacctgtggatgccgcgttgctgtggcctgcgggggtgatcatgaagccaggtgctactggcgagtccgatttggccgaagtgctgccccagcacaagttcgacagcaagtccctggaggcctacctaaaccagcacttgtctggctttggggccgaacgtgaggctacgctgaccattgcccagtacagagcaggaaagtccaatccaaccttttatctccagaagggctttcaaacatatgtgctcaggaaaaaaccaccaggttcacttcttcctaaagcacatcagattgatagagaatttaaagtccagaaagccttgttttcaattggattccccgttcccaagcctatactgtactgcagtgatacttctgtcattggaacagaattttacgtaatggaacatgtgcagggtcgaatcttccgtgatttaacaattcctggacttagcccagcagaacgttcagccatatatgtggccacggtagaaacattggctcagttacgttccttgaatatacagtcactgcagctggaaggatatggtataggtgctgggtactgcaaaagacaggtatcaacctggacaaagcaatatcaagctgcagctcatcaggacatccctgccatgcaacagctatcggagtggctaatgaagaacttgcccgataatgacaatgaagagaatttgattcatggagatttcagactagataacatagttttccaccctaaagagtgtcgagttatagcagtgctggattgggagctgtcaaccattggtcatcctttgtcagacttagctcatttttccctgttctacttttggccaaggacagttccaatgataaatcaaggttcttatagtgaaaactcagggataccatcaatggaagaactgatttcaatatattgccgctgcaggggaattaattctattcttcctaactggaatttctttcttgccctttcatattttaagatggctggaatagcacagggagtatatagcagatatcttctgggaaataattcatctgaggatagctttttatttgccaatattgtgcaacctctggcagaaactggactacaactctccaaacgaactttcagtactgtactaccacagattgatactactggacagttgtttgtacagactcggaaaggtcaggaagttcttattaaggtgaagcatttcatgaaacaacacattcttccagctgaaaagacacagggaatatggaggttctgcacctgtatggaagtgaggaacagaagaaacagtggcttgagcctcttcttcaagggaacattacctcttgcttctgtatgacagaacctgatgtagcttcaagtgatgccacgaatattgaatgcagcatccaacgagatgaagatagctatgtaattaacggcaaaaaatggtggagcagtggagctgggaatcccaagtgcaaaattgcaattgttttgggaagaactcaaaatacttctctctccagacacaaacagcacagcatgattcttgttcccatgaacacacctggagtaaaaataataaggcctttgtcagtttttggctacacagataattttcatggaggacattttgagatccattttaatcaagtgcgagttcctgccacaaatctaatactaggtgaaggtaggggatttgaaatttcccaaggccgccttggacctggcagaatccaccactgtatgagaacagtaggtttggcggaacgcgctttgcagatcatgtgtgagcgggcaacacaaaggatagctttcaagaagaagttgtatgcacatgaggttgtggctcactggattgctgaaagccgcattgccattgagaagatccgcttgttgactctgaaagctgctcacagcatggacactctgggcagtgctggcgctaagaaagagattgcaatgatcaaagtggctgccccacgggctgtcagcaaaatcgttgactgggccatccaggtgtgcggaggtgctggtgtttcccaggattaccctctggctaacatgtatgctataacccgagttttgcgtttagcagatggacctgacgaagttcatctttcagcaatcgcaacaatggagctgcgggaccaagccaaaagactgacagccaagatataaggagggtggcactgccacatcccactggcagaaactctcctttatacaaacttcattggctccaacatttgaatctcatatttttgtagcagtttgagcacagggttaattattcatttgtggtaaagattatagcatctattttgatcagtgggttttattatttcaagggtcacacagggttaagttcagtaagaaatgctgtagctgttgtcattcaatctagtgcctccttgaggccaggagttcaggaccagcctgggcaacatagcgagacccccattgctacaaaaaatttaaaaatgaaacaagtgtggtggcacatgcttgtagtcctagctacttgggaggctgaggcaggaggattgcttgagtctaggagtttgaggttacagtaagctgtgatcgtgacatggcctccagcctgggtgaccgagtgagactgtttctaaaaataaaaacaaaaaataaatttcttcttgaggtggggtggaggtgg

SEQ ID NO: 799 - DNA, 2249 bp, Homo sapiens
  source 1..2249: mol_type = unassigned DNA
agggtgcagtgggacaggcgttgccgggtcgcaggtcccgccagtgcgagcgcaacggaggtcgaaggcgttcagactcttagctgaacgcggagctgcggcggctatgctgtggagcggctgccggcgtttcggggcgcgcctcggctgcctgcccggcggtctccgggtcctcgtccagaccggccaccggagcttgacctcctgcatcgacccttccatgggacttaatgaagagcagaaagaatttcaaaaagtggcctttgactttgctgcccgagagatggctccaaatatggcagagtgggaccagaaggagctgttcccagtggatgtgatgcggaaggcagcccagctaggcttcggaggggtctacatacaaacagatgtgggcgggtctgggctgtcacgtcttgatacctctgtcatttttgaagccttggctacaggctgcaccagcaccacagcctatataagcatccacaacatgtgtgcctggatgattgatagcttcggaaatgaggaacagaggcacaaattttgcccaccgctctgtaccatggagaagtttgcttcctactgcctcactgaaccaggaagtgggagtgatgctgcctctcttctgacctccgctaagaaacagggagatcattacatcctcaatggctccaaggccttcatcagtggtgctggtgagtcagacatctatgtggtcatgtgccgaacaggaggaccaggccccaagggcatctcatgcatagttgttgagaaggggacccctggcctcagctttggcaagaaggagaaaaaggtggggtggaactcccagccaacacgagctgtgatcttcgaagactgtgctgtccctgtggccaacagaattgggagcgaggggcagggcttcctcattgccgtgagaggactgaacggagggaggatcaatattgcttcctgctccctgggggctgcccacgcctctgtcatcctcacccgagaccacctcaatgtccggaagcagtttggagagcctctggccagtaaccagtacttgcaattcacactggctgatatggcaacaaggctggtggccgcgcggctgatggtccgcaatgcagcagtggctctgcaggaggagaggaaggatgcagtggccttgtgctccatggccaagctctttgctacagatgaatgctttgccatctgcaaccaggccttgcagatgcacgggggctacggctacctgaaggattacgctgttcagcagtacgtgcgggactccagggtccaccagattctagaaggtagcaatgaagtgatgaggatactgatctctagaagcctgcttcaggagtagaacccacacttgttctggcctggtgttcagtgcgactgcagtcagtgttgagtggtgccatgtgggccgctctattccaaaggaatcatggattagacccaagggctgagctcctctagggcaggacctgcaccctgtgtgttggcaccagcatcgggtcttggactggggcagaatccccagtggaaccggaagagctggactgatgagaaacatcagaagaacacatactaccttgttttcctaatgccagaagggtgaccagtgaagattcaccgtcaaaccatgaaagtcctttcttggatccactttatcttgattagtctgcattttactagttcactggatccctcctctaggggcctggggactttcactgatgctcttcctgattctagagcaaaggtgtgggaaggggaaatggaggaatgccctcctgtctgtgtcgttctctgtgccacagctacagatgcagaaggtttctctggatagcacacctctgaatgtaaatcatgataaaatggatatttggaaacttactcctaagctgtgatttagggtgtatttctacttctggactgcctcaatatcaagggctgagacttttgaattttgaatattcgttgggtttcatgttaagaagcctgtggtctaggagtgctattcagtgtttcttttcctgataaacactttgaatattttttttgtgtttttgtttccttttctgaagctgttcctccttttaaatatttttaatcacattgataaaatctatccttcaccacctctggttctactatagttgatttttattttaaatgtttaattgtatttgattaaacacttaactggattttggaataataaaactctcgtccaatttggcttttaaaaa

SEQ ID NO: 800 - DNA, 1336 bp, Homo sapiens
  source 1..1336: mol_type = unassigned DNA
aacggaggtcgaaggcgttcagactcttagctgaacgcggagctgcggcggctatgctgtggagcggctgccggcgtttcggggcgcgcctcggctgcctgcccggcggtctccgggtcctcgtccagaccggccaccggagcttgacctcctgcatcgaccgagctgttcccagtggatgtgatgcggaaggcagcccagctaggcttcggaggggtctacatacaaacagatgtgggcgggtctgggctgtcacgtcttgatacctctgtcatttttgaagccttggctacaggctgcaccagcaccacagcctatataagcatccacaacatgtgtgcctggatgattgatagcttcggaaatgaggaacagaggcacaaattttgcccaccgctctgtaccatggagaagtttgcttcctactgcctcactgaaccaggaagtgggagtgatgctgcctctcttctgacctccgctaagaaacagggagatcattacatcctcaatggctccaaggccttcatcagtggtgctggtgagtcagacatctatgtggtcatgtgccgaacaggaggaccaggccccaagggcatctcatgcatagttgttgagaaggggacccctggcctcagctttggcaagaaggagaaaaaggtggggtggaactcccagccaacacgagctgtgatcttcgaagactgtgctgtccctgtggccaacagaattgggagcgaggggcagggcttcctcattgccgtgagaggactgaacggagggaggatcaatattgcttcctgctccctgggggctgcccacgcctctgtcatcctcacccgagaccacctcaatgtccggaagcagtttggagagcctctggccagtaaccagtacttgcaattcacactggctgatatggcaacaaggctggtggccgcgcggctgatggtccgcaatgcagcagtggctctgcaggaggagaggaaggatgcagtggccttgtgctccatggccaagctctttgctacagatgaatgctttgccatctgcaaccaggccttgcagatgcacgggggctacggctacctgaaggattacgctgttcagcagtacgtgcgggactccagggtccaccagattctagaagagctgttctggcaggggcctggagtccagagccgcagcttcgtccctttcggggggcctcagatcgctctgctgctgcccttttcctctggagatctgcgagaagggtgaactgagataatggatgagaaagcatgttgaaaaccacagccggggcttttctctaaggttatcgagtacgtggttctca

SEQ ID NO: 801 - DNA, 2169 bp, Homo sapiens
  source 1..2169: mol_type = unassigned DNA
agactcttagctgaacgcggagctgcggcggctatgctgtggagcggctgccggcgtttcggggcgcgcctcggctgcctgcccggcggtctccgggtcctcgtccagaccggccaccggagcttgacctcctgcatcgacccttccatgggacttaatgaagagcagaaagaatttcaaaaagtggcctttgactttgctgcccgagagatggctccaaatatggcagagtgggaccagaaggagctgttcccagtggatgtgatgcggaaggcagcccagctaggcttcggaggggtctacatacaaacagatgtgggcgggtctgggctgtcacgtcttgatacctctgtcatttttgaagccttggctacaggctgcaccagcaccacagcctatataagcatccacaacatgtgtgcctggatgattgatagcttcggaaatgaggaacagaggcacaaattttgcccaccgctctgtaccatggagaagtttgcttcctactgcctcactgaaccaggaagtgggagtgatgctgcctctcttctgacctccgctaagaaacagggagatcattacatcctcaatggctccaaggccttcatcagtggtgctggtgagtcagacatctatgtggtcatgtgccgaacaggaggaccaggccccaagggcatctcatgcatagttgttgagaaggggacccctggcctcagctttggcaagaaggagaaaaaggtggggtggaactcccagccaacacgagctgtgatcttcgaagactgtgctgtccctgtggccaacagaattgggagcgaggggcagggcttcctcattgccgtgagaggactgaacggagggaggatcaatattgcttcctgctccctggggtgcccacgcctctgtcatcctcacccgagaccacctcaatgtccggaagcagtttggagagcctctggccagtaaccagtacttgcaattcacactggctgatatggcaacaaggctggtggccgcgcggctgatggtccgcaatgcagcagtggctctgcaggaggagaggaaggatgcagtggccttgtgctccatggccaagctctttgctacagatgaatgctttgccatctgcaaccaggccttgcagatgcacgggggctacggctacctgaaggattacgctgttcagcagtacgtgcgggactccagggtccaccagattctagaaggtagcaatgaagtgatgaggatactgatctctagaagcctgcttcaggagtagaacccacacttgttctggcctggtgttcagtgcgactgcagtcagtgttgagtggtgccatgtgggccgctctattccaaaggaatcatggattagacccaagggctgagctcctctagggcaggacctgcaccctgtgtgttggcaccagcatcgggtcttggactggggcagaatccccagtggaaccggaagagctggactgatgagaaacatcagaagaacacatactaccttgttttcctaatgccagaagggtgaccagtgaagattcaccgtcaaaccatgaaagtcctttcttggatccactttatcttgattagtctgcattttactagttcactggatccctcctctaggggcctggggactttcactgatgctcttcctgattctagagcaaaggtgtgggaaggggaaatggaggaatgccctcctgtctgtgtcgttctctgtgccacagctacagatgcagaaggtttctctggatagcacacctctgaatgtaaatcatgataaaatggatatttggaaacttactcctaagctgtgatttagggtgtatttctacttctggactgcctcaatatcaagggctgagacttttgaattttgaatattcgttgggtttcatgttaagaagcctgtggtctaggagtgctattcagtgtttcttttcctgataaacactttgaatattttttttgtgtttttgtttccttttctgaagctgttcctccttttaaatatttttaatcacattgataaaatctatccttcaccacctctggttctactatagttgatttttattttaaatgtttaattgtatttgattaaacacttaactggattttggaataataaaactctcgtccaatttggctttt

SEQ ID NO: 802 - DNA, 1189 bp, Homo sapiens
  source 1..1189: mol_type = unassigned DNA
gaaggcgttcagactcttagctgaacgcggagctgcggcggctatgctgtggagcggctgccggcgtttcggggcgcgcctcggctgcctgcccggcggtctccgggtcctcgtccagaccggccaccggagcttgacctcctgcatcgacccttccatgggacttaatgaagagcagaaagaatttcaaaaagtggcctttgactttgctgcccgagagatggctccaaatatggcagagtgggaccagaagcatgtgtgcctggatgattgatagcttcggaaatgaggaacagaggcacaaattttgcccaccgctctgtaccatggagaagtttgcttcctactgcctcactgaaccaggaagtgggagtgatgctgcctctcttctgacctccgctaagaaacagggagatcattacatcctcaatggctccaaggccttcatcagtggtgctggtgagtcagacatctatgtggtcatgtgccgaacaggaggaccaggccccaagggcatctcatgcatagttgttgagaaggggacccctggcctcagctttggcaagaaggagaaaaaggtggggtggaactcccagccaacacgagctgtgatcttcgaagactgtgctgtccctgtggccaacagaattgggagcgaggggcagggcttcctcattgccgtgagaggactgaacggagggaggatcaatattgcttcctgctccctgggggctgcccacgcctctgtcatcctcacccgagaccacctcaatgtccggaagcagtttggagagcctctggccagtaaccagaaaaagcaagagactttgaagctttggatcacttagaaaaggcgcctccgagatgtcttaccgaggctcctgcaccaggtgctggtctaagcccctcagtcttgtctggttctctgctccctgtgctgcagtacttgcaattcacactggctgatatggcaacaaggctggtggccgcgcggctgatggtccgcaatgcagcagtggctctgcaggaggagaggaaggatgcagtggccttgtgctccatggccaagctctttgctacagatgaatgctttgccatctgcaaccaggccttgcagatgcacgggggctacggctacctgaaggattacgctgttcagcagtacgtgcgggactccagggtccaccag

SEQ ID NO: 803 - DNA, 2454 bp, Homo sapiens
  source 1..2454: mol_type = unassigned DNA
agtaacgtcatcagacgtgtgtgtgtccctgcggcgctaagaaggggagactgaggctgaggctggggaacatcgggcagcatgagcggctgcgggctcttcctgcgcaccacggctgcggctcgtgcctgccggggtctggtggtctctaccgcgaaccggcggctactgcgcaccagcccgcctgtacgagctttcgccaaagagcttttcctaggcaaaatcaagaagaaagaagttttcccatttccagaagttagccaagatgaacttaatgaaatcaatcagttcttgggacccgtggaaaaattcttcactgaagaggtggactcccgaaaaattgaccaggaagggaaaatcccagatgaaactttggagaaattgaagagcctagggctttttgggctgcaagtcccagaagaatatggtggcctgggcttctccaacaccatgtactcaagactaggggagatcatcagcatggatgggtccatcactgtgaccctggcagcgcaccaggctattggcctcaaggggatcatcttggctggcactgaggagcagaaagccaaatacttgcctaaactggcgtccggggagcacattgcagccttctgcctcacggagccagccagtgggagcgatgcagcctcaatccggagcagagccacactaagtgaagacaagaagcactacatcctcaatggctccaaggtctggattactaatggaggactggccaatatttttactgtgtttgcaaagactgaggtcgttgattctgatggatcagtgaaagacaaaatcacagcattcatagtagaaagagactttggtggagtcactaatgggaaacccgaagataaattaggcattcggggctccaacacttgtgaagtccattttgaaaacaccaagatacctgtggaaaacatccttggagaggtcggagatgggtttaaggtggccatgaacatcctcaacagcggccggttcagcatgggcagcgtcgtggctgggctgctcaagagattgattgaaatgactgctgagtacgcctgcacaaggaaacagtttaacaagaggctcagtgaatttggattgattcaggagaaatttgcactgatggctcagaaggcttacgtcatggagagtatgacctacctcacagcagggatgctggaccaacctggctttcccgactgctccatcgaggcagccatggtgaaggtgttcagctccgaggccgcctggcagtgtgtgagtgaggcgctgcagatcctcgggggcttgggctacacaagggactatccgtacgagcgcatactgcgtgacacccgcatcctcctcatcttcgagggaaccaatgagattctccggatgtacatcgccctgacgggtctgcagcatgccggccgcatcctgactaccaggatccatgagcttaaacaggccaaagtgagcacagtcatggataccgttggccggaggcttcgggactccctgggccgaactgtggacctggggctgacaggcaaccatggagttgtgcaccccagtcttgcggacagtgccaacaagtttgaggagaacacctactgcttcggccggaccgtggagacactgctgctccgctttggcaagaccatcatggaggagcagctggtactgaagcgggtggccaacatcctcatcaacctgtatggcatgacggccgtgctgtcgcgggccagccgctccatccgcattgggctccgcaaccacgaccacgaggttctcttggccaacaccttctgcgtggaagcttacttgcagaatctcttcagcctctctcagctggacaagtatgctccagaaaacctagatgagcagattaagaaagtgtcccagcagatccttgagaagcgagcctatatctgtgcccaccctctggacaggacatgctgaggcaggggacagtgtcccctgctaccgcccgcccctacccatggcccgttgctggatgactgttactcttttttcagaaggtgttgggattatcacaggttaagccttttgttccccgtctgcacctgaagggttgtcgcctggcctgggagagcctcttccaggttttgacctgcaggcagtgctctctaacaggaccatcacagcttctgaactgagccggagagagagaatggaattgctgacccctggaactggcgggtattctggtcattgaggagacaccatagtggaaactggggcttatgctgctgcctccagggtgtgaggtgggtggggacctgtgtcaggtgtggatagccatttctgctcaaccacacattctctaagaaacagcttgaaagctctgtctgggtcattcatttaaactagaagcagaggcacttaaaacatgtaccaggaaccatttaacaaagaatataaaatgtcacaatctgtgtactgtta

SEQ ID NO: 804 - DNA, 2401 bp, Homo sapiens
  source 1..2401: mol_type = unassigned DNA
gctaagaaggggagactgaggctgaggctggggaacatcgggcagcatgagcggctgcgggctcttcctgcgcaccacggctgcggctcgtgcctgccggggtctggtggtctctaccgcgaaccggcggctactgcgcaccagcccgcctgtacgagctttcgccaaagagcttttcctaggcaaaatcaagaaggtaacgcgagccctgggcgaacccttgctgtctggctcccgcttttcaccctcagctgcaagactggtgttgaactttgtgagattccccaaacctgccagagagatacaccctgcggccgaggcgtgttaacactccggattcctgagttccaggaaaaccttcccagagaaaggtggactcccgaaaaattgaccaggaagggaaaatcccagatgaaactttggagaaattgaagagcctagggctttttgggctgcaagtcccagaagaatatggtggcctgggcttctccaacaccatgtactcaagactaggggagatcatcagcatggatgggtccatcactgtgaccctggcagcgcaccaggctattggcctcaaggggatcatcttggctggcactgaggagcagaaagccaaatacttgcctaaactggcgtccggggagcacattgcagccttctgcctcacggagccagccagtgggagcgatgcagcctcaatccggagcagagccacactaagtgaagacaagaagcactacatcctcaatggctccaaggtctggattactaatggaggactggccaatatttttactgtgtttgcaaagactgaggtcgttgattctgatggatcagtgaaagacaaaatcacagcattcatagtagaaagagactttggtggagtcactaatgggaaacccgaagataaattaggcattcggggctccaacacttgtgaagtccattttgaaaacaccaagatacctgtggaaaacatccttggagaggtcggagatgggtttaaggtggccatgaacatcctcaacagcggccggttcagcatgggcagcgtcgtggctgggctgctcaagagattgattgaaatgactgctgagtacgcctgcacaaggaaacagtttaacaagaggctcagtgaatttggattgattcaggagaaatttgcactgatggctcagaaggcttacgtcatggagagtatgacctacctcacagcagggatgctggaccaacctggctttcccgactgctccatcgaggcagccatggtgaaggtgttcagctccgaggccgcctggcagtgtgtgagtgaggcgctgcagatcctcgggggcttgggctacacaagggactatccgtacgagcgcatactgcgtgacacccgcatcctcctcatcttcgagggaaccaatgagattctccggatgtacatcgccctgacgggtctgcagcatgccggccgcatcctgactaccaggatccatgagcttaaacaggccaaagtgagcacagtcatggataccgttggccggaggcttcgggactccctgggccgaactgtggacctggggctgacaggcaaccatggagttgtgcaccccagtcttgcggacagtgccaacaagtttgaggagaacacctactgcttcggccggaccgtggagacactgctgctccgctttggcaagaccatcatggaggagcagctggtactgaagcgggtggccaacatcctcatcaacctgtatggcatgacggccgtgctgtcgcgggccagccgctccatccgcattgggctccgcaaccacgaccacgaggttctcttggccaacaccttctgcgtggaagcttacttgcagaatctcttcagcctctctcagctggacaagtatgctccagaaaacctagatgagcagattaagaaagtgtcccagcagatccttgagaagcgagcctatatctgtgcccaccctctggacaggacatgctgaggcaggggacagtgtcccctgctaccgcccgcccctacccatggcccgttgctggatgactgttactcttttttcagaaggtgttgggattatcacaggttaagccttttgttccccgtctgcacctgaagggttgtcgcctggcctgggagagcctcttccaggttttgacctgcaggcagtgctctctaacaggaccatcacagcttctgaactgagccggagagagagaatggaattgctgacccctggaactggcgggtattctggtcattgaggagacaccatagtggaaactggggcttatgctgctgcctccagggtgtgaggtgggtggggacctgtgtcaggtgtggatagccatttctgctcaaccacacattctctaagaaacagcttgaaagctc

SEQ ID NO: 805 - DNA, 2393 bp, Homo sapiens
  source 1..2393: mol_type = unassigned DNA
gctaagaaggggagactgaggctgaggctggggaacatcgggcagcatgagcggctgcgggctcttcctgcgcaccacggctgcggctcgtgcctgccggggtctggtggtctctaccgcgaaccggcggctactgcgcaccagcccgcctgtacgagctttcgccaaagagcttttcctaggcaaaatcaagaaggtaacgcgagccctgggcgaacccttgctgtctggctcccgcttttcaccctcagctgcaagactggtgttgaactttgtgagattccccaaacctgccagagagatacaccctgcggccgaggcgtgttaacactccggattcctgagttccaggaaaaccttcccagagaaaggtggactcccgaaaaattgaccaggaagggaaaatcccagatgaaactttggagaaattgaagagcctagggctttttgggctgcaagtcccagaagaatatggtggcctgggcttctccaacaccatgtactcaagactaggggagatcatcagcatggatgggtccatcactgtgaccctggcagcgcaccaggctattggcctcaaggggatcatcttggctggcactgaggagcagaaagccaaatacttgcctaaactggcgtccggggagcacattgcagccttctgcctcacggagccagccagtgggagcgatgcagcctcaatccggagcagagccacactaagtgaagacaagaagcactacatcctcaatggctccaaggtctggattactaatggaggactggccaatatttttactgtgtttgcaaagactgaggtcgttgattctgatggatcagtgaaagacaaaatcacagcattcatagtagaaagagactttggtggagtcactaatgggaaacccgaagataaattaggcattcggggctccaacacttgtgaagtccattttgaaaacaccaagatacctgtggaaaacatccttggagaggtcggagatgggtttaaggtggccatgaacatcctcaacagcggccggttcagcatgggcagcgtcgtggctgggctgctcaagagattgattgaaatgactgctgagtacgcctgcacaaggaaacagtttaacaagaggctcagtgaatttggattgattcaggagaaatttgcactgatggctcagaaggcttacgtcatggagagtatgacctacctcacagcagggatgctggaccaacctggctttcccgactgctccatcgaggcagccatggtgaaggtgttcagctccgaggccgcctggcagtgtgtgagtgaggcgctgcagatcctcgggggcttgggctacacaagggactatccgtacgagcgcatactgcgtgacacccgcatcctcctcatcttcgagggaaccaatgagattctccggatgtacatcgccctgacgggtctgcagcatgccggccgcatcctgactaccaggatccatgagcttaaacaggccaaagtgagcacagtcatggataccgttggccggaggcttcgggactccctgggccgaactgtggacctggggctgacaggcaaccatggagttgtgcaccccagtcttgcggacagtgccaacaagtttgaggagaacacctactgcttcggccggaccgtggagacactgctgctccgctttggcaagaccatcatggaggagcagctggtactgaagggtggccaacatcctcatcaacctgtatggcatgacggccgtgctgtcgcgggccagccgctccatccgcattgggctccgcaaccacgaccacgaggttctcttggccaacaccttctgcgtggaagcttacttgcagaatctcttcagcctctctcagctggacaagtatgctccagaaaacctagaagcagattaagaaagtgtcccagcagatccttgagaagcgagcctatatctgtgcccaccctctggacaggacatgctgagaggggacagtgtcccctgctaccgcccgcccctacccatggcccgttgctggatgactgttactcttttttcagaaggttgggattatcacaggttaagccttttgttccccgtctgcacctgaagggttgtcgcctggcctgggagagcctcttccaggttttgacctgcaggcagtgctctctaacaggaccatcacagcttctgaactgagccggagagagagaatggaattgctgacccctggaactggcgggtattctggtcattgaggagacaccatagtggaaactggggcttatgctgctgcctccagggtgtgaggtgggtggggacctgtgtcaggtgtggatagccatttctgctcaaccacacattctctaagaaacagcttgaaagctc

SEQ ID NO: 806 - DNA, 1950 bp, Homo sapiens
  source 1..1950: mol_type = unassigned DNA
tggaggccccgccccctggccgcgagcgcacctcggccccgctcccgaggccctacgggcgtggcctctgtcccgggtcccgccccccagcactccggaacagcgcgctcgcagcgggaggtcgcgaagcctgggactgtgtctgtcgcccatggccgccgcgctgctcgcccgggcctcgggccctgcccgcagagctctctgtcctagggcctggcggcagttacacaccatctaccagtctgtggaactgcccgagacacaccagatgttgctccagacatgccgggactttgccgagaaggagttgtttcccattgcagcccaggtggataaggaacatctcttcccagcggctcaggtgaagaagatgggcgggcttgggcttctggccatggacgtgcccgaggagcttggcggtgctggcctcgattacctggcctacgccatcgccatggaggagatcagccgtggctgcgcctccaccggagtcatcatgagtgtcaacaactctctctacctggggcccatcttgaagtttggctccaaggagcagaagcaggcgtgggtcacgcctttcaccagtggtgacaaaattggctgctttgccctcagcgaaccagggaacggcagtgatgcaggagctgcgtccaccaccgcccgggccgagggcgactcatgggttctgaatggaaccaaagcctggatcaccaatgcctgggaggcttcggctgccgtggtctttgccagcacggacagagccctgcaaaacaagggcatcagtgccttcctggtccccatgccaacgcctgggctcacgttggggaagaaagaagacaagctgggcatccggggctcatccacggccaacctcatctttgaggactgtcgcatccccaaggacagcatcctgggggagccagggatgggcttcaagatagccatgcaaaccctggacatgggccgcatcggcatcgcctcccaggccctgggcattgcccagaccgccctcgattgtgctgtgaactacgctgagaatcgcatggccttcggggcgcccctcaccaagctccaggtcatccagttcaagttggcagacatggccctggccctggagagtgcccggctgctgacctggcgcgctgccatgctgaaggataacaagaagcctttcatcaaggaggcagccatggccaagctggccgcctcggaggccgcgaccgccatcagccaccaggccatccagatcctgggcggcatgggctacgtgacagagatgccggcagagcggcactaccgcgacgcccgcatcactgagatctacgagggcaccagcgaaatccagcggctggtgatcgccgggcatctgctcaggagctaccggagctgagcccgcggcggactgccccaggactgcgggaaggcgcgggagccaggggcctccaccccaaccccggctcagagactgggcggcccggcgggggctccctggggaccccagatgggctcagtgctgccacccagatcagatcacatgggaatgaggccctccgaccattggcagctccgcctctgggcctttccgcctcctcaccactgtgcctcaagttcctcatctaagtggccctggcctcctgggggcggggttgtgggggggctgagcgacactcagggacacctcagttgtcctcccgcgggccctggtgccctggcatgaaggcccagtgcgacaggcccttggtggggtctgtcttttccttgaggtcagaggtcaggagcagggctggggtcaggatgacgaggcctggggtcctggtgttgggcaggtggtggggctgggccatggagctggcccagaggcccctcagccctttgtaaagtctgatgaaggcaggggtggtgattcatgctgtgtgactgactgtgggtaataaacacacctgtccccca

SEQ ID NO: 807 - DNA, 2172 bp, Homo sapiens
  source 1..2172: mol_type = unassigned DNA
agaggagtcccgcgttcggggagtatgtcaaggccgtgacccgtgtattattgtccgagtggccggaacgggagccaacatggcagcggggttcgggcgatgctgcagggtcctgagaagtatttctcgttttcattggagatcacagcatacaaaagccaatcgacaacgtgaaccaggattaggatttagttttgagttcaccgaacagcagaaagaatttcaagctactgctcgtaaatttgccagagaggaaatcatcccagtggctgcagaatatgataaaactggtgaatatccagtccccctaattagaagagcctgggaacttggtttaatgaacacacacattccagagaactgtgactacagtgtttgcccacttttggaagcttgcactctatacctagatgcgtttttccttcttctaactggttccaaccttaacttgcacctaaaccttggaggtcttggacttggaacttttgatgcttgtttaattagtgaagaattggcttatggatgtacaggggttcagactgctattgaaggaaattctttggggcaaatgcctattattattgctggaaatgatcaacaaaagaagaagtatttggggagaatgactgaggagccattgatgtgtgcttattgtgtaacagaacctggagcaggctctgatgtagctggtataaagaccaaagcagaaaagaaaggagatgagtatattattaatggtcagaagatgtggataaccaacggaggaaaagctaattggtattttttattggcacgttctgatccagatcctaaagctcctgctaataaagcctttactggattcattgtggaagcagataccccaggaattcagattgggagaaaggaattaaacatgggccagcgatgttcagatactagaggaattgtcttcgaagatgtgaaagtgcctaaagaaaatgttttaattggtgacggagctggtttcaaagttgcaatgggagcttttgataaaaccagacctgtagtagctgctggtgctgttggattagcacaaagagctttggatgaagctaccaagtatgccctggaaaggaaaactttcggaaagctacttgtagagcaccaagcaatatcatttatgctggctgaaatggcaatgaaagttgaactagctagaatgagttaccagagagcagcttgggaggttgattctggtcgtcgaaatacctattatgcttctattgcaaaggcatttgctggagatattgcaaatcagttagctactgatgctgtgcagatacttggaggcaatggatttaatacagaatatcctgtagaaaaactaatgagggatgccaaaatctatcagatttatgaaggtacttcacaaattcaaagacttattgtagcccgtgaacacattgacaagtacaaaaattaaaaaaattactgtagaaatattgaataactagaacacaagccactgtttcagctccagaaaaaagaaagggctttaacgttttttccagtgaaaacaaatcctcttatattaaatctaagcaactgcttattatagtagtttatacttttgcttaactctgttatgtctcttaagcaggtttggtttttattaaaatgatgtgttttctttagtaccactttacttgaattacattaacctagaaaactacataggttattttgatctcttaagattaatgtagcagaaatttcttggaattttatttttgtaatgacagaaaagtgggcttagaaagtattcaagatgttacaaaatttacatttagaaaatattgtagtatttgaatactgtcaacttgacagtaactttgtagacttaatggtattattaaagttctttttattgcagtttggaaagcatttgtgaaactttctgtttggcacagaaacagtcaaaattttgacattcatattctcctattttacagctacaagaactttcttgaaaatcttatttaattctgagcccatatttcacttaccttatttaaaataaatcaataaagcttgccttaaattatttttatatgactgttggtctctaggtagcctttggtctattgtacacaatctcatttcatatgtttgcattttggcaaagaacttaataaaattgttcagtgctta

SEQ ID NO: 808 - DNA, 2619 bp, Homo sapiens
  source 1..2619: mol_type = unassigned DNA
accgcgccgcaagtccccccaccgttcagcgcaaccgggccctcccagccccgccgccgtccccctcccccgccctggctctctttccgcgctgcggtcagcctcggcgtcccacagagagggccagaggtggaaacgcagaaaaccaaaccaggactatcagagattgcccggagaggggatgcgacccctccccaggtcgcagcgacggcgcacgcaagggtcacggagcatgcgttggctacccggcgccggggaccgctgccaccccgcctagcgcagcgccccgtccttccgcagcccaaccgcctcttcccgccccgccccatcccgcccacgggctccagtgggcgggaccagaggagtcccgcgttcggggagtatgtcaaggccgtgacccgtgtattattgtccgagtggccggaacgggagccaacatggcagcggggttcgggcgatgctgcagggtcctgagaagtatttctcgttttcattggagatcacagcatacaaaagccaatcgacaacgtgaaccaggattaggatttagttttgagttcaccgaacagcagaaagaatttcaagctactgctcgtaaatttgccagagaggaaatcatcccagtggctgcagaatatgataaaactggtgaatatccagtccccctaattagaagagcctgggaacttggtttaatgaacacacacattccagagaactgtggaggtcttggacttggaacttttgatgcttgtttaattagtgaagaattggcttatggatgtacaggggttcagactgctattgaaggaaattctttggggcaaatgcctattattattgctggaaatgatcaacaaaagaagaagtatttggggagaatgactgaggagccattgatgtgtgcttattgtgtaacagaacctggagcaggctctgatgtagctggtataaagaccaaagcagaaaagaaaggagatgagtatattattaatggtcagaagatgtggataaccaacggaggaaaagctaattggtattttttattggcacgttctgatccagatcctaaagctcctgctaataaagcctttactggattcattgtggaagcagataccccaggaattcagattgggagaaaggaattaaacatgggccagcgatgttcagatactagaggaattgtcttcgaagatgtgaaagtgcctaaagaaaatgttttaattggtgacggagctggtttcaaagttgcaatgggagcttttgataaaaccagacctgtagtagctgctggtgctgttggattagcacaaagagctttggatgaagctaccaagtatgccctggaaaggaaaactttcggaaagctacttgtagagcaccaagcaatatcatttatgctggctgaaatggcaatgaaagttgaactagctagaatgagttaccagagagcagcttgggaggttgattctggtcgtcgaaatacctattatgcttctattgcaaaggcatttgctggagatattgcaaatcagttagctactgatgctgtgcagatacttggaggcaatggatttaatacagaatatcctgtagaaaaactaatgagggatgccaaaatctatcagatttatgaaggtacttcacaaattcaaagacttattgtagcccgtgaacacattgacaagtacaaaaattaaaaaaattactgtagaaatattgaataactagaacacaagccactgtttcagctccagaaaaaagaaagggctttaacgttttttccagtgaaaacaaatcctcttatattaaatctaagcaactgcttattatagtagtttatacttttgcttaactctgttatgtctcttaagcaggtttggtttttattaaaatgatgtgttttctttagtaccactttacttgaattacattaacctagaaaactacataggttattttgatctcttaagattaatgtagcagaaatttcttggaattttatttttgtaatgacagaaaagtgggcttagaaagtattcaagatgttacaaaatttacatttagaaaatattgtagtatttgaatactgtcaacttgacagtaactttgtagacttaatggtattattaaagttctttttattgcagtttggaaagcatttgtgaaactttctgtttggcacagaaacagtcaaaattttgacattcatattctcctattttacagctacaagaactttcttgaaaatcttatttaattctgagcccatatttcacttaccttatttaaaataaatcaataaagcttgccttaaattatttttatatgactgttggtctctaggtagcctttggtctattgtacacaatctcatttcatatgtttgcattttggcaaagaacttaataaaattgttcagtgcttattatcatatctttctgtattttttccaggaaatttcattacttcgtgtaatagtgtatatttcttgtatttactatgatgaaaaaaggtcgttttaattttgaattgaataaagttacctgttcattttttattagatattttaaagacttcagaaaatataaatatgaaataatttaagaacccaaa

SEQ ID NO: 809 - DNA, 1332 bp, Homo sapiens
  source 1..1332: mol_type = unassigned DNA
gagccaacatggcagcggggttcgggcgatgctgcaggtgttctttacaggtcctgagaagtatttctcgttttcattggagatcacagcatacaaaagccaatcgacaacgtgaaccaggattaggatttagttttgagttcaccgaacagcagaaagaatttcaagctactgctcgtaaatttgccagagaggaaatcatcccagtggctgcagaatatgataaaactggtgaatatccagtccccctaattagaagagcctgggaacttggtttaatgaacacacacattccagagaactgtggaggtcttggacttggaacttttgatgcttgtttaattagtgaagaattggcttatggatgtacaggggttcagactgctattgaaggaaattctttggggcaaatgcctattattattgctggaaatgatcaacaaaagaagaagtatttggggagaatgactgaggagccattgatgtgtgcttattgtgtaacagaacctggagcaggctctgatgtagctggtataaagaccaaagcagaaaagaaaggagatgagtatattattaatggtcagaagatgtggataaccaacggaggaaaagctaattggtattttttattggcacgttctgatccagatcctaaagctcctgctaataaagcctttactggattcattgtggaagcagataccccaggaattcagattgggagaaaggaattaaacatgggccagcgatgttcagatactagaggaattgtcttcgaagatgtgaaagtgcctaaagaaaatgttttaattggtgacggagctggtttcaaagttgcaatgggagcttttgataaaaccagacctgtagtagctgctggtgctgttggattagcacaaagagctttggatgaagctaccaagtatgccctggaaaggaaaactttcggaaagctacttgtagagcaccaagcaatatcatttatgctggctgaaatggcaatgaaagttgaactagctagaatgagttaccagagagcagcttgggaggttgattctggtcgtcgaaatacctattatgcttctattgcaaaggcatttgctggagatattgcaaatcagttagctactgatgctgtgcagatacttggaggcaatggatttaatacagaatatcctgtagaaaaactaatgagggatgccaaaatctatcagatttatgaaggtacttcacaaattcaaagacttattgtagcccgtgaacacattgacaagtacaaaaattaaaaaaattactgtagaaatattgaataactagaacacaagccactgt

SEQ ID NO: 810 - DNA, 1454 bp, Homo sapiens
  source 1..1454: mol_type = unassigned DNA
attattgtccgagtggccggaacgggagccaacatggcagcggggttcgggcgatgctgcaggagttcaccgaacagcagaaagaatttcaagctactgctcgtaaatttgccagagaggaaatcatcccagtggctgcagaatatgataaaactggtgaatatccagtccccctaattagaagagcctgggaacttggtttaatgaacacacacattccagagaactgtggaggtcttggacttggaacttttgatgcttgtttaattagtgaagaattggcttatggatgtacaggggttcagactgctattgaaggaaattctttggggcaaatgcctattattattgctggaaatgatcaacaaaagaagaagtatttggggagaatgactgaggagccattgatgtgtgcttattgtgtaacagaacctggagcaggctctgatgtagctggtataaagaccaaagcagaaaagaaaggagatgagtatattattaatggtcagaagatgtggataaccaacggaggaaaagctaattggtattttttattggcacgttctgatccagatcctaaagctcctgctaataaagcctttactggattcattgtggaagcagataccccaggaattcagattgggagaaaggaattaaacatgggccagcgatgttcagatactagaggaattgtcttcgaagatgtgaaagtgcctaaagaaaatgttttaattggtgacggagctggtttcaaagttgcaatgggagcttttgataaaaccagacctgtagtagctgctggtgctgttggattagcacaaagagctttggatgaagctaccaagtatgccctggaaaggaaaactttcggaaagctacttgtagagcaccaagcaatatcatttatgctggctgaaatggcaatgaaagttgaactagctagaatgagttaccagagagcagcttgggaggttgattctggtcgtcgaaatacctattatgcttctattgcaaaggcatttgctggagatattgcaaatcagttagctactgatgctgtgcagatacttggaggcaatggatttaatacagaatatcctgtagaaaaactaatgagggatgccaaaatctatcagatttatgaaggtacttcacaaattcaaagacttattgtagcccgtgaacacattgacaagtacaaaaattaaaaaaattactgtagaaatattgaataactagaacacaagccactgtttcagctccagaaaaaagaaagggctttaacgttttttccagtgaaaacaaatcctcttatattaaatctaagcaactgcttattatagtagtttatacttttgcttaactctgttatgtctcttaagcaggtttggtttttattaaaatgatgtgttttctttagtaccactttacttgaattacattaacctaga

SEQ ID NO: 811 - DNA, 1422 bp, Homo sapiens
  source 1..1422: mol_type = unassigned DNA
gtggccggaacgggagccaacatggcagcggggttcgggcgatgctgcaggagttcaccgaacagcagaaagaatttcaagctactgctcgtaaatttgccagagaggaaatcatcccagtggctgcagaatatgataaaactggtgaatatccagtccccctaattagaagagcctgggaacttggtttaatgaacacacacattccagagaactgtggcttattgtgtaacagaacctggagcaggctctgatgtagctggtataaagaccaaagcagaaaagaaaggagatgagtatattattaatggtcagaagatgtggataaccaacggaggaaaagctaattggtattttttattggcacgttctgatccagatcctaaagctcctgctaataaagcctttactggattcattgtggaagcagataccccaggaattcagattgggagaaaggaattaaacatgggccagcgatgttcagatactagaggaattgtcttcgaagatgtgaaagtgcctaaagaaaatgttttaattggtgacggagctggtttcaaagttgcaatgggagcttttgataaaaccagacctgtagtagctgctggtgctgttggattagcacaaagagctttggatgaagctaccaagtatgccctggaaaggaaaactttcggaaagctacttgtagagcaccaagcaatatcatttatgctggctgaaatggcaatgaaagttgaactagctagaatgagttaccagagagcagcttgggaggttgattctggtcgtcgaaatacctattatgcttctattgcaaaggcatttgctggagatattgcaaatcagttagctactgatgctgtgcagatacttggaggcaatggatttaatacagaatatcctgtagaaaaactaatgagggatgccaaaatctatcagatttatgaaggtacttcacaaattcaaagacttattgtagcccgtgaacacattgacaagtacaaaaattaaaaaaattactgtagaaatattgaataactagaacacaagccactgtttcagctccagaaaaaagaaagggctttaacgttttttccagtgaaaacaaatcctcttatattaaatctaagcaactgcttattatagtagtttatacttttgcttaactctgttatgtctcttaagcaggtttggtttttattaaaatgatgtgttttctttagtaccactttacttgaattacattaacctagaaaactacataggttattttgatctcttaagattaatgtagcagaaatttcttggaattttatttttgtaatgacagaaaagtgggcttagaaagtattcaagatgttacaaaatttacatttagaaaatattgtagtatttgaatactgtcaacttgacagt

SEQ ID NO: 812 - DNA, 2543 bp, Homo sapiens
  source 1..2543: mol_type = unassigned DNA
agcagtttcgctgtaaaatcctattgctgacagccaagacgggcgtattccctcgcgaccagcctgtggcgtggttggggctccggaagggcgcgcgcgagcgcttttttgggaggacaccacaggtggacgcctcagctgatcgtcctccctcccggggaccctgccccgagtcgccgagtagccgcagagtcgcctccgtcgccccgccgcccctgtgtttcggacatggccgcacgccttctccgagggtccctacgcgtcctgggcggccaccgtgcgccgcgccagctgcccgccgcgcgatgttctcattccggaggggaagaacgtctagaaactccttctgctaaaaaattaacagatataggaattcgaagaatcttttctccagagcatgacattttccggaaaagtgtaaggaagtttttccaagaagaagtgattcctcatcactcagaatgggagaaagctggagaagtaagtagggaggtttgggaaaaagctggaaaacaaggactgcttggtgtcaatattgcagagcatcttggtggaattggaggggatctgtactccgcagctattgtctgggaggagcaagcttattcaaattgttcaggcccaggttttagtattcattcaggtattgtcatgtcctatattacaaaccatggctcagaagaacagattaagcactttattccccagatgactgcaggcaaatgtattggtgcaatagcaatgacagagcctggagctggaagtgacttacagggaataaaaacaaatgctaaaaaggatggaagtgactggattctcaatggaagcaaggtgttcatcagtaatgggtcattaagtgatgttgtgattgtagttgcggtcacaaatcatgaagctccctcccctgcccatggtattagcctttttctggtggaaaatggaatgaaaggatttatcaagggacgaaagctacataaaatgggattaaaagcccaggataccgcagaactattctttgaagatatacggttgccagctagtgccctacttggagaagagaataaaggcttctattacatcatgaaagagcttccacaggaaaggctgttaattgctgatgtggcaatttcagctagtgaattcatgtttgaagaaaccaggaactatgttaaacaaagaaaagcttttggcaaaacagttgctcacctacagacagtgcaacataaattagcagaattaaaaacacatatatgtgtaacccgagcatttgtggacaactgtctccagctgcatgaagcgaaacgtttggactccgccactgcttgcatggcgaaatattgggcatctgagttacaaaatagtgtagcttacgactgtgtacagctccatggaggttggggatacatgtgggagtacccaattgcaaaagcttatgtggatgccagagttcagccaatctatggtggtacaaatgaaataatgaaggagctgattgcaagagagattgtctttgacaagtagacatctgcccacatcctggagtcctattacagctaatctcgttttaaatctgctcaagataaaatgtaacttggaaagcgaggaaacactaaacatgtttttacctgctctctctatagagaaggaaataaaatataaatataagattaacacagtggaaggacaaatctttgaagccaaaattctagttttccaatataaggtttaacttacagttttttatgtagccaaaggtaaacggttttctgaatcttgcctaggtgtttcatttatctctaaaattctaaaaagcataaatcattcaaatcttcaaaccaaggcagaaataattttatgtcgctatagtataaaaacattaataagatagcacattgacttttaaagggaaaagtaaatataacttagcatgtaaactcatttcggctaccatttgctccaaattccctagaacagtggtttttaccactgtactccaaccccgtttttaagcaatggaactctttcttcaaacaaaagcttatgcagaacatctctgtgaaacgctgctgagtgagaactgctttcattgaagctggaagccatcataccttactgccttgaaacccctaggactcagctaagtatttgcctaaccctgaccagggaatgccttggttctgtcaattgctgacatctgagaacacagaataatccatcatttttaatttcaagatattggtacattttataggtatcaaagcaatggcttttcttttgcaacagttaatgtatttattaacttaataattactttatgtcttctataaaccaggctgttaatacaatgatgacaaacaaaactggcaagatcactaaaaaataagtgaataaacaaataagtagtaaaataaggtaagaagtaaatatgtaaaagagataatttcaagcataagtgcaatgtaaataataaagtaagcatttaaaattcaaaagtgaggaaatgacatttgatttaagacttaaaagtaattacaaaaaataaa

SEQ ID NO: 813 - DNA, 5859 bp, Homo sapiens
  source 1..5859: mol_type = unassigned DNA
ggcctgcggcgaggatggagggcctggcagtgcggttgctgcgcggcagcaggctgctaagaagaaatttcctgacttgtttgtcttcttggaagattcctcctcatgtctcaaaatcttcccagtcagaagctctactcaatataacaaataatggaatacactttgctcccctgcaaacatttacagatgaggaaatgatgataaagagttcagttaaaaaatttgctcaggaacaaattgcacctttggtttcaaccatggatgaaaattcgaaaatggagaaatcagtaatacaaggattatttcaacaagggttgatgggtattgaagttgacccagaatatggaggcacaggagcttcatttttatccactgtgctcgtgatagaggaattagccaaagttgatgcatctgtggctgtcttttgtgagatccagaacacattaattaacacactgattagaaaacatggaacagaagaacaaaaggccacctatttgcctcagctcactacagaaaaagtaggaagtttctgcctttcagaggctggagcaggtagtgactcatttgctttgaagaccagagctgataaagagggagattattatgtcctcaatggatcaaagatgtggatcagcagtgctgagcacgcagggctctttctggtgatggcaaatgtagaccctaccattggatataagggaattacctccttcttagtagatcgtgatactccgggccttcatatagggaaacctgaaaacaaattggggctcagagcttcttccacctgcccgttaacattcgaaaatgtcaaggttccagaagccaatatcttgggacaaattggacatggctataagtatgccatagggagtctcaatgaaggtagaataggaattgctgcacagatgctgggactggcgcaaggatgttttgactacactattccatatattaaagaaaggatacaatttggcaaaagactatttgattttcagggcctccaacaccaagtggctcacgtggccacccagctggaagctgcaagattactaacatacaatgctgctaggcttttagaagctggaaagccattcataaaagaagcgtcaatggccaaatactatgcatcagagattgcaggacaaacaacgagtaaatgtatcgagtggatggggggagtaggctacaccaaagattaccctgtggagaaatacttccgagatgcaaagattggtacgatatatgaaggagcttccaacatccagttgaacaccattgcaaagcatatcgatgcagaatactgacgtctataggagtgggacccctccctggtgtcactgctgtaaaattttaaacggttgtgtcttgttgggagtaagtgccttgcgtgggaataaacttccacagcattcgaatattttaatgaagcccttagtcagggtcctggtgttggcctttttggttttctcttttcaggctgtttaacttaggcacaggagatccacttttaaacttgggaaataagcacctgtatttttttccaaaactgtttttaaagctgtatacgcatacatatatatatttttactctgtcttactctgtcacccaggctagagtgcagtggcgcgatctcagctcactgcagccttgacctcctgggttccagtgattctcatgcctcatcctcccaagtagctggaactacaggtgtgcaccaccatgcctggttcatttttgtgtttttagtagagatggggttttaccatattgcccaggctggtcttctggcttctggatatcgcccaccttggcctcccaaagtgctgggattacagggatgagccaccgtgcctggctgggtatttatattatcattctagtttcagagtatacagaagtttcatcccatcatttggaaaaataaaggcatctgaagtacaatattacttatagaaatagtttatattcctattaaatcttaatcttgtggcatcagggaaatatttgttacatagtaggcaatttttatccagtactttatagattcaactctaagttgcaagcgaagtcaaaactgatgaaaatttatttagaaaaatctaaaaattctggttttaaatatgagaatcagtggaaaataagggtataattttgtaggtcatatgattgaagaaaatattattttaacaatgtaaagcaatatgatttgttactataattaacctgtataaaagatacattttatggtggtttcagtaggtcattttaaaaaccaatgtgcattagttttcaagtataaggtttaagtaatttggtttaataatcagaaaatattcaatacagtgttggatattctgtcatgcactatttttcagttgacaatttctgtattttaattgaatactgtttcttcagtcatggttattgcactttatcctgaataataattcagaaattgggttttggttcagtgattctcaagaaaaagatctcttgcccattaagaagtgtatcaaaatctcataaggaatgagggagagaagggggctgtagagtttgaaaaagcatattcaatattaaaatagttttatatttgggaaggcaaaaatgaatctattgttttgcaatataggttataaacaggcaaaatgcaataaaatatatatctggttgtattagtctgttttcacgctgctgataaagacatacctgagaccaggaagaaaaagaggtttaattggacttacagttccacatgactggggaggcctcagaatcatggtgggaggcaaaaagcacttcttacatggcggcagcaagagaaaatgagaaagaagcaaaagtggaaacccctaataaacctatcagatcttgtgagacttactatcacgagaatagcacaggaaagactggcccccatgattcaattacctcccccgggtccctcccacaacacatgggaattctgagagataccatttaagttgagatttcagtggggacacagccaaaccatatcattctacccctggcacctccaaatctcatgtcctcacatttcaaaaccaatcatgccttcccaacagtcccccaaagtcttaactcatttcagcattaacccaaaagtccgcagtccaaagtttcatctgagacaaggcaagtcccttccacttatgaacctgtaaaatcaaaagtaaactagttacttcctagatacaatgggggtacaggtattgggtaaatacagccattccaaatgggagaaattggccaacacaaaagggtaacagggcccatgcaagtccaaaattcagcagggcagtcaaattttaaacctccaaaatgatcacctttgactccacgtctcacaatcatctctctcaagttcgaagttccacaaatctctaaggcaagggaaagatgctgccagtctctttgctaaaacacagcaagagtcacctttactccagttcccaaaaagtttttcatctccatctgagaccacctcagcctgaattttattgtcaatattgctatcagcattttgggcaaagccattcagcaagtatctaggaagttccaaactttcccacattttcctgtcttcttctgagcccttcaaactgttccaacctctgcctgttacccagttccaaacttgctttcatatttttggctatcttttcagcaatgccccactctactgttagcagtttactgtattagtctgttttcacactgctgataaagacattcctcaagattgtgaagaaaaagaggtttaattggacttacagttccacatggccggggaggcctcagaatcatggcgggaggtgaaaagcacttcgtacatggtggtggcaagagaaaatgaagaagaagcaaaagtggaaacccctgataaacccatcagatctcatgagacttactatcatgagaatagcacaggaaagactggcccccctgattcgatgacctccccctgggtccctcccacaacatgtgggaattccagaagataaattcaagttgcaatttcagtggggacatagccaaaccatatcactggtgatgccacttcttcagtattagggattctcagtcagaagagaccccctgtgtggcctgagtcccctcaggaggaaggtggacaacagagaaatgagagttttgatattttctgaaagaggaacatgtgttagagatgaagaatcttccaaggctcatgcagttgcttagaataatcattactgttatatgagaaacattttagtaatttaataaaaggataatgtttatttaaaaaacctgacttttccagagtaattttgttttgcacattcatgtttattgaagtggactaatttctataatgcaaatcagagttaaatattaaaaattgtgtaaatacaattgacataggaattacattaaaatattaggaagaaacaaggacaaatttagaccttgaatccgaagagataaagcttacttgactttcaaatggagagatgatgaaaacccactcattcactctttcagaacaaaaagacagtcatctgataagagtatgacatggatgaaatgccctacaggggccttggacatctttaatttctgcgattatgtgaaagaggtggactttacagataatggagcagaagccaacattagtaaaaggaatcccaacttcttcccatagaattagaaacatgtgaaagtacaataaacttcttgttcaaattaccagcatcagagagcttcccatttgcatctagaccttgaatttatatttattgatcaagttctaatttgtatgtatattttgtgcatattcaccaataacagttaaaattaattatgtgttatagttaatatatgcacctaccttcttccgttagtgcatcagtaaatgtgttattttgtcatttttccaaagagagtgttgtaggttttccctgtagttcttcctttatagcttttcttctgataaccatgacttcaggagctttaaaactatctatcttgcatttgtgtctggcggagaactagccatcagcctcctgaagcctgccatcattgttaatttgaggactgggctgtcttggggctcagaagataaagaactatttgagcagatgtgtgtgggtggcactggattccacccaactgccaagttagtattgttagagatttcattttacaacacaaaaataagcctgtgtcaaagattttaaaatcatggaaagttaaaatctagaaagaccttagagaaccagccaaccaactctctcattttaaaagtgaaggattcatagcacagattacttgcctaagatcatccaggaacgaagacaagaatccaaatgtacttggggacaagaattagtccccaaattcagtgttcttcctagtattaaacattgcccctttcgacaaattttggatttcattcttgttatatttcagtactcttgctgatttattttaggtttaactggtaaagaatgaacatttcagaagtgttaggattagtcagtgtcatcgcttatgtatatgaatcacttgccaaagacactggctctcctcagctgtaaccagcatgtcaaatgtgaagattattgtgtgggatcctttggtttcattgttatgatgtattttataaatgtactagttatatccttgtttatgtatttttgctgatctttcataaagcagaatggtatgtatcggattgttttaatgttatatattggattgtattcgatgttacaaaaccaatattctatggagaatgaaaaaaataaaggactaaattaactggagatttttggtactcttataaa

SEQ ID NO: 814 - DNA, 1599 bp, Homo sapiens
  source 1..1599: mol_type = unassigned DNA
aggggctggctagagacccagaggcgcagagcggagaggcctgcggcgaggatggagggcctggcagtgcggttgctgcgcggcagcagctaagaagaaatttcctgacttgtttgtcttcttggaagattcctcctcatgtctcaaaatcttcccagtcagaagctctactcaatataacaaataatggaatacactttgctcccctgcaaacatttacagatgaggaaatgatgataaagagttcagttgatgggtattgaagttgacccagaatatggaggcacaggagcttcatttttatccactgtgctcgtgatagaggaattagccaaagttgatgcatctgtggctgtcttttgtgagatccagaacacattaattaacacactgattagaaaacatggaacagaagaacaaaaggccacctatttgcctcagctcactacagaaaaagtaggaagtttctgcctttcagaggctggagcaggtagtgactcatttgctttgaagaccagagctgataaagagggagattattatgtcctcaatggatcaaagatgtggatcagcagtgctgagcacgcagggctctttctggtgatggcaaatgtagaccctaccattggatataagggaattacctccttcttagtagatcgtgatactccgggccttcatatagggaaacctgaaaacaaattggggctcagagcttcttccacctgcccgttaacattcgaaaatgtcaaggttccagaagccaatatcttgggacaaattggacatggctataagtatgccatagggagtctcaatgaaggtagaataggaattgctgcacagatgctgggactggcgcaaggatgttttgactacactattccatatattaaagaaaggatacaatttggcaaaagactatttgattttcagggcctccaacaccaagtggctcacgtggccacccagctggaagctgcaagattactaacatacaatgctgctaggcttttagaagctggaaagccattcataaaagaagcgtcaatggccaaatactatgcatcagagattgcaggacaaacaacgagtaaatgtatcgagtggatggggggagtaggctacaccaaagattaccctgtggagaaatacttccgagatgcaaagattggtacgatatatgaaggagcttccaacatccagttgaacaccattgcaaagcatatcgatgcagaatactgacgtctataggagtgggacccctccctggtgtcactgctgtaaaattttaaacggttgtgtcttgttgggagtaagtgccttgcgtgggaataaacttccacagcattcgaatattttaatgaagcccttagtcagggtcctggtgttggcctttttggttttctcttttcaggctgtttaacttaggcacaggagatccacttttaaacttgggaaataagcacctgtatttttttccaaaactgtttttaaagctgtatacgcatacatatatatatttttactctgtcttactctgtcacccaggctagagtgcagtggcgcgatctcagctcactgcagccttgacctcct

SEQ ID NO: 815 - DNA, 2287 bp, Homo sapiens
  source 1..2287: mol_type = unassigned DNA
tacagctcccagcatgccccggggcccgcaaccgtccgccgcccggtgcactgtggacgatgagtcagggttaggggcgccaggacgtgggcgtgcaggacgccagagctgggtcagagctcgagccagcggcgcccggagagattcggagatgcaggcggctcggatggccgcgagcttggggcggcagctgctgaggctcgggggcggaagctcgcggctcacggcgctcctggggcagccccggcccggccctgcccggcggccctatgccgggggtgccgctcagctggctctggacaagtcagattcccacccctctgacgctctgaccaggaaaaaaccggccaaggcggaatctaagtcctttgctgtgggaatgttcaaaggccagctcaccacagatcaggtgttcccatacccgtccgtgctcaacgaagagcagacacagtttcttaaagagctggtggagcctgtgtcccgtttcttcgaggaagtgaacgatcccgccaagaatgacgctctggagatggtggaggagaccacttggcagggcctcaaggagctgggggcctttggtctgcaagtgcccagtgagctgggtggtgtgggcctttgcaacacccagtacgcccgtttggtggagatcgtgggcatgcatgaccttggcgtgggcattaccctgggggcccatcagagcatcggtttcaaaggcatcctgctctttggcacaaaggcccagaaagaaaaatacctccccaagctggcatctggggagactgtggccgctttctgtctaaccgagccctcaagcgggtcagatgcagcctccatccgaacctctgctgtgcccagcccctgtggaaaatactataccctcaatggaagcaagctttggatcagtaatgggggcctagcagacatcttcacggtctttgccaagacaccagttacagatccagccacaggagccgtgaaggagaagatcacagcttttgtggtggagaggggcttcgggggcattacccatgggccccctgagaagaagatgggcatcaaggcttcaaacacagcagaggtgttctttgatggagtacgggtgccatcggagaacgtgctgggtgaggttgggagtggcttcaaggttgccatgcacatcctcaacaatggaaggtttggcatggctgcggccctggcaggtaccatgagaggcatcattgctaaggcggtagatcatgccactaatcgtacccagtttggggagaaaattcacaactttgggctgatccaggagaagctggcacggatggttatgctgcagtatgtaactgagtccatggcttacatggtgagtgctaacatggaccagggagccacggacttccagatagaggccgccatcagcaaaatctttggctcggaggcagcctggaaggtgacagatgaatgcatccaaatcatggggggtatgggcttcatgaaggaacctggagtagagcgtgtgctccgagatcttcgcatcttccggatctttgaggggacaaatgacattcttcggctgtttgtggctctgcagggctgtatggacaaaggaaaggagctctctgggcttggcagtgctctaaagaatccctttgggaatgctggcctcctgctaggagaggcaggcaaacagctgaggcggcgggcagggctgggcagcggcctgagtctcagcggacttgtccacccggagttgagtcggagtggcgagctggcagtacgggctctggagcagtttgccactgtggtggaggccaagctgataaaacacaagaaggggattgtcaatgaacagtttctgctgcagcggctggcagacggggccatcgacctctatgccatggtggtggttctctcgagggcctcaagatccctgagtgagggccaccccacggcccagcatgagaaaatgctctgtgacacctggtgtatcgaggctgcagctcggatccgagagggcatggccgccctgcagtctgacccctggcagcaagagctctaccgcaacttcaaaagcatctccaaggccttggtggagcggggtggtgtggtcaccagcaacccacttggcttctgaatactcccggccagggcctgtcccagttatgtgccttccctcaagccaaagccgaagcccctttccttaaggccctggtttgtcccgaaggggcctagtgttcccagcactgtgcctgctctcaagagcacttactgcctcgcaaataataaaaatttctagccagtc

SEQ ID NO: 816 - DNA, 2221 bp, Homo sapiens
  source 1..2221: mol_type = unassigned DNA
tacagctcccagcatgccccggggcccgcaaccgtccgccgcccggtgcactgtggacgatgagtcagggttaggggcgccaggacgtgggcgtgcaggacgccagagctgggtcagagctcgagccagcggcgcccggagagattcggagatgcaggcggctcggatggccgcgagcttggggcggcagctgctgaggctcgggggcggaagctcgcggctcacggcgctcctggggcagccccggcccggccctgcccggcggccctatgccgggggtgccgctcaggaatctaagtcctttgctgtgggaatgttcaaaggccagctcaccacagatcaggtgttcccatacccgtccgtgctcaacgaagagcagacacagtttcttaaagagctggtggagcctgtgtcccgtttcttcgaggaagtgaacgatcccgccaagaatgacgctctggagatggtggaggagaccacttggcagggcctcaaggagctgggggcctttggtctgcaagtgcccagtgagctgggtggtgtgggcctttgcaacacccagtacgcccgtttggtggagatcgtgggcatgcatgaccttggcgtgggcattaccctgggggcccatcagagcatcggtttcaaaggcatcctgctctttggcacaaaggcccagaaagaaaaatacctccccaagctggcatctggggagactgtggccgctttctgtctaaccgagccctcaagcgggtcagatgcagcctccatccgaacctctgctgtgcccagcccctgtggaaaatactataccctcaatggaagcaagctttggatcagtaatgggggcctagcagacatcttcacggtctttgccaagacaccagttacagatccagccacaggagccgtgaaggagaagatcacagcttttgtggtggagaggggcttcgggggcattacccatgggccccctgagaagaagatgggcatcaaggcttcaaacacagcagaggtgttctttgatggagtacgggtgccatcggagaacgtgctgggtgaggttgggagtggcttcaaggttgccatgcacatcctcaacaatggaaggtttggcatggctgcggccctggcaggtaccatgagaggcatcattgctaaggcggtagatcatgccactaatcgtacccagtttggggagaaaattcacaactttgggctgatccaggagaagctggcacggatggttatgctgcagtatgtaactgagtccatggcttacatggtgagtgctaacatggaccagggagccacggacttccagatagaggccgccatcagcaaaatctttggctcggaggcagcctggaaggtgacagatgaatgcatccaaatcatggggggtatgggcttcatgaaggaacctggagtagagcgtgtgctccgagatcttcgcatcttccggatctttgaggggacaaatgacattcttcggctgtttgtggctctgcagggctgtatggacaaaggaaaggagctctctgggcttggcagtgctctaaagaatccctttgggaatgctggcctcctgctaggagaggcaggcaaacagctgaggcggcgggcagggctgggcagcggcctgagtctcagcggacttgtccacccggagttgagtcggagtggcgagctggcagtacgggctctggagcagtttgccactgtggtggaggccaagctgataaaacacaagaaggggattgtcaatgaacagtttctgctgcagcggctggcagacggggccatcgacctctatgccatggtggtggttctctcgagggcctcaagatccctgagtgagggccaccccacggcccagcatgagaaaatgctctgtgacacctggtgtatcgaggctgcagctcggatccgagagggcatggccgccctgcagtctgacccctggcagcaagagctctaccgcaacttcaaaagcatctccaaggccttggtggagcggggtggtgtggtcaccagcaacccacttggcttctgaatactcccggccagggcctgtcccagttatgtgccttccctcaagccaaagccgaagcccctttccttaaggccctggtttgtcccgaaggggcctagtgttcccagcactgtgcctgctctcaagagcacttactgcctcgcaaataataaaaatttctagccagtc

SEQ ID NO: 817 - DNA, 2312 bp, Homo sapiens
  source 1..2312: mol_type = unassigned DNA
gcagggccgggctccagggaactacagctcccagcatgccccggggcccgcaaccgtccgccgcccggtgcactgtggacgatgagtcagggttaggggcgccaggacgtgggcgtgcaggacgccagagctgggtcagagctcgagccagcggcgcccggagagattcggagatgcaggcggctcggatggccgcgagcttggggcggcagctgctgaggctcgggggcggaagctcgcggctcacggcgctcctggggcagccccggcccggccctgcccggcggccctatgccgggggtgccgctcagctggctctggacaagtcagattcccacccctctgacgctctgaccaggaaaaaaccggccaaggcggaatctaagtcctttgctgtgggaatgttcaaaggccagctcaccacagatcaggtgttcccatacccgtccgtgctcaacgaagagcagacacagtttcttaaagagctggtggagcctgtgtcccgtttcttcgaggaagtgaacgatcccgccaagaatgacgctctggagatggtggaggagaccacttggcagggcctcaaggagctgggggcctttggtctgcaagtgcccagtgagctgggtggtgtgggcctttgcaacacccagtacgcccgtttggtggagatcgtgggcatgcatgaccttggcgtgggcattaccctgggggcccatcagagcatcggtttcaaaggcatcctgctctttggcacaaaggcccagaaagaaaaatacctccccaagctggcatctggggagactgtggccgctttctgtctaaccgagccctcaagcgggtcagatgcagcctccatccgaacctctgctgtgcccagcccctgtggaaaatactataccctcaatggaagcaagctttggatcagtaatgggggcctagcagacatcttcacggtctttgccaagacaccagttacagatccagccacaggagccgtgaaggagaagatcacagcttttgtggtggagaggggcttcgggggcattacccatgggccccctgagaagaagatgggcatcaaggcttcaaacacagcagaggtgttctttgatggagtacgggtgccatcggagaacgtgctgggtgaggttgggagtggcttcaaggttgccatgcacatcctcaacaatggaaggtttggcatggctgcggccctggcaggtaccatgagaggcatcattgctaaggcggtagatcatgccactaatcgtacccagtttggggagaaaattcacaactttgggctgatccaggagaagctggcacggatggttatgctgcagtatgtaactgagtccatggcttacatggtgagtgctaacatggaccagggagccacggacttccagatagaggccgccatcagcaaaatctttggctcggaggcagcctggaaggtgacagatgaatgcatccaaatcatggggggtatgggcttcatgaaggaacctggagtagagcgtgtgctccgagatcttcgcatcttccggatctttgaggggacaaatgacattcttcggctgtttgtggctctgcagggctgtatggacaaaggaaaggagctctctgggcttggcagtgctctaaagaatccctttgggaatgctggcctcctgctaggagaggcaggcaaacagctgaggcggcgggcagggctgggcagcggcctgagtctcagcggacttgtccacccggagttgagtcggagtggcgagctggcagtacgggctctggagcagtttgccactgtggtggaggccaagctgataaaacacaagaaggggattgtcaatgaacagtttctgctgcagcggctggcagacggggccatcgacctctatgccatggtggtggttctctcgagggcctcaagatccctgagtgagggccaccccacggcccagcatgagaaaatgctctgtgacacctggtgtatcgaggctgcagctcggatccgagagggcatggccgccctgcagtctgacccctggcagcaagagctctaccgcaacttcaaaagcatctccaaggccttggtggagcggggtggtgtggtcaccagcaacccacttggcttctgaatactcccggccagggcctgtcccagttatgtgccttccctcaagccaaagccgaagcccctttccttaaggccctggtttgtcccgaaggggcctagtgttcccagcactgtgcctgctctcaagagcacttactgcctcgcaaataataaaaatttctagccagtcatg

SEQ ID NO: 818 - DNA, 2204 bp, Homo sapiens
  source 1..2204: mol_type = unassigned DNA
acagctcccagcatgccccggggcccgcaaccgtccgccgcccggtgcactgtggacgatgagtcagggttaggggcgccaggacgtgggcgtgcaggacgccagagctgggtcagagctcgagccagcggcgcccggagagattcggagatgcaggcggctcggatggccgcgagcttggggcggcagctgctgaggctcgggggcggaagctcgcggctcacggcgctcctggggcagccccggcccggccctgcccggcggccctatgccgggggtgccgctcagctggctctggacaagtcagattcccacccctctgacgctctgaccaggaaaaaaccggccaaggcggaatctaagtcctttgctgtgggaatgttcaaaggccagctcaccacagatcaggtgttcccatacccgtccgtgctcaacgaagagcagacacagtttcttaaagagctggtggagcctgtgtcccgtttcttcgaggaagtgaacgatcccgccaagaatgacgctctggagatggtggaggagaccacttggcagggcctcaaggagctgggggcctttggtctgcaagtgcccagtgagctgggtggtgtgggcctttgcaacacccagtacgcccgtttggtggagatcgtgggcatgcatgaccttggcgtgggcattaccctgggggcccatcagagcatcggtttcaaaggcatcctgctctttggcacaaaggcccagaaagaaaaatacctccccaagctggcatctggggagactgtggccgctttctgtctaaccgagccctcaagcgggtcagatgcagcctccatccgaacctctgctgtgcccagcccctgtggaaaatactataccctcaatggaagcaagctttggatcagtaatgggggcctagcagacatcttcacggtctttgccaagacaccagttacagatccagccacaggagccgtgaaggagaagatcacagcttttgtggtggagaggggcttcgggggcattacccatgggccccctgagaagaagatgggcatcaaggcttcaaacacagcagaggtgttctttgatggagtacgggtgccatcggagaacgtgctgggtgaggttgggagtggcttcaaggttgccatgcacatcctcaacaatggaaggtttggcatggctgcggccctggcaggtaccatgagaggcatcattgctaaggcggtagatcatgccactaatcgtacccagtttggggagaaaattcacaactttgggctgatccaggagaagctggcacggatggttatgctgcagtatgtaactgagtccatggcttacatggtgagtgctaacatggaccagggagccacggacttccagatagaggccgccatcagcaaaatctttggctcggaggcagcctggaaggtgacagatgaatgcatccaaatcatggggggtatgggcttcatgaaggaacctggagtagagcgtgtgctccgagatcttcgcatcttccggatctttgaggggacaaatgacattcttcggctgtttgtggctctgcagggctgtatggacaaaggaaaggagctctctgggcttggcagtgctctaaagaatccctttgggaatgctggcctcctgctaggagaggcaggcaaacagctgaggcggcgggcagggctgggcagcggcctgagtctcagcggacttgtccacccggagttgagtcggagtggcgagctggcagtacgggctctggagcagtttgccactgtggtggaggccaagctgataaaacacaagaaggggattgtcaatgaacagtttctgctgcagcggctggcagacggggccatcgacctctatgccatggtggtggttctctcgagggcctcaagatccctgagtgagggccaccccacggcccagcatgagaaaatgctctgtgacacctggtgtatcgaggctgcagctcggatccgagagggcatggccgccctgcagtctgacccctggcagcaagagctctaccgcaacttcaaaagcatctccaaggccttggtggagcggggtggtgtggtcaccagcaacccacttggcttctgaatactcccggccagggcctgtcccagttatgtgcctgctctcaagagcacttactgcctcgcaaataataaaaatttctagccagt

SEQ ID NO: 819 - DNA, 2226 bp, Homo sapiens
  source 1..2226: mol_type = unassigned DNA
gtcactatacagagacagtccatgttggggggcctggccgcggcggcgggaacccggataatgggaaaggagatagaagcagaagcacagaggcccctgaggcaaacatggagacctggccagccaccagcgatgacagcaaagacgatgagctcgcggctcacggcgctcctggggcagccccggcccggccctgcccggcggccctatgccgggggtgccgctcagctggctctggacaagtcagattcccacccctctgacgctctgaccaggaaaaaaccggccaaggcggaatctaagtcctttgctgtgggaatgttcaaaggccagctcaccacagatcaggtgttcccatacccgtccgtgctcaacgaagagcagacacagtttcttaaagagctggtggagcctgtgtcccgtttcttcgaggaagtgaacgatcccgccaagaatgacgctctggagatggtggaggagaccacttggcagggcctcaaggagctgggggcctttggtctgcaagtgcccagtgagctgggtggtgtgggcctttgcaacacccagtacgcccgtttggtggagatcgtgggcatgcatgaccttggcgtgggcattaccctgggggcccatcagagcatcggtttcaaaggcatcctgctctttggcacaaaggcccagaaagaaaaatacctccccaagctggcatctggggagactgtggccgctttctgtctaaccgagccctcaagcgggtcagatgcagcctccatccgaacctctgctgtgcccagcccctgtggaaaatactataccctcaatggaagcaagctttggatcagtaatgggggcctagcagacatcttcacggtctttgccaagacaccagttacagatccagccacaggagccgtgaaggagaagatcacagcttttgtggtggagaggggcttcgggggcattacccatgggccccctgagaagaagatgggcatcaaggcttcaaacacagcagaggtgttctttgatggagtacgggtgccatcggagaacgtgctgggtgaggttgggagtggcttcaaggttgccatgcacatcctcaacaatggaaggtttggcatggctgcggccctggcaggtaccatgagaggcatcattgctaaggcggtagatcatgccactaatcgtacccagtttggggagaaaattcacaactttgggctgatccaggagaagctggcacggatggttatgctgcagtatgtaactgagtccatggcttacatggtgagtgctaacatggaccagggagccacggacttccagatagaggccgccatcagcaaaatctttggctcggaggcagcctggaaggtgacagatgaatgcatccaaatcatggggggtatgggcttcatgaaggaacctggagtagagcgtgtgctccgagatcttcgcatcttccggatctttgaggggacaaatgacattcttcggctgtttgtggctctgcagggctgtatggacaaaggaaaggagctctctgggcttggcagtgctctaaagaatccctttgggaatgctggcctcctgctaggagaggcaggcaaacagctgaggcggcgggcagggctgggcagcggcctgagtctcagcggacttgtccacccggagttgagtcggagtggcgagctggcagtacgggctctggagcagtttgccactgtggtggaggccaagctgataaaacacaagaaggggattgtcaatgaacagtttctgctgcagcggctggcagacggggccatcgacctctatgccatggtggtggttctctcgagggcctcaagatccctgagtgagggccaccccacggcccagcatgagaaaatgctctgtgacacctggtgtatcgaggctgcagctcggatccgagagggcatggccgccctgcagtctgacccctggcagcaagagctctaccgcaacttcaaaagcatctccaaggccttggtggagcggggtggtgtggtcaccagcaacccacttggcttctgaatactcccggccagggcctgtcccagttatgtgccttccctcaagccaaagccgaagcccctttccttaaggccctggtttgtcccgaaggggcctagtgttcccagcactgtgcctgctctcaagagcacttactgcctcgcaaataataaaaatttctagccagtc

SEQ ID NO: 820 - DNA, 7506 bp, Homo sapiens
  source 1..7506: mol_type = unassigned DNA
cgaggatccgctcgggagcctcccctggccaggagcaggggattagtctgccccgcgaccggccccagccacgacgcggacatcgccccctctgtctgggccgctgtcactcacgcgccaaagggccacggagaaagaaggggcgggccggggcgggccgggcgagcggaggcggggacttgcgccgtcctgaggctgcctcctagggtccggccggcgctggagctgcggatttagattgtcactgccacctcggtcggtgcttacttcgctgccagctggtcgtcgccatgaacccggacctgcgcagggagcgggattccgccagcttcaacccggagctgcttacacacatcctggacggcagccccgagaaaacccggcgccgccgagagatcgagaacatgatcctgaacgacccagacttccagcatgaggacttgaacttcctcactcgcagccagcgttatgaggtggctgtcaggaaaagtgccatcatggtgaagaagatgagggagtttggcatcgctgaccctgatgaaattatgtggtttaaaaattttgtgcaccgagggcggcctgagcctctggatcttcacttgggcatgttcctgcccaccttgcttcaccaggcaactgcggagcagcaggagcgcttcttcatgcccgcctggaacttggagatcattggcacttatgcccagacagagatgggtcatggaactcaccttcgaggcttggaaaccacagccacgtatgaccctgaaacccaggagttcattctcaacagtcctactgtgacctccattaaatggtggcctggtgggcttggaaagacttcaaatcatgcaatagttcttgcccagctcatcactaaggggaaatgctatggattacatgcctttatcgtacctattcgtgaaatcgggacccataagcctttgccaggaattaccgttggtgacatcggccccaaatttggttatgatgagatagacaatggctacctcaaaatggacaaccatcgtattcccagagaaaacatgctgatgaagtatgcccaggtgaagcctgatggcacatacgtgaaaccgctgagtaacaagctgacttacgggaccatggtgtttgtcaggtccttccttgtgggagaagctgctcgggctctgtctaaggcgtgcaccattgccatccgatacagcgctgtgaggcaccagtctgaaatcaagccaggtgaaccagaaccacagattttggattttcaaacccagcagtataaactctttccactcctggccactgcctatgccttccagtttgtgggcgcatacatgaaggagacctatcaccggattaacgaaggcattggtcaaggggacctgagtgaactgcctgagcttcatgccctcaccgctggactgaaggctttcacctcctggactgcaaacactggcattgaagcatgtcggatggcttgtggtgggcatggctattctcattgcagtggtcttccaaatatttatgtcaatttcaccccaagctgtacctttgagggagaaaacactgtcatgatgctccagacggctaggttcctgatgaaaagttatgatcaggtgcactcaggaaagttggtgtgtggcatggtgtcctatttgaacgacctgcccagtcagcgcatccagccacagcaggtagcagtctggccaaccatggtggatatcaacagccccgaaagcctaaccgaagcatataaactccgtgcagccagattagtagaaattgctgcaaaaaaccttcaaaaagaagtgattcacagaaaaagcaaggaggtagcttggaacctaacttctgttgaccttgttcgagcaagtgaggcacattgccactatgtggtagttaagctcttttcagaaaaactcctcaaaattcaagataaagccattcaagctgtcttaaggagtttatgtctgctgtattctctgtatggaatcagtcagaacgcgggggatttccttcaggggagcatcatgacagagcctcagattacacaagtaaaccagcgtgtaaaggagttactcactctgattcgctcagatgctgttgctttggttgatgcatttgattttcaggatgtgacacttggctctgtgcttggccgctatgatgggaatgtgtatgaaaacttgtttgagtgggctaagaactccccactgaacaaagcagaggtccacgaatcttacaagcacctgaagtcactgcagtccaagctctgaagtgtcacaaggacaagtttaatctgcttcagaaagcgcctgtgtgcaactcaaattttgtggaatctttttcgaattcaaatagctatagagcaaatgataaattgacccctttttataaatggagggaaaaaatgaacagatttcagagattaaatgaaaaaaagcagatgttttaagtgcaattaacactgaaagagacctgttaaaccattcagaaaaagcttaagaaatgcgatatgacttccttttgtaatgctgctgatcccagtagactatgacttttgataattagcagaatttaactactgagtagttgattattttcacattttaattgctaatcactggctatataagtgtttttaagcaaaggtatttttgaagtggtgtagaacccttccaagctttcctgctcagtgttctaccagacttaccctggggcctggcttaaaagcaggattgaagaaaagggactgggggaaggaaacttattggaaaacttgatgcgaatgagtttctgcttggcacagtctctgcctgcttgctctcctttgctgatggattgcatttatcaaactattcatgctagcatttttccaacgagggaacttattccgcacgggcctactgtaggaccattgtctcgtgtaattaggaattttccatttgaaggattgctaaattgtcacagtagtaggaagtatagggaaacctctcagctgtggcactgttgtagctttggagtgcagagtgtaactctgggacaatcagatttcacatattctgtcatcttggcataagccattaaaagcttggagattactgtatttggcattaaaaaaaaatgtcacttaggtcagcactcccagacgtagcacagaaaaaccctttgacacaaaccatgtgttctgatttttggttcagaaaatattgaaactgtgagttgttttttttttaacaactgggaaaaaacaaaaacaaaaaactatagttagaaaaatggaagttccataggttctatttcttactctatgtatggctttgttttcagtctatttctaggagctttctctgaatcgctaattgtcctttcagttgaaatctaatttatacaatcattctatacttaaaggttaaatacatcttaattaattttttcttaaagtcaatgtaagtcactttgttttgtttttttttaatctacgccatatgcctcatgaaaccagctgttctagaatcagtcctgagaatatggcttaattccatggaaacataactcctatcttgggacctgacataatatctatctatcctggggaactggtaatatgagacttataggttacagcagaaatgctacatgttgacaaaagccttaatcgttccactgggagaactaattgataattgtgttaagattgaagattaaccctgtgttaatctcacttgagtctatcctgacagtagttcagattctggaaaatgataaactgacctgctagatgtagaattgtttcaaaattagtgttgaaataccttgttcacagatgaatatctgggcaggatctgagggtgtttggaatgacaccccccaatccagttgcatagatgggatgtctttgcaggtttgaggagatcatcgacctgcagagccccctttgacccagtacctcacgttttatttaaaatctaaatctggggccaggcgtggtggctcacgcctgtaatccaagcactttgggaggccgaagcgggtggatcacctgaggtcaggagtttgagaccatcctggccaacatggtgaaaccccgtctctactgaaaaaaatacaaaaattagctgggcatggtggtagcacgcgcctgtagtcccagctactcgggaggctgaggcaggataatcgcttgaacttggcgggtagaggttgcagtgagccaagatggtgccactacactgcagcctgggtggctgagcgagactccgtctcaaaaaaaaaatctaaatctgacatttgatgctatttttattaatattggaatgttctgtcttgaactttattcaatataatcaagaataaagatagagtaaacgtcactgatttgtactattaagagagaaaaaatatgccacacaactaaacataggtttaaattatgaagaaatttagaatagaggtttattagatttagggaacactaagaacaaaaaaggaaggagtgatacctgcctgagtggacagctgtaaatcagctgtaattactgcagttgtaccaatagttgtgagtggctccagtcactttaggagtccttggaagtacttggtacacatttgttggctgtaccttaaaggaagtggcaagtccagtttgttctctctaccacactagactgccactgacaagtttgggtctgttggattcaaaattttgtaagccattttcacaagtacaaagatacattttaaccttgtcttctccaaaattactgagtaggaattttatttttatctttttgagacagggtatcactgtcacccagactggagtgcagtggtgggatcttggcttactgtgacctctgcctcccgggttcaaatggtcctccctcctcagtctcctgagtagctgggacgacaggcacgtgccaccatgcccagctaatttgttctattttttctgtagagacggggttttgccatgttgcccaggctggtctcagactcctgggctcaagcgatcatttcgcctcagcctcccaaagtgctgagattataggtgtgagccacagcatctggcccagagtgaggagaattaatgagattttttgtgtgtgttagataatattgatttaagcctttttttaaaaagtactctcaaccaaatacaaaattgaaaatgtgaggtttaatagaaatgtgttggctatttgcaatggattttcttcttgcccaagtgtttggagttctactttatgctctgtatttaaaaattagtgacctcaaagcagagttgatgacacaggctttggggccctcatgttcttgtctttagaacatatcactactaagtatcagcttatcttcagaacattacaacattcaccgtgttcatatgctttctgagaagtcaccacttgtaatttcagatcacatacacctgaaggcattttatagttcctaaagttaacatgttagatcttttttttccaccccatgagggtctcactctcacccaggctggaatgcagtggtgtgattgtagcacactttggccaccaactcctgggctcaagtgatcctcctgctttggcctcctctgagaagctgggattactggtgcacaccaccacacctggctaattttttatttttttttatttttggaaatagggtatggctatgttgccttgggcccgtcatgaactcctagcctcaggtgaccctcccacctcaggcctcccaaagggttgggattacaggagtgagctactgcactgggccaacatgttaatttttttttttttttttttgagatggagtctcccaggcgggaatgcaatggtgcgatctcgacttcactgcaatcttcacctcccgggttcgagcgattctcccacctcagcctcctgagtagctgggattacaggcacctgccatcacgctcggctaatttttgtattttgagcagagatggagtttcaccatgttggccaggtgatctgcactcccactccccccacacttcccaaagtgctgggattacaggcataagccacaagccacctcacccagccaacatgttacatcttaattcttggattttcttcactgcagggctttgggtggagaaataaaactcttcaaatgcatgatcttggagatccctgtgaatcaataattctttagacaactgcggctcaaaatccctcctttcccttttccgagttattccatccatcttattagaaaggaagtgaattaggtgtaggtggtctgtaacacctgcacatctttttatacgtgtagagggtatgcctgggatatataggttgtcttcaagcagtagctgctactacagctagagagaggaggagtgccaggaaactgatgacctgagaccaagagtcttgttgatgttctgacttagataaaggttttgatcattttcatgaaataatgcagggaagtcatttctgctgtttctttactactccattcttggaggattagaacaagtcacactgtaattgactaaaacgactttttattttaaaatattgatggtggggttttgcttttttttttttttttttttttgagacgttgtcttgctctttcacccagggtagagtgcagtggcgaaatcttggctcactgcaacctctgcctcccgggttcaagcaattctctgcctcagcctcctgagaagctgggattacagcgcctgccaccatgcctgtctagtttttttgtatttttagtagagacaggggtttcaccaagttggccaggctggtcttgaactcctgacctcgtgatccacccacctcggcctcccaaagtgctgggattacaggcgtgagccaccgtgccgggccagtgtttttaactgtccacacttactaaattttccagtacttcttcctatggttcatgatagtaaacacagaaacatataaggaacattattagagttaccagatgttagctgttgcatatgtgcacattcctagattcaagggtgtttttgccttaaatttaagtgggtcattggttgtcttgggaagatcatggaaaattcgggattttttagaattctgaaccaaaatatgttttgagtgtttcttagtaaatgtgtgatcttccaccttccacattcagactgcggactacacttcataaatgcctttttatttccagttatggattcaactaaatgactgccttgggagcacataattactttgctacctttttccccctttgctgttgtggctcgagtttggttctcacctgagaagatgcattgagcatatgttgttacccagccctggcttaatggtgtcctgtggggtaggggtgggaggacgaggggcacggggccagagcatgtgaatggatcatggttggacagctgtgacctgccagcactgcgggtaagcaaaactacaaaccgttctttcctctgtgacattgaataaaccttaataaaattcataattagcacatact

SEQ ID NO: 821 - DNA, 7577 bp, Homo sapiens
  source 1..7577: mol_type = unassigned DNA
aaaaagtgctttattttcccactccccggacgcccagcagggcagtttcttgaccttcggagcccctttcccgaggatccgctcgggagcctcccctggccaggagcaggggattagtctgccccgcgaccggccccagccacgacgcggacatcgccccctctgtctgggccgctgtcactcacgcgccaaagggccacggagaaagaaggggcgggccggggcgggccgggcgagcggaggcggggacttgcgccgtcctgaggctgcctcctagggtccggccggcgctggagctgcggatttagattgtcactgccacctcggtcggtgcttacttcgctgccagctggtcgtcgccatgaacccggacctgcgcagggagcgggattccgccagcttcaacccggagctgcttacacacatcctggacggcagccccgagaaaacccggcgccgccgagagatcgagaacatgatcctgaacgacccagacttccagcatgaggacttgaacttcctcactcgcagccagcgttatgaggtggctgtcaggaaaagtgccatcatggtgaagaagatgagggagtttggcatcgctgaccctgatgaaattatgtggtttaaaaaactacatttggtcaattttgtggaacctgtgggcctcaattactccatgtttattcctaccttgctgaatcagggcaccactgctcagaaagagaaatggctgctttcatccaaaggactccagataattggcacctacgcccagacggaaatgggccacggaactcaccttcgaggcttggaaaccacagccacgtatgaccctgaaacccaggagttcattctcaacagtcctactgtgacctccattaaatggtggcctggtgggcttggaaagacttcaaatcatgcaatagttcttgcccagctcatcactaaggggaaatgctatggattacatgcctttatcgtacctattcgtgaaatcgggacccataagcctttgccaggaattaccgttggtgacatcggccccaaatttggttatgatgagatagacaatggctacctcaaaatggacaaccatcgtattcccagagaaaacatgctgatgaagtatgcccaggtgaagcctgatggcacatacgtgaaaccgctgagtaacaagctgacttacgggaccatggtgtttgtcaggtccttccttgtgggagaagctgctcgggctctgtctaaggcgtgcaccattgccatccgatacagcgctgtgaggcaccagtctgaaatcaagccaggtgaaccagaaccacagattttggattttcaaacccagcagtataaactctttccactcctggccactgcctatgccttccagtttgtgggcgcatacatgaaggagacctatcaccggattaacgaaggcattggtcaaggggacctgagtgaactgcctgagcttcatgccctcaccgctggactgaaggctttcacctcctggactgcaaacactggcattgaagcatgtcggatggcttgtggtgggcatggctattctcattgcagtggtcttccaaatatttatgtcaatttcaccccaagctgtacctttgagggagaaaacactgtcatgatgctccagacggctaggttcctgatgaaaagttatgatcaggtgcactcaggaaagttggtgtgtggcatggtgtcctatttgaacgacctgcccagtcagcgcatccagccacagcaggtagcagtctggccaaccatggtggatatcaacagccccgaaagcctaaccgaagcatataaactccgtgcagccagattagtagaaattgctgcaaaaaaccttcaaaaagaagtgattcacagaaaaagcaaggaggtagcttggaacctaacttctgttgaccttgttcgagcaagtgaggcacattgccactatgtggtagttaagctcttttcagaaaaactcctcaaaattcaagataaagccattcaagctgtcttaaggagtttatgtctgctgtattctctgtatggaatcagtcagaacgcgggggatttccttcaggggagcatcatgacagagcctcagattacacaagtaaaccagcgtgtaaaggagttactcactctgattcgctcagatgctgttgctttggttgatgcatttgattttcaggatgtgacacttggctctgtgcttggccgctatgatgggaatgtgtatgaaaacttgtttgagtgggctaagaactccccactgaacaaagcagaggtccacgaatcttacaagcacctgaagtcactgcagtccaagctctgaagtgtcacaaggacaagtttaatctgcttcagaaagcgcctgtgtgcaactcaaattttgtggaatctttttcgaattcaaatagctatagagcaaatgataaattgacccctttttataaatggagggaaaaaatgaacagatttcagagattaaatgaaaaaaagcagatgttttaagtgcaattaacactgaaagagacctgttaaaccattcagaaaaagcttaagaaatgcgatatgacttccttttgtaatgctgctgatcccagtagactatgacttttgataattagcagaatttaactactgagtagttgattattttcacattttaattgctaatcactggctatataagtgtttttaagcaaaggtatttttgaagtggtgtagaacccttccaagctttcctgctcagtgttctaccagacttaccctggggcctggcttaaaagcaggattgaagaaaagggactgggggaaggaaacttattggaaaacttgatgcgaatgagtttctgcttggcacagtctctgcctgcttgctctcctttgctgatggattgcatttatcaaactattcatgctagcatttttccaacgagggaacttattccgcacgggcctactgtaggaccattgtctcgtgtaattaggaattttccatttgaaggattgctaaattgtcacagtagtaggaagtatagggaaacctctcagctgtggcactgttgtagctttggagtgcagagtgtaactctgggacaatcagatttcacatattctgtcatcttggcataagccattaaaagcttggagattactgtatttggcattaaaaaaaaatgtcacttaggtcagcactcccagacgtagcacagaaaaaccctttgacacaaaccatgtgttctgatttttggttcagaaaatattgaaactgtgagttgttttttttttaacaactgggaaaaaacaaaaacaaaaaactatagttagaaaaatggaagttccataggttctatttcttactctatgtatggctttgttttcagtctatttctaggagctttctctgaatcgctaattgtcctttcagttgaaatctaatttatacaatcattctatacttaaaggttaaatacatcttaattaattttttcttaaagtcaatgtaagtcactttgttttgtttttttttaatctacgccatatgcctcatgaaaccagctgttctagaatcagtcctgagaatatggcttaattccatggaaacataactcctatcttgggacctgacataatatctatctatcctggggaactggtaatatgagacttataggttacagcagaaatgctacatgttgacaaaagccttaatcgttccactgggagaactaattgataattgtgttaagattgaagattaaccctgtgttaatctcacttgagtctatcctgacagtagttcagattctggaaaatgataaactgacctgctagatgtagaattgtttcaaaattagtgttgaaataccttgttcacagatgaatatctgggcaggatctgagggtgtttggaatgacaccccccaatccagttgcatagatgggatgtctttgcaggtttgaggagatcatcgacctgcagagccccctttgacccagtacctcacgttttatttaaaatctaaatctggggccaggcgtggtggctcacgcctgtaatccaagcactttgggaggccgaagcgggtggatcacctgaggtcaggagtttgagaccatcctggccaacatggtgaaaccccgtctctactgaaaaaaatacaaaaattagctgggcatggtggtagcacgcgcctgtagtcccagctactcgggaggctgaggcaggataatcgcttgaacttggcgggtagaggttgcagtgagccaagatggtgccactacactgcagcctgggtggctgagcgagactccgtctcaaaaaaaaaatctaaatctgacatttgatgctatttttattaatattggaatgttctgtcttgaactttattcaatataatcaagaataaagatagagtaaacgtcactgatttgtactattaagagagaaaaaatatgccacacaactaaacataggtttaaattatgaagaaatttagaatagaggtttattagatttagggaacactaagaacaaaaaaggaaggagtgatacctgcctgagtggacagctgtaaatcagctgtaattactgcagttgtaccaatagttgtgagtggctccagtcactttaggagtccttggaagtacttggtacacatttgttggctgtaccttaaaggaagtggcaagtccagtttgttctctctaccacactagactgccactgacaagtttgggtctgttggattcaaaattttgtaagccattttcacaagtacaaagatacattttaaccttgtcttctccaaaattactgagtaggaattttatttttatctttttgagacagggtatcactgtcacccagactggagtgcagtggtgggatcttggcttactgtgacctctgcctcccgggttcaaatggtcctccctcctcagtctcctgagtagctgggacgacaggcacgtgccaccatgcccagctaatttgttctattttttctgtagagacggggttttgccatgttgcccaggctggtctcagactcctgggctcaagcgatcatttcgcctcagcctcccaaagtgctgagattataggtgtgagccacagcatctggcccagagtgaggagaattaatgagattttttgtgtgtgttagataatattgatttaagcctttttttaaaaagtactctcaaccaaatacaaaattgaaaatgtgaggtttaatagaaatgtgttggctatttgcaatggattttcttcttgcccaagtgtttggagttctactttatgctctgtatttaaaaattagtgacctcaaagcagagttgatgacacaggctttggggccctcatgttcttgtctttagaacatatcactactaagtatcagcttatcttcagaacattacaacattcaccgtgttcatatgctttctgagaagtcaccacttgtaatttcagatcacatacacctgaaggcattttatagttcctaaagttaacatgttagatcttttttttccaccccatgagggtctcactctcacccaggctggaatgcagtggtgtgattgtagcacactttggccaccaactcctgggctcaagtgatcctcctgctttggcctcctctgagaagctgggattactggtgcacaccaccacacctggctaattttttatttttttttatttttggaaatagggtatggctatgttgccttgggcccgtcatgaactcctagcctcaggtgaccctcccacctcaggcctcccaaagggttgggattacaggagtgagctactgcactgggccaacatgttaatttttttttttttttttttgagatggagtctcccaggcgggaatgcaatggtgcgatctcgacttcactgcaatcttcacctcccgggttcgagcgattctcccacctcagcctcctgagtagctgggattacaggcacctgccatcacgctcggctaatttttgtattttgagcagagatggagtttcaccatgttggccaggtgatctgcactcccactccccccacacttcccaaagtgctgggattacaggcataagccacaagccacctcacccagccaacatgttacatcttaattcttggattttcttcactgcagggctttgggtggagaaataaaactcttcaaatgcatgatcttggagatccctgtgaatcaataattctttagacaactgcggctcaaaatccctcctttcccttttccgagttattccatccatcttattagaaaggaagtgaattaggtgtaggtggtctgtaacacctgcacatctttttatacgtgtagagggtatgcctgggatatataggttgtcttcaagcagtagctgctactacagctagagagaggaggagtgccaggaaactgatgacctgagaccaagagtcttgttgatgttctgacttagataaaggttttgatcattttcatgaaataatgcagggaagtcatttctgctgtttctttactactccattcttggaggattagaacaagtcacactgtaattgactaaaacgactttttattttaaaatattgatggtggggttttgcttttttttttttttttttttttgagacgttgtcttgctctttcacccagggtagagtgcagtggcgaaatcttggctcactgcaacctctgcctcccgggttcaagcaattctctgcctcagcctcctgagaagctgggattacagcgcctgccaccatgcctgtctagtttttttgtatttttagtagagacaggggtttcaccaagttggccaggctggtcttgaactcctgacctcgtgatccacccacctcggcctcccaaagtgctgggattacaggcgtgagccaccgtgccgggccagtgtttttaactgtccacacttactaaattttccagtacttcttcctatggttcatgatagtaaacacagaaacatataaggaacattattagagttaccagatgttagctgttgcatatgtgcacattcctagattcaagggtgtttttgccttaaatttaagtgggtcattggttgtcttgggaagatcatggaaaattcgggattttttagaattctgaaccaaaatatgttttgagtgtttcttagtaaatgtgtgatcttccaccttccacattcagactgcggactacacttcataaatgcctttttatttccagttatggattcaactaaatgactgccttgggagcacataattactttgctacctttttccccctttgctgttgtggctcgagtttggttctcacctgagaagatgcattgagcatatgttgttacccagccctggcttaatggtgtcctgtggggtaggggtgggaggacgaggggcacggggccagagcatgtgaatggatcatggttggacagctgtgacctgccagcactgcgggtaagcaaaactacaaaccgttctttcctctgtgacattgaataaaccttaataaaattcataattagcacatact

SEQ ID NO: 822 - DNA, 7751 bp, Homo sapiens
  source 1..7751: mol_type = unassigned DNA
aaaaagtgctttattttcccactccccggacgcccagcagggcagtttcttgaccttcggagcccctttcccgaggatccgctcgggagcctcccctggccaggagcaggggattagtctgccccgcgaccggccccagccacgacgcggacatcgccccctctgtctgggccgctgtcactcacgcgccaaagggccacggagaaagaaggggcgggccggggcgggccgggcgagcggaggcggggacttgcgccgtcctgaggctgcctcctagggtccggccggcgctggagctgcggatttagattgtcactgccacctcggtcggtgcttacttcgctgccagctggtcgtcgccatgaacccggacctgcgcagggagcgggattccgccagcttcaacccggagctgcttacacacatcctggacggcagccccgagaaaacccggcgccgccgagagatcggtgagggcggcgggcgagacctccctcctttcccgagaaaagctggagactccctcgatgcggagtcaggggcgctgtggggcctaggccctctggcccagcgttaggggagccgggacccccacttcgaggaacagcctgtgtccctggtggggggatatcgccattccccagagaacatgatcctgaacgacccagacttccagcatgaggacttgaacttcctcactcgcagccagcgttatgaggtggctgtcaggaaaagtgccatcatggtgaagaagatgagggagtttggcatcgctgaccctgatgaaattatgtggtttaaaaattttgtgcaccgagggcggcctgagcctctggatcttcacttgggcatgttcctgcccaccttgcttcaccaggcaactgcggagcagcaggagcgcttcttcatgcccgcctggaacttggagatcattggcacttatgcccagacagagatgggtcatggaactcaccttcgaggcttggaaaccacagccacgtatgaccctgaaacccaggagttcattctcaacagtcctactgtgacctccattaaatggtggcctggtgggcttggaaagacttcaaatcatgcaatagttcttgcccagctcatcactaaggggaaatgctatggattacatgcctttatcgtacctattcgtgaaatcgggacccataagcctttgccaggaattaccgttggtgacatcggccccaaatttggttatgatgagatagacaatggctacctcaaaatggacaaccatcgtattcccagagaaaacatgctgatgaagtatgcccaggtgaagcctgatggcacatacgtgaaaccgctgagtaacaagctgacttacgggaccatggtgtttgtcaggtccttccttgtgggagaagctgctcgggctctgtctaaggcgtgcaccattgccatccgatacagcgctgtgaggcaccagtctgaaatcaagccaggtgaaccagaaccacagattttggattttcaaacccagcagtataaactctttccactcctggccactgcctatgccttccagtttgtgggcgcatacatgaaggagacctatcaccggattaacgaaggcattggtcaaggggacctgagtgaactgcctgagcttcatgccctcaccgctggactgaaggctttcacctcctggactgcaaacactggcattgaagcatgtcggatggcttgtggtgggcatggctattctcattgcagtggtcttccaaatatttatgtcaatttcaccccaagctgtacctttgagggagaaaacactgtcatgatgctccagacggctaggttcctgatgaaaagttatgatcaggtgcactcaggaaagttggtgtgtggcatggtgtcctatttgaacgacctgcccagtcagcgcatccagccacagcaggtagcagtctggccaaccatggtggatatcaacagccccgaaagcctaaccgaagcatataaactccgtgcagccagattagtagaaattgctgcaaaaaaccttcaaaaagaagtgattcacagaaaaagcaaggaggtagcttggaacctaacttctgttgaccttgttcgagcaagtgaggcacattgccactatgtggtagttaagctcttttcagaaaaactcctcaaaattcaagataaagccattcaagctgtcttaaggagtttatgtctgctgtattctctgtatggaatcagtcagaacgcgggggatttccttcaggggagcatcatgacagagcctcagattacacaagtaaaccagcgtgtaaaggagttactcactctgattcgctcagatgctgttgctttggttgatgcatttgattttcaggatgtgacacttggctctgtgcttggccgctatgatgggaatgtgtatgaaaacttgtttgagtgggctaagaactccccactgaacaaagcagaggtccacgaatcttacaagcacctgaagtcactgcagtccaagctctgaagtgtcacaaggacaagtttaatctgcttcagaaagcgcctgtgtgcaactcaaattttgtggaatctttttcgaattcaaatagctatagagcaaatgataaattgacccctttttataaatggagggaaaaaatgaacagatttcagagattaaatgaaaaaaagcagatgttttaagtgcaattaacactgaaagagacctgttaaaccattcagaaaaagcttaagaaatgcgatatgacttccttttgtaatgctgctgatcccagtagactatgacttttgataattagcagaatttaactactgagtagttgattattttcacattttaattgctaatcactggctatataagtgtttttaagcaaaggtatttttgaagtggtgtagaacccttccaagctttcctgctcagtgttctaccagacttaccctggggcctggcttaaaagcaggattgaagaaaagggactgggggaaggaaacttattggaaaacttgatgcgaatgagtttctgcttggcacagtctctgcctgcttgctctcctttgctgatggattgcatttatcaaactattcatgctagcatttttccaacgagggaacttattccgcacgggcctactgtaggaccattgtctcgtgtaattaggaattttccatttgaaggattgctaaattgtcacagtagtaggaagtatagggaaacctctcagctgtggcactgttgtagctttggagtgcagagtgtaactctgggacaatcagatttcacatattctgtcatcttggcataagccattaaaagcttggagattactgtatttggcattaaaaaaaaatgtcacttaggtcagcactcccagacgtagcacagaaaaaccctttgacacaaaccatgtgttctgatttttggttcagaaaatattgaaactgtgagttgttttttttttaacaactgggaaaaaacaaaaacaaaaaactatagttagaaaaatggaagttccataggttctatttcttactctatgtatggctttgttttcagtctatttctaggagctttctctgaatcgctaattgtcctttcagttgaaatctaatttatacaatcattctatacttaaaggttaaatacatcttaattaattttttcttaaagtcaatgtaagtcactttgttttgtttttttttaatctacgccatatgcctcatgaaaccagctgttctagaatcagtcctgagaatatggcttaattccatggaaacataactcctatcttgggacctgacataatatctatctatcctggggaactggtaatatgagacttataggttacagcagaaatgctacatgttgacaaaagccttaatcgttccactgggagaactaattgataattgtgttaagattgaagattaaccctgtgttaatctcacttgagtctatcctgacagtagttcagattctggaaaatgataaactgacctgctagatgtagaattgtttcaaaattagtgttgaaataccttgttcacagatgaatatctgggcaggatctgagggtgtttggaatgacaccccccaatccagttgcatagatgggatgtctttgcaggtttgaggagatcatcgacctgcagagccccctttgacccagtacctcacgttttatttaaaatctaaatctggggccaggcgtggtggctcacgcctgtaatccaagcactttgggaggccgaagcgggtggatcacctgaggtcaggagtttgagaccatcctggccaacatggtgaaaccccgtctctactgaaaaaaatacaaaaattagctgggcatggtggtagcacgcgcctgtagtcccagctactcgggaggctgaggcaggataatcgcttgaacttggcgggtagaggttgcagtgagccaagatggtgccactacactgcagcctgggtggctgagcgagactccgtctcaaaaaaaaaatctaaatctgacatttgatgctatttttattaatattggaatgttctgtcttgaactttattcaatataatcaagaataaagatagagtaaacgtcactgatttgtactattaagagagaaaaaatatgccacacaactaaacataggtttaaattatgaagaaatttagaatagaggtttattagatttagggaacactaagaacaaaaaaggaaggagtgatacctgcctgagtggacagctgtaaatcagctgtaattactgcagttgtaccaatagttgtgagtggctccagtcactttaggagtccttggaagtacttggtacacatttgttggctgtaccttaaaggaagtggcaagtccagtttgttctctctaccacactagactgccactgacaagtttgggtctgttggattcaaaattttgtaagccattttcacaagtacaaagatacattttaaccttgtcttctccaaaattactgagtaggaattttatttttatctttttgagacagggtatcactgtcacccagactggagtgcagtggtgggatcttggcttactgtgacctctgcctcccgggttcaaatggtcctccctcctcagtctcctgagtagctgggacgacaggcacgtgccaccatgcccagctaatttgttctattttttctgtagagacggggttttgccatgttgcccaggctggtctcagactcctgggctcaagcgatcatttcgcctcagcctcccaaagtgctgagattataggtgtgagccacagcatctggcccagagtgaggagaattaatgagattttttgtgtgtgttagataatattgatttaagcctttttttaaaaagtactctcaaccaaatacaaaattgaaaatgtgaggtttaatagaaatgtgttggctatttgcaatggattttcttcttgcccaagtgtttggagttctactttatgctctgtatttaaaaattagtgacctcaaagcagagttgatgacacaggctttggggccctcatgttcttgtctttagaacatatcactactaagtatcagcttatcttcagaacattacaacattcaccgtgttcatatgctttctgagaagtcaccacttgtaatttcagatcacatacacctgaaggcattttatagttcctaaagttaacatgttagatcttttttttccaccccatgagggtctcactctcacccaggctggaatgcagtggtgtgattgtagcacactttggccaccaactcctgggctcaagtgatcctcctgctttggcctcctctgagaagctgggattactggtgcacaccaccacacctggctaattttttatttttttttatttttggaaatagggtatggctatgttgccttgggcccgtcatgaactcctagcctcaggtgaccctcccacctcaggcctcccaaagggttgggattacaggagtgagctactgcactgggccaacatgttaatttttttttttttttttttgagatggagtctcccaggcgggaatgcaatggtgcgatctcgacttcactgcaatcttcacctcccgggttcgagcgattctcccacctcagcctcctgagtagctgggattacaggcacctgccatcacgctcggctaatttttgtattttgagcagagatggagtttcaccatgttggccaggtgatctgcactcccactccccccacacttcccaaagtgctgggattacaggcataagccacaagccacctcacccagccaacatgttacatcttaattcttggattttcttcactgcagggctttgggtggagaaataaaactcttcaaatgcatgatcttggagatccctgtgaatcaataattctttagacaactgcggctcaaaatccctcctttcccttttccgagttattccatccatcttattagaaaggaagtgaattaggtgtaggtggtctgtaacacctgcacatctttttatacgtgtagagggtatgcctgggatatataggttgtcttcaagcagtagctgctactacagctagagagaggaggagtgccaggaaactgatgacctgagaccaagagtcttgttgatgttctgacttagataaaggttttgatcattttcatgaaataatgcagggaagtcatttctgctgtttctttactactccattcttggaggattagaacaagtcacactgtaattgactaaaacgactttttattttaaaatattgatggtggggttttgcttttttttttttttttttttttgagacgttgtcttgctctttcacccagggtagagtgcagtggcgaaatcttggctcactgcaacctctgcctcccgggttcaagcaattctctgcctcagcctcctgagaagctgggattacagcgcctgccaccatgcctgtctagtttttttgtatttttagtagagacaggggtttcaccaagttggccaggctggtcttgaactcctgacctcgtgatccacccacctcggcctcccaaagtgctgggattacaggcgtgagccaccgtgccgggccagtgtttttaactgtccacacttactaaattttccagtacttcttcctatggttcatgatagtaaacacagaaacatataaggaacattattagagttaccagatgttagctgttgcatatgtgcacattcctagattcaagggtgtttttgccttaaatttaagtgggtcattggttgtcttgggaagatcatggaaaattcgggattttttagaattctgaaccaaaatatgttttgagtgtttcttagtaaatgtgtgatcttccaccttccacattcagactgcggactacacttcataaatgcctttttatttccagttatggattcaactaaatgactgccttgggagcacataattactttgctacctttttccccctttgctgttgtggctcgagtttggttctcacctgagaagatgcattgagcatatgttgttacccagccctggcttaatggtgtcctgtggggtaggggtgggaggacgaggggcacggggccagagcatgtgaatggatcatggttggacagctgtgacctgccagcactgcgggtaagcaaaactacaaaccgttctttcctctgtgacattgaataaaccttaataaaattcataattagcacatact

SEQ ID NO: 823 - DNA, 2417 bp, Homo sapiens
  source 1..2417: mol_type = unassigned DNA
agattgtcactgccacctcggtcggtgcttacttcgctgccagctggtcgtcgccatgaacccggacctgcgcagggagcgggattccgccagcttcaacccggagctgcttacacacatcctggacggcagccccgagaaaacccggcgccgccgagagatcgagaacatgatcctgaacgacccagacttccagcatgaggacttgaacttcctcactcgcagccagcgttatgaggtggctgtcaggaaaagtgccatcatggtgaagaagatgagggagtttggcatcgctgaccctgatgaaattatgtggtttaaaaaactacatttggtcaattttgtggaacctgtgggcctcaattactccatgtttattcctaccttgctgaatcagggcaccactgctcagaaagagaaatggctgctttcatccaaaggactccagataattggcacctacgcccagacggaaatgggccacgttttgtgcaccgagggcggcctgagcctctggatcttcacttgggcatgttcctgcccaccttgcttcaccaggcaactgcggagcagcaggagcgcttcttcatgcccgcctggaacttggagatcattggcacttatgcccagacagagatgggtcatggaactcaccttcgaggcttggaaaccacagccacgtatgaccctgaaacccaggagttcattctcaacagtcctactgtgacctccattaaatggtggcctggtgggcttggaaagacttcaaatcatgcaatagttcttgcccagctcatcactaaggggaaatgctatggattacatgcctttatcgtacctattcgtgaaatcgggacccataagcctttgccaggaattaccgttggtgacatcggccccaaatttggttatgatgagatagacaatggctacctcaaaatggacaaccatcgtattcccagagaaaacatgctgatgaagtatgcccaggtgaagcctgatggcacatacgtgaaaccgctgagtaacaagctgacttacgggaccatggtgtttgtcaggtccttccttgtgggagaagctgctcgggctctgtctaaggcgtgcaccattgccatccgatacagcgctgtgaggcaccagtctgaaatcaagccaggtgaaccagaaccacagattttggattttcaaacccagcagtataaactctttccactcctggccactgcctatgccttccagtttgtgggcgcatacatgaaggagacctatcaccggattaacgaaggcattggtcaaggggacctgagtgaactgcctgagcttcatgccctcaccgctggactgaaggctttcacctcctggactgcaaacactggcattgaagcatgtcggatggcttgtggtgggcatggctattctcattgcagtggtcttccaaatatttatgtcaatttcaccccaagctgtacctttgagggagaaaacactgtcatgatgctccagacggctaggttcctgatgaaaagttatgatcaggtgcactcaggaaagttggtgtgtggcatggtgtcctatttgaacgacctgcccagtcagcgcatccagccacagcaggtagcagtctggccaaccatggtggatatcaacagccccgaaagcctaaccgaagcatataaactccgtgcagccagattagtagaaattgctgcaaaaaaccttcaaaaagaagtgattcacagaaaaagcaaggaggtagcttggaacctaacttctgttgaccttgttcgagcaagtgaggcacattgccactatgtggtagttaagctcttttcagaaaaactcctcaaaattcaagataaagccattcaagctgtcttaaggagtttatgtctgctgtattctctgtatggaatcagtcagaacgcgggggatttccttcaggggagcatcatgacagagcctcagattacacaagtaaaccagcgtgtaaaggagttactcactctgattcgctcagatgctgttgctttggttgatgcatttgattttcaggatgtgacacttggctctgtgcttggccgctatgatgggaatgtgtatgaaaacttgtttgagtgggctaagaactccccactgaacaaagcagaggtccacgaatcttacaagcacctgaagtcactgcagtccaagctctgaagtgtcacaaggacaagtttaatctgcttcagaaagcgcctgtgtgcaactcaaattttgtggaatctttttcgaattcaaatagctatagagcaaatgataaattgacccctttttataaatggagggaaaaaatgaacagatttcagagattaaatgaaaaaaagcagatgttttaagtgcaattaacactgaaagagacctgttaaaccattcag

SEQ ID NO: 824 - DNA, 2772 bp, Homo sapiens
  source 1..2772: mol_type = unassigned DNA
agattgtcactgccacctcggtcggtgcttacttcgctgccagctggtcgtcgccatgaacccggacctgcgcagggagcgggattccgccagcttcaacccggagctgcttacacacatcctggacggcagccccgagaaaacccggcgccgccgagagatcgagaacatgatcctgaacgacccagacttccagcatgaggacttgaacttcctcactcgcagccagcgttatgaggtggctgtcaggaaaagtgccatcatggtgaagaagatgagggagtttggcatcgctgaccctgatgaaattatgtggtttaaaaattttgtgcaccgagggcggcctgagcctctggatcttcacttgggcatgttcctgcccaccttgcttcaccaggcaactgcggagcagcaggagcgcttcttcatgcccgcctggaacttggagatcattggcacttatgcccagacagagatgggtcatggaactcaccttcgaggcttggaaaccacagccacgtatgaccctgaaacccaggagttcattctcaacagtcctactgtgacctccattaaatggtggcctggtgggcttggaaagacttcaaatcatgcaatagttcttgcccagctcatcactaaggggaaatgctatggattacatgcctttatcgtacctattcgtgaaatcgggacccataagcctttgccaggaattaccgttggtgacatcggccccaaatttggttatgatgagatagacaatggctacctcaaaatggacaaccatcgtattcccagagaaaacatgctgatgaagtatgcccaggtgaagcctgatggcacatacgtgaaaccgctgagtaacaagctgacttacgggaccatggtgtttgtcaggtccttccttgtgggagaagctgctcgggctctgtctaaggcgtgcaccattgccatccgatacagcgctgtgaggcaccagtctgaaatcaagccaggtgaaccagaaccacagattttggattttcaaacccagcagtataaactctttccactcctggccactgcctatgccttccagtttgtgggcgcatacatgaaggagacctatcaccggattaacgaaggcattggtcaaggggacctgagtgaactgcctgagcttcatgccctcaccgctggactgaaggctttcacctcctggactgcaaacactggcattgaagcatgtcggatggcttgtggtgggcatggctattctcattgcagtggtcttccaaatatttatgtcaatttcaccccaagctgtacctttgagggagaaaacactgtcatgatgctccagacggctaggttcctgatgaaaagttatgatcaggtgcactcaggaaagttggtgtgtggcatggtgtcctatttgaacgacctgcccagtcagcgcatccagccacagcaggtagcagtctggccaaccatggtggatatcaacagccccgaaagcctaaccgaagcatataaactccgtgcagccagattagtagaaattgctgcaaaaaaccttcaaaaagaagtgattcacagaaaaagcaaggaggtagcttggaacctaacttctgttgaccttgttcgagcaagtgaggcacattgccactatgtggtagttaagctcttttcagaaaaactcctcaaaattcaagataaagccattcaagctgtcttaaggagtttatgtctgctgtattctctgtatggaatcagtcagaacgcgggggatttccttcaggggagcatcatgacagagcctcagattacacaagtaaaccagcgtgtaaaggagttactcactctgattcgctcagatgctgttgctttggttgatgcatttgattttcaggatgtgacacttggctctgtgcttggccgctatgatgggaatgtgtatgaaaacttgtttgagtgggctaagaactccccactgaacaaagcagaggtccacgaatcttacaagcacctgaagtcactgcagtccaagctctgaagtgtcacaaggacaagtttaatctgcttcagaaagcgcctgtgtgcaactcaaattttgtggaatctttttcgaattcaaatagctatagagcaaatgataaattgacccctttttataaatggagggaaaaaatgaacagatttcagagattaaatgaaaaaaagcagatgttttaagtgcaattaacactgaaagagacctgttaaaccattcagaaaaagcttaagaaatgcgatatgacttccttttgtaatgctgctgatcccagtagactatgacttttgataattagcagaatttaactactgagtagttgattattttcacattttaattgctaatcactggctatataagtgtttttaagcaaaggtatttttgaagtggtgtagaacccttccaagctttcctgctcagtgttctaccagacttaccctggggcctggcttaaaagcaggattgaagaaaacttgatgcgaatgagtttctgcttggcacagtctctgcctgcttgctctcctttgctgatggattgcatttatcaaactattcatgctagcatttttccaacgagggaacttattccgcacgggcctactgtaggaccattgtctcgtgtaattaggaattttccatttgaaggattgctaaattgtcacagtagtaggaagtatagggaaacctctcagctgtggcactgttgtagctttggagtgcagagtgtaactctg

SEQ ID NO: 825 - DNA, 2426 bp, Homo sapiens
  source 1..2426: mol_type = unassigned DNA
acaagggcttgagagcagacaagggcttgagagcagacaagggcttgagagctggccaagcagtttctctcagcttctgtgttccagcccctatgtgggaggagagaagggcaggaccacaagcctgccagaggctgcggcctacagccggggagaggccagcccggcctacagtgcggacacaggacagaggggagccaggttctttgcactgaccaatgctgagagcagaccctcggagcagccgggttggaagtgtctctccatagtcaccagacagatccaggataggatgggcagcccagtgcaccgagtgtcattgggggatacctggagcaggcaaatgcaccccgacatagagagcgagaggtatatgcagtcctttgacgtggaacggctcaccaacatccttgatggaggtgcccagaacactgcactccgcaggaaagttgagagcatcatccacagttacccggagtttagctgtaaggacaattatttcatgacccagaatgagcgttataaggctgccatgcggagggcattccacatccggttgatagctcggcgcctgggttggttagaagatggtcgtgaattaggctacgcttacagagccctttctggagacgtggccttaaatatacacagagtcttcgtgagagccctcaggagcctgggctcagaggagcagattgccaaatgggacccactctgcaaaaacatccagatcatcgcaacgtatgcacagacagagttgggacatgggacatatcttcagggcctggagactgaagccacctatgacgcagccacccaggagtttgtgatacacagccccacgctgactgccaccaaatggtggcctggagacttgggacggtcagccacccatgccctggtccaggcccagctgatctgctcaggagccaggcggggcatgcacgcttttattgtgccaatccggagtcttcaggaccacaccccactgccaggaatcatcattggggacatcggacccaagatggactttgatcaaacagacaatggcttcctgcagctgaaccatgtgcgggtccccagggagaacatgctgagtcgctttgcacaggtcttgccagatggcacctacgtcaaactcggtacagcacagagcaactaccttcccatggtggtggtgcgggtggagctgctgtcaggggagatcctccctatactgcagaaggcctgtgtcatcgccatgcgctactcggtcatccgccgccaatcccggctccggcccagtgacccagaggcaaaggtcctggactaccagacacaacagcagaaactctttcctcagctggccatcagttatgccttccatttcctggcagtcagcctcttggagttcttccagcactcctacactgccattctgaaccaagacttcagcttcctgcctgagctccacgcactgagcacgggcatgaaggccatgatgtcagaattctgcacccagggagctgagatgtgccgcagggcctgtggcggacatggctactcaaagctgagtggcctgccatcactggtcaccaaattgtcggcctcctgtacctacgagggtgagaacacagtgctctacctgcaggtggccaggttcctggtgaagagctacctgcagactcagatgtcccctggctccacgccacagagatctctctctccatctgtcgcatatctcaccgcacctgacctggccaggtgtccagcccagagggcagccgacttcctctgcccggagctctacaccacggcctgggcacatgtggcagtaaggctcataaaggactcagtgcagcatttacagaccctgacgcaatccggagctgaccagcacgaggcttggaaccagaccactgtcatacacctccaggctgctaaggtgcactgctactatgtcactgtgaagggttttacagaagctctggagaaactagaaaatgaaccagcgattcagcaggtgctcaagcgcctctgtgacctccatgccatacatggaatcttgactaactcgggtgactttctccatgacgccttcctgtctggtgcccaagtggacatggcaagaacagcctacctggacctgctccgcctgatccggaaggatgccatcctgttaactgatgcttttgacttcaccgatcagtgtttaaattcagcacttggctgttatgatggaaacgtctacgaacgcctgttccagtgggctcagaagtcaccaaccaatactcaggagaaccctgcctatgaggaatatataagaccacttttacaaagttggagatccaagctatgaaataaccaacagtattcaagaagcaaccagcaccatcatgtgataatggtactatggcatatatgcaacattaaaattttaaattaga

SEQ ID NO: 826 - DNA, 708 bp, Homo sapiens
  source 1..708: mol_type = unassigned DNA
ctacagccggggagaggccagcccggcctacagtgcggacacaggacagaggggagccagccctggctgacacccagccctaggcagttcctcttgcacacaggttctttgcactgaccaatgctgagagcagaccctcggagcagccgggttggaagtgtctctccatagtcaccagacagatccaggataggatgggcagcccagtgcaccgagtgtcattgggggatacctggagcaggcaaatgcaccccgacatagagagcgagaggtatatgcagtcctttgacgtggaacggctcaccaacatccttgatggaggtgcccagaacactgcactccgcaggaaagttgagagcatcatccacagttacccggagtttagctgtaaggacaattatttcatgacccagaatgagcgttataaggctgccatgcggagggcattccacatccggttgatagctcggcgcctgggttggttagaagatggtcgtgaattaggctacgcttacagagccctttctggagacgtggccttaaatatacacagagtcttcgtgagagccctcaggagcctgggctcagaggagcagattgccaaatgggacccactctgcaaaaacatccagatcatcgcaacgtatgcacagacagagttgggacatgggacatatcttcagggcctggagactgaagccacctatg

SEQ ID NO: 827 - DNA, 2423 bp, Homo sapiens
  source 1..2423: mol_type = unassigned DNA
cgccgctggagatcctttcctgcttttggtttccctggcaggggttgaactgtggagtgtgtgggctcttatcacgcgatggcatccactgtggaaggaggcgacacagctctgctcccagaattccccagggggcccctcgatgcctaccgagcaagagcgtccttcagctggaaggagctggcgctgttcacggaaggggagggcatgctccgctttaagaaaaccatcttctcagctcttgagaatgaccctcttttcgctcgttcccctggagccgatctgtccttggagaagtatcgcgagctgaacttccttcgatgcaagcggatcttcgagtatgacttcctcagtgtcgaagacatgttcaagagccctctgaaggtccccgccttgattcagtgcctgggcatgtatgactcttctctggctgccaagtacctcctccatagcttggtttttggatcagcagtttacagttctggttctgaaagacatctcacatatattcaaaagatcttcaggatggagatttttggatgttttgctctgaccgaattaagccacggcagtaataccaaggccattcgcacaactgcccactacgatcctgccactgaggaattcatcatacattcccctgatttcgaagctgccaagttttgggttggcaacatgggcaagacagccactcacgcggtggtgtttgctaagctgtgtgtgccaggggaccagtgccatgggctgcatccctttatcgtgcagatccgggacccgaagacccttcttcccatgcctggagtgatggttggcgacataggaaaaaaactcgggcagaacggtctggataatggtttcgccatgttccacaaggtcagagttcctcgccagagccttctgaaccggatgggagacgtcacccccgagggcacctatgtcagcccctttaaggacgtcaggcagcgctttggagcgtccctggggagcctgtcctcgggccgggtctccatcgtgagcctggccatccttaacctaaagctggccgtggccatcgctcttcgcttctcagccactcggcgtcagtttggacccacagaggaggaggaaataccagtgcttgagtatccaatgcagcaatggcgcttgcttccatatctggcagctgtctacgccttagaccatttctccaagtcgctcttcctggacctggtggagctccagcgaggacttgcatcgggagaccgcagcgccagacaggcagagcttggacgtgagatccacgccctggcatcggccagcaagcccctggcctcgtggaccacccagcaaggaattcaggaatgccgggaggcgtgtggaggacacggctatctggccatgaaccggttgggtgtccttagagatgacaacgatcccaactgcacatacgaaggtgacaacaacatcctgctgcagcagacaagcaactatttgctgggtctcctggcacaccaggtccacgatggagcttgcttccgcagtccgctgaagtcagtggactttctggacgcctatcccggcatccttgaccagaagtttgaggtctccagtgttgccgactgcttggactctgcagtcgccctggcagcatacaagtggctggtttgctacctgctccgagagacttatcaaaaattaaaccaagagaaaagatcaggaagcagtgactttgaagcaaggaacaaatgccaggtgtcccacggccgtccgttggcgctggccttcgtggagctcacggtggtccagaggttccacgagcacgtgcaccagccttccgtgccgccctcgctgcgggccgtgctggggcggctcagtgctctgtacgccctgtggtccctgagccgccacgcggccctgctctaccgaggaggatacttctccggtgagcaggcgggagaagtgttggagagcgccgtcctggctttgtgttcccagctgaaagacgatgcagttgccctggtagacgtgatcgctcctcctgactttgttctggactcaccgattggcagagccgacggcgagctctacaaaaacctctggggcgctgtcctgcaggaaagcaaggtgttggagcgggcatcctggtggccagagttttctgtgaacaaacctgtcataggaagtctgaaatcgaagctctagtgggactggcacacattcagccaagtctaatgaaacgaagggaactaatcagacgtggacctcaacttctgattccagaacacgccggagattgctgctgctttctgagcccgcacctgtgcgcctaaactgctgattggcctcaactgcccaggcggacgggagggaggcacccggccggctggactaatctgggatcgcggtgatttgcagcgtggaaaagaaatgcagatgatcatgtc

SEQ ID NO: 828 - DNA, 2374 bp, Homo sapiens
  source 1..2374: mol_type = unassigned DNA
aaatgagaatggcgccgctggagatcctttcctgcttttggtttccctggcaggggttgaactgtggagtgtgtgggctcttatcacgcgatggcatccactgtggaaggaggcgacacagctctgctcccagaattccccagggggcccctcgatgcctaccgagcaagagcgtccttcagctggaaggagctggcgctgttcacggaaggggagggcatgctccgctttaagaaaaccatcttctcagctcttgagaatgaccctcttttcgctcgttcccctggagccgatctgtccttggagaagtatcgcgagctgaacttccttcgatgcaagcggatcttcgagtatgacttcctcagtgtcgaagacatgttcaagagccctctgaaggtccccgccttgattcagtgcctgggcatgtatgactcttctctggctgccaagtacctcctccatagcttggtttttggatcagcagtttacagttctggttctgaaagacatctcacatatattcaaaagatcttcaggatggagatttttggatgttttgctctgaccgaattaagccacggcagtaataccaaggccattcgcacaactgcccactacgatcctgccactgaggaattcatcatacattcccctgatttcgaagctgccaagttttgggttggcaacatgggcaagacagccactcacgcggtggtgtttgctaagctgtgtgtgccaggggaccagtgccatgggctgcatccctttatcgtgcagatccgggacccgaagacccttcttcccatgcctggagtgatggttggcgacataggaaaaaaactcgggcagaacggtctggataatggtttcgccatgttccacaaggtcagagttcctcgccagagccttctgaaccggatgggagacgtcacccccgagggcacctatgtcagcccctttaaggacgtcaggcagcgctttggagcgtccctggggagcctgtcctcgggccgggtctccatcgtgagcctggccatccttaacctaaagctggccgtggccatcgctcttcgcttctcagccactcggcgtcagtttggacccacagaggaggaggaaataccagtgcttgagtatccaatgcagcaatggcgcttgcttccatatctggcagctgtctacgccttagaccatttctccaagtcgctcttcctggacctggtggagctccagcgaggacttgcatcgggagaccgcagcgccagacaggcagagcttggacgtgagatccacgccctggcatcggccagcaagcccctggcctcgtggaccacccagcaaggaattcaggaatgccgggaggcgtgtggaggacacggctatctggccatgaaccggttgggtgtccttagagatgacaacgatcccaactgcacatacgaaggtgacaacaacatcctgctgcagcagacaagcaactatttgctgggtctcctggcacaccaggtccacgatggagcttgcttccgcagtccgctgaagtcagtggactttctggacgcctatcccggcatccttgaccagaagtttgaggtctccagtgttgccgactgcttggactctgcagtcgccctggcagcatacaagtggctggtttgctacctgctccgagagacttatcaaaaattaaaccaagagaaaagatcaggaagcagtgactttgaagcaaggaacaaatgccaggtgtcccacggccgtccgttggcgctggccttcgtggagctcacggtggtccagaggttccacgagcacgtgcaccagccttccgtgccgccctcgctgcgggccgtgctggggcggctcagtgctctgtacgccctgtggtccctgagccgccacgcggccctgctctaccgagctgaaagacgatgcagttgccctggtagacgtgatcgctcctcctgactttgttctggactcaccgattggcagagccgacggcgagctctacaaaaacctctggggcgctgtcctgcaggaaagcaaggtgttggagcgggcatcctggtggccagagttttctgtgaacaaacctgtcataggaagtctgaaatcgaagctctagtgggactggcacacattcagccaagtctaatgaaacgaagggaactaatcagacgtggacctcaacttctgattccagaacacgccggagattgctgctgctttctgagcccgcacctgtgcgcctaaactgctgattggcctcaactgcccaggcggacgggagggaggcacccggccggctggactaatctgggatcgcggtgatttgcagcgtggaaaagaaatgcagatgatcatgtctacctga

SEQ ID NO: 829 - DNA, 2253 bp, Homo sapiens
  source 1..2253: mol_type = unassigned DNA
atgggacggacggaggccgagaggcgtggcgggggagcagtggggccaggccagagacagctgcgctgtgcgggcagctagtcccagtactccgagtcggtcgcgggccgacaggcatcccctgagcgcctgctgggctcttatcacgcgatggcatccactgtggaaggaggcgacacagctctgctcccagaattccccagggggcccctcgatgcctaccgagcaagagcgtccttcagctggaaggagctggcgctgttcacggaaggggagggcatgctccgctttaagaaaaccatcttctcagctcttgagaatgaccctcttttcgctcgttcccctggagccgatctgtccttggagaagtatcgcgagctgaacttccttcgatgcaagcggatcttcgagtatgacttcctcagtgtcgaagacatgttcaagagccctctgaaggtccccgccttgattcagtgcctgggcatgtatgactcttctctggctgccaagtacctcctccatagcttggtttttggatcagcagtttacagttctggttctgaaagacatctcacatatattcaaaagatcttcaggatggagatttttggatgttttgctctgaccgaattaagccacggcagtaataccaaggccattcgcacaactgcccactacgatcctgccactgaggaattcatcatacattcccctgatttcgaagctgccaagttttgggttggcaacatgggcaagacagccactcacgcggtggtgtttgctaagctgtgtgtgccaggggaccagtgccatgggctgcatccctttatcgtgcagatccgggacccgaagacccttcttcccatgcctggagtgatggttggcgacataggaaaaaaactcgggcagaacggtctggataatggtttcgccatgttccacaaggtcagagttcctcgccagagccttctgaaccggatgggagacgtcacccccgagggcacctatgtcagcccctttaaggacgtcaggcagcgctttggagcgtccctggggagcctgtcctcgggccgggtctccatcgtgagcctggccatccttaacctaaagctggccgtggccatcgctcttcgcttctcagccactcggcgtcagtttggacccacagaggaggaggaaataccagtgcttgagtatccaatgcagcaatggcgcttgcttccatatctggcagctgtctacgccttagaccatttctccaagtcgctcttcctggacctggtggagctccagcgaggacttgcatcgggagaccgcagcgccagacaggcagagcttggacgtgagatccacgccctggcatcggccagcaagcccctggcctcgtggaccacccagcaaggaattcaggaatgccgggaggcgtgtggaggacacggctatctggccatgaaccggttgggtgtccttagagatgacaacgatcccaactgcacatacgaaggtgacaacaacatcctgctgcagcagacaagcaactatttgctgggtctcctggcacaccaggtccacgatggagcttgcttccgcagtccgctgaagtcagtggactttctggacgcctatcccggcatccttgaccagaagtttgaggtctccagtgttgccgactgcttggactctgcagtcgccctggcagcatacaagtggctggtttgctacctgctccgagagacttatcaaaaattaaaccaagagaaaagatcaggaagcagtgactttgaagcaaggaacaaatgccaggtgtcccacggccgtccgttggcgctggccttcgtggagctcacggtggtccagaggttccacgagcacgtgcaccagccttccgtgccgccctcgctgcgggccgtgctggggcggctcagtgctctgtacgccctgtggtccctgagccgccacgcggccctgctctaccgaggaggatacttctccggtgagcaggcgggagaagtgttggagagcgccgtcctggctttgtgttcccagctgaaagacgatgcagttgccctggtagacgtgatcgctcctcctgactttgttctggactcaccgattggcagagccgacggcgagctctacaaaaacctctggggcgctgtcctgcaggaaagcaaggtgttggagcgggcatcctggtggccagagttttctgtgaacaaacctgtcataggaagtctgaaatcgaagctctag

SEQ ID NO: 830 - DNA, 6357 bp, Homo sapiens
  source 1..6357: mol_type = unassigned DNA
aaaccacaaagaaaaggaaagttttaattctgagaaacttcactgaggagcaattttttttgagcttctaaaaatagagaggaaatgagcctctttgggtcactctagttgccgcctcccctgccccatgcccacccccactgctcactcaaggctagcctctctcagtgggtgactgagctgtcttcagtggaagcccgaggcagatgccacgcaattctggagctggatacggctgcccacacggggaccccagcatgctggacagcagagagaccccacaggagagccggcaggacatgattgtgaggaccacccaagaaaaattgaaaaccagctcactgactgacaggcagccactctccaaagagtccctgaaccatgctctcgagctctcagtgccagagaaggtgaataatgcccagtgggatgctccagaggaggcgctgtggacgactcgggccgatgggcgggtgcgcctgcgcatagaccccagctgcccacagcttccctacactgtgcatcggatgttctacgaggccctggataagtatggggacctcatcgctttgggcttcaagcgccaggacaagtgggaacacatctcctactcccaatactacctgctcgcccgcagagccgccaagggcttcctgaagctcggcctgaagcaggcccacagtgtggccatcctcggcttcaactccccggagtggttcttctcggcagtgggcacagtatttgcaggtggcatcgtcactggcatctacaccaccagctccccagaggcctgccagtacatcgcttatgactgctgcgccaatgtcatcatggtcgacacgcagaagcagctggaaaagatcctgaagatctggaaacagttgccacatctaaaggcagtcgtgatatataaagaacctcctccaaacaagatggccaatgtgtacacgatggaggaattcatggagctggggaatgaagtgcctgaggaagccctggacgccatcattgacacccagcagcccaaccagtgctgtgtgctagtctacacttccggcaccactgggaaccccaagggcgtgatgctgagtcaagacaatatcacgtggacggcacggtacggcagccaggccggtgacatccggccggcagaagtccagcaggaggtggtagtcagctacctgcccctcagccatattgccgcccagatctacgacctgtggacaggcatccagtggggggcccaggtttgctttgccgaacccgacgccctgaaggggagcctggtgaacacgctgcgggaggtggagcccacatcacacatgggggtgccccgggtatgggagaagatcatggagcgcatccaggaggtggcggctcagtctggcttcatccggcgaaagatgctgctgtgggccatgtcggtgaccttggagcagaacctcacctgccccggcagcgacctgaagcccttcacaaccagactggcagattacctggtgctagccaaggttcgccaggcactgggatttgccaagtgtcaaaagaacttctatggagcggcccccatgatggcagagacacagcacttcttcctgggtctcaacatccgcttgtatgcgggctacggcctcagtgagacctcaggcccccacttcatgtccagtccctacaactaccggctgtacagctcaggcaagttggtgcccggctgtcgggtgaagctggtgaaccaggacgcagagggcattggcgagatctgcctgtggggccgcaccatattcatgggctacctgaacatggaggacaagacttgtgaggccatcgacgaggaaggctggctgcacacgggtgatgctggccgcctggacgccgatggcttcctctacatcactgggcgcctcaaagaattaatcatcacagctggtggggagaatgtgccccctgtgcccatcgaggaggccgtgaagatggagctgcccatcatcagcaacgccatgctcattggggaccagaggaagttcctgtccatgctgctcaccttgaagtgcactctggacccagacacctctgaccagactgataatctgactgaacaagctatggagttctgccagagggtgggcagcagagccaccacagtgtccgagatcatagagaagaaggatgaggccgtgtaccaggccatcgaagaggggatccggagggtcaacatgaacgcggcggcccggccctaccacatccagaagtgggccattctcgagagagacttctccatttcgggtggagagttgggtcccacgatgaaactgaaacggctcacagttttggagaagtacaaaggtatcattgactccttttaccaagagcaaaaaatgtaatcagggcctatgcctgcagtttctatagaatagagggcaggcgttccgagcctcttcctgagccccaggtctcttcagtctgggcacaggcatttctgccaagtctgttagatctccaggtcagggcacagcactggctctacatttaccaggtcttacgccaacaatagctgacaattccaagaagcttcacgtgtgggtagttttaattcagtttaagtattgctttttgttcaggtgacaaatgagatcagctctccttccagaacgaaagggctgataatttttggccttagttccaggtagattaaaaagctgctagctcacatacaggacagccagcagtaggctgtggagcgggtaggagagagatggctgatactgctcacgtgcgctgcaggaaaagcaatcagtcacaactcacctagcgacctgacttactctggaatcttggcgggcatcgccgaccctattattccattaccaggcactccgccacccacatgccaactgacttgatgcttaataaaactgctgctgcctgtttgattctatttaatgtataatttgaatattaaaccttttaacagaactgtcaacaaggacctgattttttttgtcaattgagcaggtgggaccagtgcagagagtagtgggcatttaactcacaggactgtgcacagcgggcatgcgagtgaccattagtgccctggaataaacaaaggtgcaggatggggtcaagtggcgcattctcataaaagcagccagctctacgttagcctgtcgccaccagaccaccccacttccattctgaatacgggaagcagccattctcagtagcaagctgagccaaaatgaccgaaggcatctgaacaggaaacaggtagagaaagcaaacatctcagttttggaattctttattactttgaacccaagagccactgataactggcacaatccaatgaaacagaggaagcagcagcttaaacaaaggaaaatacatttaagattataagtctgggggggcggttacaagcttaaaaagtgacccagacagggatatcattgctaaaaaaaaaaaaatccccttgtgacctgggtacattttgcaaagccacaggtttgcaatgttacacaagggccaaaggaggccatgagttgtctttggttgtggggacagagggtaactgttcatgaaaatagtgagtgtctgaagattaagaaaatcatgctgcagcagaggagaagggagaggaagacaggaagggaaaggagatgcctgagggtcaaaagctgagcccaagcctaagcccaagctcaagctcaagccccagcatggcataattttgtgaattaactcaggctgagttgcctccagtctttggaatgtcatcttatactggtactgctgaggcagagggcagtaattggtgctttgggataggagaaggggcagttgctgaaatacaaaattaatagcatcccaagttcctcaattgcagccaaaatacatgtgttcgggcctttcggcagtatcgcccccagaactacctgctgtagtgtggtccattcccagacagcaacatgcaagaataagtttacaatacactcagcccttctggcttcagatcaggggctcagaggctgtgacaactcatgatgctgaaaatgtatccagtgaaaatgaagtactagctctctgcttcattaaaagctcttggaaagaatattaaatctcaagacaacaaaataattgaacacacaatacatttgtgtctttgtatccaatatattacctttgtcttattaacaaaaattatatctctcattatatatttcttggatctgaagtttttattcacactcagtaatttctgtaaaggacaaatctgtctctattttccatatcatttagaaatataccacattcactctttttgatgtgaactttcccaggaaaattctcttgtgcccatttagttttagaagagtgtcattttgtgctattatgtcaatatcctgttttatttccattatgtttttcaaaaaccgaagaaaataaggtttttcttaaaaagttagacattttctcttgttaattctgtatcctgttatttacagctgaagagaaactattttaacttaagtgtaaaatggtttagaatagcaaatgatacagtccactcagagtttacaaaaaaaacatttaccaggtagacacttaataaataaaacaagcacttggaaaaagttctttgaaaacagacctagggacatccacctgcatcttttgcacagattttgttaagaaaaggccagatctaaaaatgtactgtcaagaaacaagcaaaccaatgcatacatacgtaggtattctaaacagaggttcatgtggtgtccatttagagtgactgatgtaaatgccagttgtagaagtgttaatctaaatcttttactcggcgacagatttcctctgtgaagtctgagcattttgcattgcctcccaaatcttttgtcaagctctgagaaaaggaaaaagcaaaaataaaagatgtatccgcaaactaaactaaaccaaggagattttaaagccctcagtgagatgccacctgggcaagttactcggctgctctttcatttagttcctcatttcaaagtgaggaaccactccaccaccatctacccagcccaggaggatcgggatccaatctcatagtgtatacaacagcactctgcaaagaataaggtgctcttgatgcaaagggaggcagggagctttaccaaaattttccctttgttcacacaatagaccctaacccagattagttggtcatggatatttaaataaaagcgaatctaaataagaagtttcataaaaatccttgggaaatatgtctcaggaatagacctgagacatattttgatctatttttgtttttattattattttttttttagatggagtctcactctgttgcccaggctggagtgcagtggcacgatcccagctcaccacaacctctgcctcctgggttcaagcgattctcctgcctcagcgtcctgaatagctggaattacaagtgcatgccaccatacccaactaatttttgtatctgatctatttttggaggctgggacacaaatacgaaagaaatatttaaatcattaactcttttttttttttttaagagacggggtctcactatgtggcccaggctggtcttgaactcagaggctaaggtgatcctcctgcctcagcctatagctgcaactacaggcatgcaccaccacacctgcctaaatcattaactcttaaacctccctctttaggaaagaaagcctcccatacaactgatctgttctaccagcttatcctttctttcctgcatacagaccccaatatatttaattctctttatctttccatcctacacaataaaagggcccactatgtaattcaggcacctctctactgggctgtagattataacttcccaaatataactttaaagaataagaaaatcatatgacctccaatgtgactatcaggctgttaaaaacaagcctgaatttcttgtattttggccacacgatataatttcaaattacagaatttttttaaaagaagggaccaactttgaagatattacgctaagtgaaataagccagactcaaaggacaaatactgtatgattccacttacatgaggtacctagagtagtcaaattcatagagacaggaagcagaatggcaggtgtcagaggatgggagggggaagggaaagttactgtttaacgggtgcagagtctcagtttgagaaaatgaaactggtctggagatgactgatggtgatggttacattacaatgtgaatgtacttaacattattgaactgtatacctaaatacggctaaaatggcaaattttatgttatgcatatttttcacaatttttgttaaaaaggacctcaaattagg

SEQ ID NO: 831 - DNA, 2257 bp, Homo sapiens
  source 1..2257: mol_type = unassigned DNA
gtcttcagtggaagcccgaggcagatgccacgcaattctggagctggatacggctgcccacacggggaccccagcatgctggacagcagagagaccccacaggagagccggcaggacatgattgtgaggaccacccaagaaaaattgaaaaccagatctggaaacagttgccacatctaaaggcagtcgtgatatataaagaacctcctccaaacaagatggccaatgtgtacacgatggaggaattcatggagctggggaatgaagtgcctgaggaagccctggacgccatcattgacacccagcagcccaaccagtgctgtgtgctagtctacacttccggcaccactgggaaccccaagggcgtgatgctgagtcaagacaatatcacgtggacggcacggtacggcagccaggccggtgacatccggccggcagaagtccagcaggaggtggtagtcagctacctgcccctcagccatattgccgcccagatctacgacctgtggacaggcatccagtggggggcccaggtttgctttgccgaacccgacgccctgaaggggagcctggtgaacacgctgcgggaggtggagcccacatcacacatgggggtgccccgggtatgggagaagatcatggagcgcatccaggaggtggcggctcagtctggcttcatccggcgaaagatgctgctgtgggccatgtcggtgaccttggagcagaacctcacctgccccggcagcgacctgaagcccttcacaaccagactggcagattacctggtgctagccaaggttcgccaggcactgggatttgccaagtgtcaaaagaacttctatggagcggcccccatgatggcagagacacagcacttcttcctgggtctcaacatccgcttgtatgcgggctacggcctcagtgagacctcaggcccccacttcatgtccagtccctacaactaccggctgtacagctcaggcaagttggtgcccggctgtcgggtgaagctggtgaaccaggacgcagagggcattggcgagatctgcctgtggggccgcaccatattcatgggctacctgaacatggaggacaagacttgtgaggccatcgacgaggaaggctggctgcacacgggtgatgctggccgcctggacgccgatggcttcctctacatcactgggcgcctcaaagaattaatcatcacagctggtggggagaatgtgccccctgtgcccatcgaggaggccgtgaagatggagctgcccatcatcagcaacgccatgctcattggggaccagaggaagttcctgtccatgctgctcaccttgaagtgcactctggacccagacacctctgaccagactgataatctgactgaacaagctatggagttctgccagagggtgggcagcagagccaccacagtgtccgagatcatagagaagaaggatgaggccgtgtaccaggccatcgaagaggggatccggagggtcaacatgaacgcggcggcccggccctaccacatccagaagtgggccattctcgagagagacttctccatttcgggtggagagttgggtcccacgatgaaactgaaacggctcacagttttggagaagtacaaaggtatcattgactccttttaccaagagcaaaaaatgtaatcagggcctatgcctgcagtttctatagaatagagggcaggcgttccgagcctcttcctgagccccaggtctcttcagtctgggcacaggcatttctgccaagtctgttagatctccaggtcagggcacagcactggctctacatttaccaggtcttacgccaacaatagctgacaattccaagaagcttcacgtgtgggtagttttaattcagtttaagtattgctttttgttcaggtgacaaatgagatcagctctccttccagaacgaaagggctgataatttttggccttagttccaggtagattaaaaagctgctagctcacatacaggacagccagcagtaggctgtggagcgggtaggagagagatggctgatactgctcacgtgcgctgcaggaaaagcaatcagtcacaactcacctagcgacctgacttactctggaatcttggcgggcatcgccgaccctattattccattaccaggcactccgccacccacatgccaactgacttgatgcttaataaaactgctgctgcctgtttgattctatttaatgtataatttgaatattaaaccttttaacag

SEQ ID NO: 832 - DNA, 2712 bp, Homo sapiens
  source 1..2712: mol_type = unassigned DNA
ccacccatcctcctgcctcccaccaccaccatcatcctggctggacggagagggtgacgggggctgggaaggggcagctcatgttcaggtttccaggaggggctacctgttgactgtctttgcaggaagaagaaaacacctgagtgaccagatgtcccagctccaggtgccttgccagatggccagaaccacacctcttgaagagtgacagtgctgtggagcatggtttctgcacacctggaatgactggaaccccaaagactcaagaaggagctaaagatcttgaagtagacatgaataaaacagaagttactcccaggctgtggaccacctgtcgagatggagaagtccttctgaggctatccaaacacggaccaggccatgagaccccgatgaccatccctgaattttttcgagagtcagtcaaccgatttggaacttatccagccctcgcatccaagaatggcaaaaagtgggaaattctgaatttcaaccagtactatgaggcttgtcggaaggctgcaaaatccttgatcaagctgggtttggagcgtttccacggagttggtatcctggggtttaactctgcagagtggtttatcactgctgttggtgccatcctagccgggggtctttgtgttggtatttatgccaccaactctgccgaggtttgtcaatatgtcatcactcatgccaaagtgaacatcttgctggttgagaatgatcaacagttacagaaaatcctttcgattccacagagcagcctagagcccctaaaagcgatcatccagtacagactgccaatgaagaagaacaacaacttgtactcttgggatgatttcatggaacttggcagaagtatccctgacacccaactggagcaggtcatcgagagccagaaggcgaatcaatgcgcagtgctcatctacacttcagggaccacaggcatacccaagggagtgatgctcagtcatgacaacatcacgtggattgcaggagcagtgacaaaggactttaaactgacagacaagcatgagacggtggttagctacctcccactcagccatattgcagcacagatgatggacatctgggtacccataaagattggggcgctcacatactttgctcaagcagatgctctcaagggcaccttggtaagtactctaaaggaggtaaaacctactgtcttcattggagtgcctcaaatttgggagaagatacatgagatggtgaagaaaaatagtgccaagtccatgggcttgaagaagaaggcattcgtgtgggcaagaaacattggcttcaaggtcaactcaaaaaagatgttggggaaatataatactcccgtgagctaccgcatggctaagactctcgtgttcagcaaagtcaagacatcccttggcttggatcactgtcactcttttatcagtgggactgcgcccctcaaccaagagactgccgagttctttctaagcttggacatacctataggcgagttgtatgggttgagtgagagctcgggaccccacacgatatccaaccagaataactacaggcttctaagctgtggcaagatcttgactgggtgtaagaatatgctgttccagcagaacaaggatggcattggggagatctgcctctggggtaggcacatcttcatgggctatctggaaagtgagactgaaactacagaggccatcgatgatgaaggctggctacactctggggatctgggccagctggacggtctgggtttcctctatgtcaccggccacatcaaagaaatccttatcactgctggtggtgaaaatgtgccccccattcctgttgagaccttggttaagaagaagatccccatcatcagtaacgccatgttagtaggagataaactgaagtttctgagcatgttgctgacgctgaagtgtgagatgaatcagatgagcggagaacctctggacaagctgaacttcgaggccatcaacttctgtcggggtctgggcagccaggcatccaccgtgactgagattgtgaagcagcaagaccccctggtctacaaggccatccagcaaggcatcaatgctgtgaaccaggaagccatgaacaatgcacagaggattgaaaagtgggtcatcttggagaaggacttttccatctatggtggagagctaggtccaatgatgaaacttaagagacattttgtagcccagaaatacaaaaaacaaattgatcacatgtaccactgactgctttgatggagctgctctcagctgttctgatgccttcagcaggaagacctcattgcaataagtgaaatgctgctctaggtagaagctctccctgctgtttttaagaagccacattcctcattggtcagtttcttgattgttcgtctgttggagaggtgctccctagaagaacctgccatacgtttcaaagcaataaaatcactgtatatctttctaaggaccttcaagtcatgactccagggaagcctattgggaagtctactaaaaactgcctgatttacaagaaagacctgaacttgtgggctcccatttgatttttttctcctcaggggactcagacattagaaagaaaaagcctcacagatttgaagaactggacccccaaatcaactcacctgcctggaagcaactgggaaacccttccaataagtcctgataataaagcacttcagggtcccatgtcttg

SEQ ID NO: 833 - DNA, 2235 bp, Homo sapiens
  source 1..2235: mol_type = unassigned DNA
ataggcagaggccaccctccccgcctccccgcccgctgcgcgcccgccccgccccggctcactttaaaagtttactcgggccgggacgcagggcaaagcgagccatggctgtctacgtcgggatgctgcgcctggggaggctgtgcgccgggagctcgggggtgctgggggcccgggccgccctctctcggagttggcaggaagccaggttgcagggtgtccgcttcctcagttccagagaggtggatcgcatggtctccacgcccatcggaggcctcagctacgttcaggggtgcaccaaaaagcatcttaacagcaagactgtgggccagtgcctggagaccacagcacagagggtcccagaacgagaggccttggtcgtcctccatgaagacgtcaggttgacctttgcccaactcaaggaggaggtggacaaagctgcttctggcctcctgagcattggcctctgcaaaggtgaccggctgggcatgtggggacctaactcctatgcatgggtgctcatgcagttggccaccgcccaggcgggcatcattctggtgtctgtgaacccagcctaccaggctatggaactggagtatgtcctcaagaaggtgggctgcaaggcccttgtgttccccaagcaattcaagacccagcaatactacaacgtcctgaagcagatctgtccagaagtggagaatgcccagccaggggccttgaagagtcagaggctcccagatctgaccacagtcatctcggtggatgcccctttgccggggaccctgctcctggatgaagtggtggcggctggcagcacacggcagcatctggaccagctccaatacaaccagcagttcctgtcctgccatgaccccatcaacatccagttcacctcggggacaacaggcagccccaagggggccaccctctcccactacaacattgtcaacaactccaacattttaggagagcgcctgaaactgcatgagaagacaccagagcagttgcggatgatcctgcccaaccccctgtaccattgcctgggttccgtggcaggcacaatgatgtgtctgatgtacggtgccaccctcatcctggcctctcccatcttcaatggcaagaaggcactggaggccatcagcagagagagaggcaccttcctgtatggtacccccacgatgttcgtggacattctgaaccagccagacttctccagttatgacatctcgaccatgtgtggaggtgtcattgctgggtcccctgcacctccagagttgatccgagccatcatcaacaagataaatatgaaggacctggtggttgcttatggaaccacagagaacagtcccgtgacattcgcgcacttccctgaggacactgtggagcagaaggcagaaagcgtgggcagaattatgcctcacacggaggcccggatcatgaacatggaggcagggacgctggcaaagctgaacacgcccggggagctgtgcatccgagggtactgcgtcatgctgggctactggggtgagcctcagaagacagaggaagcagtggatcaggacaagtggtattggacaggagatgtcgccacaatgaatgagcagggcttctgcaagatcgtgggccgctctaaggatatgatcatccggggtggtgagaacatctaccccgcagagctcgaggacttctttcacacacacccgaaggtgcaggaagtgcaggtggtgggagtgaaggacgatcggatgggggaagagatttgtgcctgcattcggctgaaggacggggaggagaccacggtggaggagataaaagctttctgcaaagggaagatctctcacttcaagattccgaagtacatcgtgtttgtcacaaactaccccctcaccatttcaggaaagatccagaaattcaaacttcgagagcagatggaacgacatctaaatctgtgaataaagcagcaggcctgtcctggccggttggcttgactctctcctgtcagaatgcaacctggctttatgcacctagatgtccccagcacccagttctgagccaggcacatcaaatgtcaaggaattgactgaacgaactaagagctcctggatgggtccgggaactcgcctgggcacaaggtgccaaaaggcaggcagcctgcccaggccctccctcctgtccatcccccacattcccctgtctgtccttgtgatttggcataaagagcttctgttttctttg

SEQ ID NO: 834 - DNA, 2251 bp, Homo sapiens
  source 1..2251: mol_type = unassigned DNA
ctttaaaagtttactcgggccgggacgcagggcaaagcgagccatggctgtctacgtcgggatgctgcgcctggggaggctgtgcgccgggagctcgggggtgctgggggcccgggccgccctctctcggagttggcaggaagccaggttgcagggtgtccgcttcctcagtgcaaggggtgggatggaagctggcaggcagaggatttcagttcccagtagcttcactgcctctgcagcagcacattccagagaggtggatcgcatggtctccacgcccatcggaggcctcagctacgttcaggggtgcaccaaaaagcatcttaacagcaagactgtgggccagtgcctggagaccacagcacagagggtcccagaacgagaggccttggtcgtcctccatgaagacgtcaggttgacctttgcccaactcaaggaggaggtggacaaagctgcttctggcctcctgagcattggcctctgcaaaggtgaccggctgggcatgtggggacctaactcctatgcatgggtgctcatgcagttggccaccgcccaggcgggcatcattctggtgtctgtgaacccagcctaccaggctatggaactggagtatgtcctcaagaaggtgggctgcaaggcccttgtgttccccaagcaattcaagacccagcaatactacaacgtcctgaagcagatctgtccagaagtggagaatgcccagccaggggccttgaagagtcagaggctcccagatctgaccacagtcatctcggtggatgcccctttgccggggaccctgctcctggatgaagtggtggcggctggcagcacacggcagcatctggaccagctccaatacaaccagcagttcctgtcctgccatgaccccatcaacatccagttcacctcggggacaacaggcagccccaagggggccaccctctcccactacaacattgtcaacaactccaacattttaggagagcgcctgaaactgcatgagaagacaccagagcagttgcggatgatcctgcccaaccccctgtaccattgcctgggttccgtggcaggcacaatgatgtgtctgatgtacggtgccaccctcatcctggcctctcccatcttcaatggcaagaaggcactggaggccatcagcagagagagaggcaccttcctgtatggtacccccacgatgttcgtggacattctgaaccagccagacttctccagttatgacatctcgaccatgtgtggaggtgtcattgctgggtcccctgcacctccagagttgatccgagccatcatcaacaagataaatatgaaggacctggtggttgcttatggaaccacagagaacagtcccgtgacattcgcgcacttccctgaggacactgtggagcagaaggcagaaagcgtgggcagaattatgcctcacacggaggcccggatcatgaacatggaggcagggacgctggcaaagctgaacacgcccggggagctgtgcatccgagggtactgcgtcatgctgggctactggggtgagcctcagaagacagaggaagcagtggatcaggacaagtggtattggacaggagatgtcgccacaatgaatgagcagggcttctgcaagatcgtgggccgctctaaggatatgatcatccggggtggtgagaacatctaccccgcagagctcgaggacttctttcacacacacccgaaggtgcaggaagtgcaggtggtgggagtgaaggacgatcggatgggggaagagatttgtgcctgcattcggctgaaggacggggaggagaccacggtggaggagataaaagctttctgcaaagggaagatctctcacttcaagattccgaagtacatcgtgtttgtcacaaactaccccctcaccatttcaggaaagatccagaaattcaaacttcgagagcagatggaacgacatctaaatctgtgaataaagcagcaggcctgtcctggccggttggcttgactctctcctgtcagaatgcaacctggctttatgcacctagatgtccccagcacccagttctgagccaggcacatcaaatgtcaaggaattgactgaacgaactaagagctcctggatgggtccgggaactcgcctgggcacaaggtgccaaaaggcaggcagcctgcccaggccctccctcctgtccatcccccacattcccctgtctgtccttgtgatttggcataaagagcttctgttttctttggc

SEQ ID NO: 835 - DNA, 2098 bp, Homo sapiens
  source 1..2098: mol_type = unassigned DNA
aaagcgagccatggctgtctacgtcgggatgctgcgcctggggaggctgtgcgccgggagctcgggggtgctgggggcccgggccgccctctctcggagttggcaggaagccaggttgcagggtgtccgcttcctcagttccagagaggtggatcgcatggtctccacgcccatcggaggcctcagctacgttcaggggtgcaccaaaaagcatcttaacagcaagactgtgggccagtgcctggagaccacagcacagagggtcccagaacgagaggccttggtcgtcctccatgaagacgtcaggttgacctttgcccaactcaaggaggaggtggacaaagctgcttctggcctcctgagcattggcctctgcaaaggtgaccggctgggcatgtggggacctaactcctatgcatgggtgctcatgcagttggccaccgcccaggctatggaactggagtatgtcctcaagaaggtgggctgcaaggcccttgtgttccccaagcaattcaagacccagcaatactacaacgtcctgaagcagatctgtccagaagtggagaatgcccagccaggggccttgaagagtcagaggctcccagatctgaccacagtcatctcggtggatgcccctttgccggggaccctgctcctggatgaagtggtggcggctggcagcacacggcagcatctggaccagctccaatacaaccagcagttcctgtcctgccatgaccccatcaacatccagttcacctcggggacaacaggcagccccaagggggccaccctctcccactacaacattgtcaacaactccaacattttaggagagcgcctgaaactgcatgagaagacaccagagcagttgcggatgatcctgcccaaccccctgtaccattgcctgggttccgtggcaggcacaatgatgtgtctgatgtacggtgccaccctcatcctggcctctcccatcttcaatggcaagaaggcactggaggccatcagcagagagagaggcaccttcctgtatggtacccccacgatgttcgtggacattctgaaccagccagacttctccagttatgacatctcgaccatgtgtggaggtgtcattgctgggtcccctgcacctccagagttgatccgagccatcatcaacaagataaatatgaaggacctggtggttgcttatggaaccacagagaacagtcccgtgacattcgcgcacttccctgaggacactgtggagcagaaggcagaaagcgtgggcagaattatgcctcacacggaggcccggatcatgaacatggaggcagggacgctggcaaagctgaacacgcccggggagctgtgcatccgagggtactgcgtcatgctgggctactggggtgagcctcagaagacagaggaagcagtggatcaggacaagtggtattggacaggagatgtcgccacaatgaatgagcagggcttctgcaagatcgtgggccgctctaaggatatgatcatccggggtggtgagaacatctaccccgcagagctcgaggacttctttcacacacacccgaaggtgcaggaagtgcaggtggtgggagtgaaggacgatcggatgggggaagagatttgtgcctgcattcggctgaaggacggggaggagaccacggtggaggagataaaagctttctgcaaagggaagatctctcacttcaagattccgaagtacatcgtgtttgtcacaaactaccccctcaccatttcaggaaagatccagaaattcaaacttcgagagcagatggaacgacatctaaatctgtgaataaagcagcaggcctgtcctggccggttggcttgactctctcctgtcagaatgcaacctggctttatgcacctagatgtccccagcacccagttctgagccaggcacatcaaatgtcaaggaattgactgaacgaactaagagctcctggatgggtccgggaactcgcctgggcacaaggtgccaaaaggcaggcagcctgcccaggccctccctcctgtccatcccccacattcccctgtctgtccttgtgatttggcataaagagcttctgttttc

SEQ ID NO: 836 - DNA, 1881 bp, Homo sapiens
  source 1..1881: mol_type = unassigned DNA
actttaaaagtttactcgggccgggacgcagggcaaagcgagccatggctgtctacgtcgggatgctgcgcctggggaggctgtgcgccgggagctcgggggtgctgggggcccgggccgccctctctcggagttggcaggaagccaggttgcagggtgtccgcttcctcagttccagagaggtggatcgcatggtctccacgcccatcggaggcctcagctacgttcaggggtgcaccaaaaagcatcttaacagcaagactgtgggccagtgcctggagaccacagcacagagggtcccagaacgagaggccttggtcgtcctccatgaagacgtcaggttgacctttgcccaactcaaggaggaggtgtctgtgaacccagcctaccaggctatggaactggagtatgtcctcaagaaggtgggctgcaaggcccttgtgttccccaagcaattcaagacccagcaatactacaacgtcctgaagcagatctgtccagaagtggagaatgcccagccaggggccttgaagagtcagaggctcccagatctgaccacagtcatctcggtggatgcccctttgccggggaccctgctcctggatgaagtggtggcggctggcagcacacggcagcatctggaccagctccaatacaaccagcagttcctgtcctgccatgaccccatcaacatccagttcacctcggggacaacaggcagccccaagggggccaccctctcccactacaacattgtcaacaactccaacattttaggagagcgcctgaaactgcatgagaagacaccagagcagttgcggatgatcctgcccaaccccctgtaccattgcctgggttccgtggcaggcacaatgatgtgtctgatgtacggtgccaccctcatcctggcctctcccatcttcaatggcaagaaggcactggaggccatcagcagagagagaggcaccttcctgtatggtacccccacgatgttcgtggacattctgaaccagccagacttctccagttatgacatctcgaccatgtgtggaggtgtcattgctgggtcccctgcacctccagagttgatccgagccatcatcaacaagataaatatgaaggacctggtggttgcttatggaaccacagagaacagtcccgtgacattcgcgcacttccctgaggacactgtggagcagaaggcagaaagcgtgggcagaattatgcctcacacggaggcccggatcatgaacatggaggcagggacgctggcaaagctgaacacgcccggggagctgtgcatccgagggtactgcgtcatgctgggctactggggtgagcctcagaagacagaggaagcagtggatcaggacaagtggtattggacaggagatgtcgccacaatgaatgagcagggcttctgcaagatcgtgggccgctctaaggatatgatcatccggggtggtgagaacatctaccccgcagagctcgaggacttctttcacacacacccgaaggtgcaggaagtgcaggtggtgggagtgaaggacgatcggatgggggaagagatttgtgcctgcattcggctgaaggacggggaggagaccacggtggaggagataaaagctttctgcaaagggaagatctctcacttcaagattccgaagtacatcgtgtttgtcacaaactaccccctcaccatttcaggaaagatccagaaattcaaacttcgagagcagatggaacgacatctaaatctgtgaataaagcagcaggcctgtcctggccggttggcttgactctctcctgtcagaatgcaacctggctttatgcacctagatgtccccagcacccagttctgagccaggcacatcaaatgtc

SEQ ID NO: 837 - DNA, 1745 bp, Homo sapiens
  source 1..1745: mol_type = unassigned DNA
ataggcagaggccaccctccccgcctccccgcccgctgcgcgcccgccccgccccggctcactttaaaagtttactcgggccgggacgcagggcaaagcgagccatggctgtctacgtcgggatgctgcgcctggggaggctgtgcgccgggagctcgggggtgctgggggcccgggccgccctctctcggagttggcaggaagccaggttgcagggtgtccgcttcctcaggtgtctgtgaacccagcctaccaggctatggaactggagtatgtcctcaagaaggtgggctgcaaggcccttgtgttccccaagcaattcaagacccagcaatactacaacgtcctgaagcagatctgtccagaagtggagaatgcccagccaggggccttgaagagtcagaggctcccagatctgaccacagtcatctcggtggatgcccctttgccggggaccctgctcctggatgaagtggtggcggctggcagcacacggcagcatctggaccagctccaatacaaccagcagttcctgtcctgccatgaccccatcaacatccagttcacctcggggacaacaggcagccccaagggggccaccctctcccactacaacattgtcaacaactccaacattttaggagagcgcctgaaactgcatgagaagacaccagagcagttgcggatgatcctgcccaaccccctgtaccattgcctgggttccgtggcaggcacaatgatgtgtctgatgtacggtgccaccctcatcctggcctctcccatcttcaatggcaagaaggcactggaggccatcagcagagagagaggcaccttcctgtatggtacccccacgatgttcgtggacattctgaaccagccagacttctccagttatgacatctcgaccatgtgtggaggtgtcattgctgggtcccctgcacctccagagttgatccgagccatcatcaacaagataaatatgaaggacctggtggttgcttatggaaccacagagaacagtcccgtgacattcgcgcacttccctgaggacactgtggagcagaaggcagaaagcgtgggcagaattatgcctcacacggaggcccggatcatgaacatggaggcagggacgctggcaaagctgaacacgcccggggagctgtgcatccgagggtactgcgtcatgctgggctactggggtgagcctcagaagacagaggaagcagtggatcaggacaagtggtattggacaggagatgtcgccacaatgaatgagcagggcttctgcaagatcgtgggccgctctaaggatatgatcatccggggtggtgagaacatctaccccgcagagctcgaggacttctttcacacacacccgaaggtgcaggaagtgcaggtggtgggagtgaaggacgatcggatgggggaagagatttgtgcctgcattcggctgaaggacggggaggagaccacggtggaggagataaaagctttctgcaaagggaagatctctcacttcaagattccgaagtacatcgtgtttgtcacaaactaccccctcaccatttcaggaaagatccagaaattcaaacttcgagagcagatggaacgacatctaaatctgtgaataaagcagcaggcctgtcctggccggttggcttgactctctcctgtcagaatgcaacctggctttatgcacctagatgtccccagcacccagttctgagccaggcacatcaaatgtc

SEQ ID NO: 838 - DNA, 3664 bp, Homo sapiens
  source 1..3664: mol_type = unassigned DNA
gggggacgcgcttgggcgacggacgcgccgcgccggggaagctgttgggcgccggaactggtccggcccgactcacgaccccgcgggacccggccggaacccggcccgaccccggcgcgcgcgcggcggaggacgaggaagagttgtggcgaggcagatcctgccccgtggccgcggccgtctcgtgtcccaccggccttccgggttccagcgccaggcctggtgcctgccccaggaggatgagcatttgcattgcctgcaccttatcgtgcccttccacctgctgaagcagctgtgcctgccgctcttgtgaactgcgaacttccccttacctcctctctctggctcgggagctggctcggccgcctgtcagtgcaatgctgccccatgtggtgctcaccttccggcgcctgggctgcgccttggcgtcctgccggctggcgcctgcgagacacagaggaagtggtcttctgcacacagccccagtggcccgctcggacaggagcgccccggtgttcacccgtgccctggcctttggggacagaatcgccctggttgaccagcacggccgccacacgtacagggagctttattcccgcagccttcgcctgtcccaggagatctgcaggctctgcgggtgtgtcggcggggacctccgggaggagagggtctccttcctatgcgctaacgatgcctcctacgtcgtggcccagtgggcgtcatggatgagtggcggtgtggcagtccccctctacaggaagcatcccgcggcccagctggagtatgtcatctgcgactcccagagctctgtggtccttgccagccaggagtacctggagctcctgagcccggtggtcaggaagctgggggtcccgctgctgccgctcacaccagccatctacactggagcagtagaggaaccggcagaggtcccggtcccagagcagggatggaggaacaagggcgccatgatcatctacaccagtgggaccacggggaggcccaagggcgtgctgagcacgcaccaaaacatcagggctgtggtgaccgggctggtccacaagtgggcatggaccaaagacgacgtgatcctccacgtgctcccgctgcaccacgtccatggtgtggtcaacgcgctgctctgtcctctctgggtgggagccacctgtgtgatgatgcctgagttcagccctcagcaggtttgggaaaagttcttaagttctgaaacgccgcggatcaatgtctttatggcagtgcctacaatatacaccaagctgatggagtactacgacaggcattttacccagccgcacgcccaggatttcttgcgtgcagtttgtgaagaaaaaattaggctgatggtctcaggctcagctgccctgcccctcccagtgctggagaagtggaagaacatcacgggccacaccctgctggagcggtatggcatgaccgagatcggcatggctctgtccgggcccctgaccactgccgtgcgcctgccaggttccgtggggaccccactgcctggagtacaggtgcgcattgtctcagaaaacccacagagggaagcctgctcctacaccatccacgcagagggagacgagagggggaccaaggtgaccccagggtttgaagaaaaggagggggagctgctggtgaggggaccctccgtgtttcgagaatactggaataaaccagaagaaactaagagtgcattcaccctggatggctggtttaagacaggggacaccgtggtgtttaaggatggccagtactggatccgaggccggacctcagtggacatcatcaagactggaggctacaaggtcagcgccctggaggtggagtggcacctgctggcccaccccagcatcacagatgtggctgtgattggagttccggatatgacatggggccagcgggtcactgctgtggtgaccctccgagaaggacactcactgtcccacagggagctcaaagagtgggccagaaatgtcctggccccgtacgcggtgccctcggagctggtgctggtggaggagatcccgcggaaccagatgggcaagattgacaagaaggcgctcatcaggcacttccacccctcatgacccggcagactgggactgcgggtctggtggggagcagcagacgtccccttcacaccgagaaccacgggggcccgtccaagacctggcctcccttaaacctgaaccccccaaatcaggtcacgtagaatcaagaactgtttgggatgaaatcaccatgtggggtccccagcctcgggccagttgttgcagctcaaggagaccgtccctggtgtcacctctgcctggtcaccgccgacctcatctgtgcagcgcggtgcagccagcccctggccccacgtgctgaggcacctcccgccccacagtgccctgcagttgccaggctctccagggcaggtcccagaggtttcccacaaaaaacaaagactccactggaggaaacaagcccctgtcccacgccgtctgcacgtgcctgtgcctcacccagagccagtgtctcccggcccacataggaggtctgggcagccacccagggggccctcctgggaggagctgagggttcacaagcctcccagaaccagccctgtcccatgggttccgtgcatttcctggtgctgctcttggaggagagcagctcccactgtggggacacctgccaccctgcacactactgtgtgtccatcagcatgtgtcacagaaagtgcgtggacggatggccccggagctgctctgccgtgaccctgcctcaccccccagcgcagggactttccaggtcatctccacaccagcccctcagccggtgaaccctctctcccatcaccgtctccacccagacccccacctgccccatggcccccatttcatgtctgtggctcaccagcttttccccagacccagctccggagcccacaggcgtggccgatgcagaaacctcaggaaggtgtgttgtgaatgttgggtgcacccacgttgcatttacttagcggggccaattcagatgcacaggggccacatgcagaatccagaagtttctggacaattttcagaagaataggctgcctcctccccacagcctgggggaagtaacagtcatcgcccagcagtgtctggcctgaacttacccagaacattctgcccccggaatgcacgtctgaaagagtggccagaaacgagtgtgccgggcaggaggccagccccatctcaggctcacgtgcctctgacaggagaccagccccatctcaggctcacatgcctcgcggacagttggacgtggcctggggcccctgctcacttgagcatgtcgcccaccaagcttgtctgaggccacagagcagcgtcccagccctgttttccaggactggtgggtgccccagtccacggccctgccccacccgaactcctgcctcacggtgtggccttgtgcatccccatggcctgaccccgggaacagtcagaggaaggggtcccgccctcccgccagaggcctggacccaagggaacggcagtcagagactacagtccagacgtttgtgtctaggccttgctggtagctaaggaaatgccttctgttgggaaaaggtcaaatttaacatagcaaaatttttacttaattccactaa

SEQ ID NO: 839 - DNA, 2247 bp, Homo sapiens
  source 1..2247: mol_type = unassigned DNA
acgaccccgcgggacccggccggaacccggcccgaccccggcgcgcgcgcggcggaggacgaggaagagttgtggcgaggcagatcctgccccgtggccgcggccgtctcgtagctcggccgcctgtcagtgcaatgctgccccatgtggtgctcaccttccggcgcctgggctgcgccttggcgtcctgccggctggcgcctgcgagacacagaggaagtggtcttctgcacacagccccagtggcccgctcggacaggagcgccccggtgttcacccgtgccctggcctttggggacagaatcgccctggttgaccagcacggccgccacacgtacagggagctttattcccgcagccttcgcctgtcccaggagatctgcaggctctgcgggtgtgtcggcggggacctccgggaggagagggtctccttcctatgcgctaacgatgcctcctacgtcgtggcccagtgggcgtcatggatgagtggcggtgtggcagtccccctctacaggaagcatcccgcggcccagctggagtatgtcatctgcgactcccagagctctgtggtccttgccagccaggagtacctggagctcctgagcccggtggtcaggaagctgggggtcccgctgctgccgctcacaccagccatctacactggagcagtagaggaaccggcagaggtcccggtcccagagcagggatggaggaacaagggcgccatgatcatctacaccagtgggaccacggggaggcccaagggcgtgctgagcacgcaccaaaacatcagggctgtggtgaccgggctggtccacaagtgggcatggaccaaagacgacgtgatcctccacgtgctcccgctgcaccacgtccatggtgtggtcaacgcgctgctctgtcctctctgggtgggagccacctgtgtgatgatgcctgagttcagccctcagcaggtttgggaaaagttcttaagttctgaaacgccgcggatcaatgtctttatggcagtgcctacaatatacaccaagctgatggagtactacgacaggcattttacccagccgcacgcccaggatttcttgcgtgcagtttgtgaagaaaaaattaggctgatggtctcaggctcagctgccctgcccctcccagtgctggagaagtggaagaacatcacgggccacaccctgctggagcggtatggcatgaccgagatcggcatggctctgtccgggcccctgaccactgccgtgcgcctgccaggttccgtggggaccccactgcctggagtacaggtgcgcattgtctcagaaaacccacagagggaagcctgctcctacaccatccacgcagagggagacgagagggggaccaaggtgaccccagggtttgaagaaaaggagggggagctgctggtgaggggaccctccgtgtttcgagaatactggaataaaccagaagaaactaagagtgcattcaccctggatggctggtttaagacaggggacaccgtggtgtttaaggatggccagtactggatccgaggccggacctcagtggacatcatcaagactggaggctacaaggtcagcgccctggaggtggagtggcacctgctggcccaccccagcatcacagatgtggctgtgattggagttccggatatgacatggggccagcgggtcactgctgtggtgaccctccgagaaggacactcactgtcccacagggagctcaaagagtgggccagaaatgtcctggccccgtacgcggtgccctcggagctggtgctggtggaggagatcccgcggaaccagatgggcaagattgacaagaaggcgctcatcaggcacttccacccctcatgacccggcagactgggactgcgggtctggtggggagcagcagacgtccccttcacaccgagaaccacgggggcccgtccaagacctggcctcccttaaacctgaaccccccaaatcaggtcacgtagaatcaagaactgtttgggatgaaatcaccatgtggggtccccagcctcgggccagttgttgcagctcaaggagaccgtccctggtgtcacctctgcctggtcaccgccgacctcatctgtgcagcgcggtgcagccagcccctggccccacgtgctgaggcacctcccgccccacagtgccctgcagttgccaggctctccagggcaggtcccagaggtttcccacaaaaaacaaagactccactggaggaaacaag

SEQ ID NO: 840 - DNA, 869 bp, Homo sapiens
  source 1..869: mol_type = unassigned DNA
gggcgccggaactggtccggcccgactcacgaccccgcgggacccggccggaacccggcccgaccccggcgcgcgcgcggcggaggacgaggaagagttgtggcgaggcagatcctgccccgtggccgcggccgtctcctcggccgcctgtcagtgcaatgctgccccatgtggtgctcaccttccggcgcctgggctgcgccttggcgtcctgccggctggcgcctgcgagacacagaggaagtggtcttctgcacacagccccagtggcccgctcggacaggagcgccccggtgttcacccgtgccctggcctttggggacagaatcgccctggttgaccagcacggccgccacacgtacagggagctttattcccgcagccttcgcctgtcccaggagatctgcaggctctgcgggtgtgtcggcggggacctccgggaggagagggtctccttcctatgcgctaacgatgcctcctacgtcgtggcccagtgggcgtcatggatgagtggcggtgtggcagtccccctctacaggaagcatcccgcggcccagctggagtatgtcatctgcgactcccagagctctgtggtccttgccagccaggagtacctggagctcctgagcccggtggtcaggaagctgggggtcccgctgctgccgctcacaccagccatctacactggagcagtagaggaaccggcagaggtcccggtcccagagcagggatggaggaacaagggcgccatgatcatctacaccagtgggaccacggggaggcccaagggcgtgctgagcacgcaccaaaacatcagggctgtggtgaccgggctggtccacaagtgggcatggaccaaagacgacgtg

SEQ ID NO: 841 - DNA, 3832 bp, Homo sapiens
  source 1..3832: mol_type = unassigned DNA
ggggccggcgcggcgagcgcaccagcagcatcctggctcagccgcggcggtggcgggggcgcaaccagcgggccgaggcggcggcgccagcggcgccttaaatagcatccagagccggcgcggggcagggagtgggctgcagtgacagccggcggcggagcggccggtccacggaggagaattcagcttagagaactatcaacacaggacaatgcaagcccatgagctgttccggtattttcgaatgccagagctggttgacttccgacagtacgtgcgtactcttccgaccaacacgcttatgggcttcggagcttttgcagcactcaccaccttctggtacgccacgagacccaaacccctgaagccgccatgcgacctctccatgcagtcagtggaagtggcgggtagtggtggtgcacgaagatccgcactacttgacagcgacgagcccttggtgtatttctatgatgatgtcacaacattatacgaaggtttccagaggggaatacaggtgtcaaataatggcccttgtttaggctctcggaaaccagaccaaccctatgaatggctttcatataaacaggttgcagaattgtcggagtgcataggctcagcactgatccagaagggcttcaagactgccccagatcagttcattggcatctttgctcaaaatagacctgagtgggtgattattgaacaaggatgctttgcttattcgatggtgatcgttccactttatgatacccttggaaatgaagccatcacgtacatagtcaacaaagctgaactctctctggtttttgttgacaagccagagaaggccaaactcttattagagggtgtagaaaataagttaataccaggccttaaaatcatagttgtcatggatgcctacggcagtgaactggtggaacgaggccagaggtgtggggtggaagtcaccagcatgaaggcgatggaggacctgggaagagccaacagacggaagcccaagcctccagcacctgaagatcttgcagtaatttgtttcacaagtggaactacaggcaaccccaaaggagcaatggtcactcaccgaaacatagtgagcgattgttcagcttttgtgaaagcaacagagaatacagtcaatccttgcccagatgatactttgatatctttcttgcctctcgcccatatgtttgagagagttgtagagtgtgtaatgctgtgtcatggagctaaaatcggatttttccaaggagatatcaggctgctcatggatgacctcaaggtgcttcaacccactgtcttccccgtggttccaagactgctgaaccggatgtttgaccgaattttcggacaagcaaacaccacgctgaagcgatggctcttggactttgcctccaagaggaaagaagcagagcttcgcagcggcatcatcagaaacaacagcctgtgggaccggctgatcttccacaaagtacagtcgagcctgggcggaagagtccggctgatggtgacaggagccgccccggtgtctgccactgtgctgacgttcctcagagcagccctgggctgtcagttttatgaaggatacggacagacagagtgcactgccgggtgctgcctgaccatgcctggagactggaccgcaggccatgttggggccccgatgccgtgcaatttgataaaacttgttgatgtggaagaaatgaattacatggctgccgagggcgagggcgaggtgtgtgtgaaagggccaaatgtatttcagggctacttgaaggacccagcgaaaacagcagaagctttggacaaagacggctggttacacacaggggacattggaaaatggttaccaaatggcaccttgaaaattatcgaccggaaaaagcacatatttaagctggcacaaggagaatacatagcccctgaaaagattgaaaatatctacatgcgaagtgagcctgttgctcaggtgtttgtccacggagaaagcctgcaggcatttctcattgcaattgtggtaccagatgttgagacattatgttcctgggcccaaaagagaggatttgaagggtcgtttgaggaactgtgcagaaataaggatgtcaaaaaagctatcctcgaagatatggtgagacttgggaaggattctggtctgaaaccatttgaacaggtcaaaggcatcacattgcaccctgaattattttctatcgacaatggccttctgactccaacaatgaaggcgaaaaggccagagctgcggaactatttcaggtcgcagatagatgacctctattccactatcaaggtttagtgtgaagaagaaagctcagaggaaatggcacagttccacaatctcttctcctgctgatggccttcatgttgttaattttgaatacagcaagtgtagggaaggaagcgttcgtgtttgacttgtccattcggggttcttctcataggaatgctagaggaaagagaacactgccttacagtcacctcatgttgcagaccatgtttatggtaatacacactttccaaaatgagccttaaaaattgtaaaggggatactataaatgtgctaagttatttgagacttcctcagtttaaaaagtgggttttaaatcttctgtctccctgtttctctaatcaaggggttaggactttgctatctctgagatgtctgctacttgctgcaaattctgcagctgtctgctgctctaaagagtacagtgcactagagggaagtgttccctttaaaaataagaacaactgtcctggctggagaatctcacaagcggaccagagatctttttaaatccctgctactgtcccttctcacaggcattcacagaacccttctgattcgtaagggttacgaaactcatgttcttctccagtcccctgtggtttctgttggagcataaggtttccagtaagcgggagggcagatccaactcagaaccatgcagataaggagcctctggcaaatgggtgctcatcagaacgcgtggattctctttcatggcagaatgctcttggactcggttctccaggcctgattccccgactccatcctttttcaggggttatttaaaaatctgccttagattctatagtgaagacaagcatttcaagaaagagttacctggatcagccatgctcagctgtgacgcctgaataactgtctactttatcttcactgaaccactcactctgtgtaaaggccaacagatttttaatgtggttttcatatcaaaagatcatgttgggattaacttgcctttttccccaaaaaataaactctcaggcaagcatttctttaaagctattaagggagtatatacttgagtacttattgaaatggacagtaataagcaaatgttcttataatgctacctgatttctatgaaatgtgtttgacaagccaaaattctaggatgtagaaatctggaaagttcatttcctgggattcacttctccagggattttttaaagttaatttgggaaattaacagcagttcactttattgtgagtctttgccacatttgactgaattgagctgtcatttgtacatttaaagcagctgttttggggtctgtgagagtacatgtattatatacaagcacaacagggcttgcactaaagaattgtcattgtaataacactacttggtagcctaacttcatatatgtattcttaattgcacaaaaagtcaataatttgtcaccttggggttttgaatgtttgctttaagtgttggctatttctatgttttataaaccaaaacaaaatttccaaaaacaatgaaggaaaccaaaataaatatttctgcatttc

SEQ ID NO: 842 - DNA, 2646 bp, Homo sapiens
  source 1..2646: mol_type = unassigned DNA
atttatgtgggtttgtttgagggctgcattcctagtgaagtattccatcaaactgccattattcatcttgatgaaagcttgaggaactttagaaggagagaaacatccagaccacccggtttttggtttctaaatgacatgaagagaatacaatgttaataattcagcttagagaactatcaacacaggacaatgcaagcccatgagctgttccggtattttcgaatgccagagctggttgacttccgacagtacgtgcgtactcttccgaccaacacgcttatgggcttcggagcttttgcagcactcaccaccttctggtacgccacgagacccaaacccctgaagccgccatgcgacctctccatgcagtcagtggaagtggcgggtagtggtggtgcacgaagatccgcactacttgacagcgacgagcccttggtgtatttctatgatgatgtcacaacattatacgaaggtttccagaggggaatacaggtgtcaagatcgctcaggcccctctgtgtccactgtaactttcccagagtcggtcccaaagctcactggaccctctagatgttccctgtggccctgggggctccatggtcaaatatgtgagtgtcacatcctgtattttatgataatggcccttgtttaggctctcggaaaccagaccaaccctatgaatggctttcatataaacaggttgcagaattgtcggagtgcataggctcagcactgatccagaagggcttcaagactgccccagatcagttcattggcatctttgctcaaaatagacctgagtgggtgattattgaacaaggatgctttgcttattcgatggtgatcgttccactttatgatacccttggaaatgaagccatcacgtacatagtcaacaaagctgaactctctctggtttttgttgacaagccagagaaggccaaactcttattagagggtgtagaaaataagttaataccaggccttaaaatcatagttgtcatggatgcctacggcagtgaactggtggaacgaggccagaggtgtggggtggaagtcaccagcatgaaggcgatggaggacctgggaagagccaacagacggaagcccaagcctccagcacctgaagatcttgcagtaatttgtttcacaagtggaactacaggcaaccccaaaggagcaatggtcactcaccgaaacatagtgagcgattgttcagcttttgtgaaagcaacagagaatacagtcaatccttgcccagatgatactttgatatctttcttgcctctcgcccatatgtttgagagagttgtagagtgtgtaatgctgtgtcatggagctaaaatcggatttttccaaggagatatcaggctgctcatggatgacctcaaggtgcttcaacccactgtcttccccgtggttccaagactgctgaaccggatgtttgaccgaattttcggacaagcaaacaccacgctgaagcgatggctcttggactttgcctccaagaggaaagaagcagagcttcgcagcggcatcatcagaaacaacagcctgtgggaccggctgatcttccacaaagtacagtcgagcctgggcggaagagtccggctgatggtgacaggagccgccccggtgtctgccactgtgctgacgttcctcagagcagccctgggctgtcagttttatgaaggatacggacagacagagtgcactgccgggtgctgcctgaccatgcctggagactggaccgcaggccatgttggggccccgatgccgtgcaatttgataaaacttgttgatgtggaagaaatgaattacatggctgccgagggcgagggcgaggtgtgtgtgaaagggccaaatgtatttcagggctacttgaaggacccagcgaaaacagcagaagctttggacaaagacggctggttacacacaggggacattggaaaatggttaccaaatggcaccttgaaaattatcgaccggaaaaagcacatatttaagctggcacaaggagaatacatagcccctgaaaagattgaaaatatctacatgcgaagtgagcctgttgctcaggtgtttgtccacggagaaagcctgcaggcatttctcattgcaattgtggtaccagatgttgagacattatgttcctgggcccaaaagagaggatttgaagggtcgtttgaggaactgtgcagaaataaggatgtcaaaaaagctatcctcgaagatatggtgagacttgggaaggattctggtctgaaaccatttgaacaggtcaaaggcatcacattgcaccctgaattattttctatcgacaatggccttctgactccaacaatgaaggcgaaaaggccagagctgcggaactatttcaggtcgcagatagatgacctctattccactatcaaggtttagtgtgaagaagaaagctcagaggaaatggcacagttccacaatctcttctcctgctgatggccttcatgttgttaattttgaatacagcaagtgtagggaaggaagcgttcgtgtttgacttgtccattcggggttcttctcataggaatgctagaggaaagagaacactgccttacagtcacctcatgttgcagaccatgtttatggtaatacacactttcc

SEQ ID NO: 843 - DNA, 3636 bp, Homo sapiens
  source 1..3636: mol_type = unassigned DNA
gggcggggcggggccgcgggagggcggggccggcgcggcgagcgcaccagcagcatcctggctcagccgcggcggtggcgggggcgcaaccagcgggccgaggcggcggcgccagcggcgccttaaatagcatccagagccggcgcggggcagggagtgggctgcagtgacagccggcggcggagcggccggtccacggaggagggtagtggtggtgcacgaagatccgcactacttgacagcgacgagcccttggtgtatttctatgatgatgtcacaacattatacgaaggtttccagaggggaatacaggtgtcaaataatggcccttgtttaggctctcggaaaccagaccaaccctatgaatggctttcatataaacaggttgcagaattgtcggagtgcataggctcagcactgatccagaagggcttcaagactgccccagatcagttcattggcatctttgctcaaaatagacctgagtgggtgattattgaacaaggatgctttgcttattcgatggtgatcgttccactttatgatacccttggaaatgaagccatcacgtacatagtcaacaaagctgaactctctctggtttttgttgacaagccagagaaggccaaactcttattagagggtgtagaaaataagttaataccaggccttaaaatcatagttgtcatggatgcctacggcagtgaactggtggaacgaggccagaggtgtggggtggaagtcaccagcatgaaggcgatggaggacctgggaagagccaacagacggaagcccaagcctccagcacctgaagatcttgcagtaatttgtttcacaagtggaactacaggcaaccccaaaggagcaatggtcactcaccgaaacatagtgagcgattgttcagcttttgtgaaagcaacagagaatacagtcaatccttgcccagatgatactttgatatctttcttgcctctcgcccatatgtttgagagagttgtagagtgtgtaatgctgtgtcatggagctaaaatcggatttttccaaggagatatcaggctgctcatggatgacctcaaggtgcttcaacccactgtcttccccgtggttccaagactgctgaaccggatgtttgaccgaattttcggacaagcaaacaccacgctgaagcgatggctcttggactttgcctccaagaggaaagaagcagagcttcgcagcggcatcatcagaaacaacagcctgtgggaccggctgatcttccacaaagtacagtcgagcctgggcggaagagtccggctgatggtgacaggagccgccccggtgtctgccactgtgctgacgttcctcagagcagccctgggctgtcagttttatgaaggatacggacagacagagtgcactgccgggtgctgcctgaccatgcctggagactggaccgcaggccatgttggggccccgatgccgtgcaatttgataaaacttgttgatgtggaagaaatgaattacatggctgccgagggcgagggcgaggtgtgtgtgaaagggccaaatgtatttcagggctacttgaaggacccagcgaaaacagcagaagctttggacaaagacggctggttacacacaggggacattggaaaatggttaccaaatggcaccttgaaaattatcgaccggaaaaagcacatatttaagctggcacaaggagaatacatagcccctgaaaagattgaaaatatctacatgcgaagtgagcctgttgctcaggtgtttgtccacggagaaagcctgcaggcatttctcattgcaattgtggtaccagatgttgagacattatgttcctgggcccaaaagagaggatttgaagggtcgtttgaggaactgtgcagaaataaggatgtcaaaaaagctatcctcgaagatatggtgagacttgggaaggattctggtctgaaaccatttgaacaggtcaaaggcatcacattgcaccctgaattattttctatcgacaatggccttctgactccaacaatgaaggcgaaaaggccagagctgcggaactatttcaggtcgcagatagatgacctctattccactatcaaggtttagtgtgaagaagaaagctcagaggaaatggcacagttccacaatctcttctcctgctgatggccttcatgttgttaattttgaatacagcaagtgtagggaaggaagcgttcgtgtttgacttgtccattcggggttcttctcataggaatgctagaggaaagagaacactgccttacagtcacctcatgttgcagaccatgtttatggtaatacacactttccaaaatgagccttaaaaattgtaaaggggatactataaatgtgctaagttatttgagacttcctcagtttaaaaagtgggttttaaatcttctgtctccctgtttctctaatcaaggggttaggactttgctatctctgagatgtctgctacttgctgcaaattctgcagctgtctgctgctctaaagagtacagtgcactagagggaagtgttccctttaaaaataagaacaactgtcctggctggagaatctcacaagcggaccagagatctttttaaatccctgctactgtcccttctcacaggcattcacagaacccttctgattcgtaagggttacgaaactcatgttcttctccagtcccctgtggtttctgttggagcataaggtttccagtaagcgggagggcagatccaactcagaaccatgcagataaggagcctctggcaaatgggtgctcatcagaacgcgtggattctctttcatggcagaatgctcttggactcggttctccaggcctgattccccgactccatcctttttcaggggttatttaaaaatctgccttagattctatagtgaagacaagcatttcaagaaagagttacctggatcagccatgctcagctgtgacgcctgaataactgtctactttatcttcactgaaccactcactctgtgtaaaggccaacagatttttaatgtggttttcatatcaaaagatcatgttgggattaacttgcctttttccccaaaaaataaactctcaggcaagcatttctttaaagctattaagggagtatatacttgagtacttattgaaatggacagtaataagcaaatgttcttataatgctacctgatttctatgaaatgtgtttgacaagccaaaattctaggatgtagaaatctggaaagttcatttcctgggattcacttctccagggattttttaaagttaatttgggaaattaacagcagttcactttattgtgagtctttgccacatttgactgaattgagctgtcatttgtacatttaaagcagctgttttggggtctgtgagagtacatgtattatatacaagcacaacagggcttgcactaaagaattgtcattgtaataacactacttggtagcctaacttcatatatgtattcttaattgcacaaaaagtcaataatttgtcaccttggggttttgaatgtttgctttaagtgttggctatttctatgttttataaaccaaaacaaaatttccaaaaacaatgaaggaaaccaaaataaatatttctgcatttcaggtga

SEQ ID NO: 844 - DNA, 2333 bp, Homo sapiens
  source 1..2333: mol_type = unassigned DNA
gggactgtgttaagaaccaagggcatataaagacagatgggaggagaccctggccggggagaggaagaagcatctacataggtactaagtaccattcgctaattcagcttagagaactatcaacacaggacaatgcaagcccatgagctgttccggtattttcgaatgccagagctggttgacttccgacagtacgtgcgtactcttccgaccaacacgcttatgggcttcggagcttttgcagcactcaccaccttctggtacgccacgagacccaaacccctgaagccgccatgcgacctctccatgcagtcagtggaagtggcgggtagtggtggtgcacgaagatccgcactacttgacagcgacgagcccttggtgtatttctatgatgatgtcacaacattatacgaaggtttccagaggggaatacaggtgtcaaataatggcccttgtttaggctctcggaaaccagaccaaccctatgaatggctttcatataaacaggttgcagaattgtcggagtgcataggctcagcactgatccagaagggcttcaagactgccccagatcagttcattggcatctttgctcaaaatagacctgagtgggtgattattgaacaaggatgctttgcttattcgatggtgatcgttccactttatgatacccttggaaatgaagccatcacgtacatagtcaacaaagctgaactctctctggtttttgttgacaagccagagaaggccaaactcttattagagggtgtagaaaataagttaataccaggccttaaaatcatagttgtcatggatgcctacggcagtgaactggtggaacgaggccagaggtgtggggtggaagtcaccagcatgaaggcgatggaggacctgggaagagccaacagacggaagcccaagcctccagcacctgaagatcttgcagtaatttgtttcacaagtggaactacaggcaaccccaaaggagcaatggtcactcaccgaaacatagtgagcgattgttcagcttttgtgaaagcaacagagaatacagtcaatccttgcccagatgatactttgatatctttcttgcctctcgcccatatgtttgagagagttgtagagtgtgtaatgctgtgtcatggagctaaaatcggatttttccaaggagatatcaggctgctcatggatgacctcaaggtgcttcaacccactgtcttccccgtggttccaagactgctgaaccggatgtttgaccgaattttcggacaagcaaacaccacgctgaagcgatggctcttggactttgcctccaagaggaaagaagcagagcttcgcagcggcatcatcagaaacaacagcctgtgggaccggctgatcttccacaaagtacagtcgagcctgggcggaagagtccggctgatggtgacaggagccgccccggtgtctgccactgtgctgacgttcctcagagcagccctgggctgtcagttttatgaaggatacggacagacagagtgcactgccgggtgctgcctgaccatgcctggagactggaccgcaggccatgttggggccccgatgccgtgcaatttgataaaacttgttgatgtggaagaaatgaattacatggctgccgagggcgagggcgaggtgtgtgtgaaagggccaaatgtatttcagggctacttgaaggacccagcgaaaacagcagaagctttggacaaagacggctggttacacacaggggacattggaaaatggttaccaaatggcaccttgaaaattatcgaccggaaaaagcacatatttaagctggcacaaggagaatacatagcccctgaaaagattgaaaatatctacatgcgaagtgagcctgttgctcaggtgtttgtccacggagaaagcctgcaggcatttctcattgcaattgtggtaccagatgttgagacattatgttcctgggcccaaaagagaggatttgaagggtcgtttgaggaactgtgcagaaataaggatgtcaaaaaagctatcctcgaagatatggtgagacttgggaaggattctggtctgaaaccatttgaacaggtcaaaggcatcacattgcaccctgaattattttctatcgacaatggccttctgactccaacaatgaaggcgaaaaggccagagctgcggaactatttcaggtcgcagatagatgacctctattccactatcaaggtttagtgtgaagaagaaagctcagaggaaatggcacagttccacaatctcttctcctgctgatggccttcatgttgttaattttgaatacagcaagtgtagggaaggaa

SEQ ID NO: 845 - DNA, 2490 bp, Homo sapiens
  source 1..2490: mol_type = unassigned DNA
gcaaccagcgggccgaggcggcggcgccagcggcgccttaaatagcatccagagccggcgcggggcagggagtgggctgcagtgacagccggcggcggagcggccggtccacggaggagaattcagcttagagaactatcaacacaggacaatgcaagcccatgagctgttccggtattttcgaatgccagagctggttgacttccgacagtacgtgcgtactcttccgaccaacacgcttatgggcttcggagcttttgcagcactcaccaccttctggtacgccacgagacccaaacccctgaagccgccatgcgacctctccatgcagtcagtggaagtggcgggtagtggtggtgcacgaagatccgcactacttgacagcgacgagcccttggtgtatttctatgatgatgtcacaacattatacgaaggtttccagaggggaatacaggtgtcaaataatggcccttgtttaggctctcggaaaccagaccaaccctatgaatggctttcatataaacagtgggtgattattgaacaaggatgctttgcttattcgatggtgatcgttccactttatgatacccttggaaatgaagccatcacgtacatagtcaacaaagctgaactctctctggtttttgttgacaagccagagaaggccaaactcttattagagggtgtagaaaataagttaataccaggccttaaaatcatagttgtcatggatgcctacggcagtgaactggtggaacgaggccagaggtgtggggtggaagtcaccagcatgaaggcgatggaggacctgggaagagccaacagacggaagcccaagcctccagcacctgaagatcttgcagtaatttgtttcacaagtggaactacaggcaaccccaaaggagcaatggtcactcaccgaaacatagtgagcgattgttcagcttttgtgaaagcaacagagaatacagtcaatccttgcccagatgatactttgatatctttcttgcctctcgcccatatgtttgagagagttgtagagtgtgtaatgctgtgtcatggagctaaaatcggatttttccaaggagatatcaggctgctcatggatgacctcaaggtgcttcaacccactgtcttccccgtggttccaagactgctgaaccggatgtttgaccgaattttcggacaagcaaacaccacgctgaagcgatggctcttggactttgcctccaagaggaaagaagcagagcttcgcagcggcatcatcagaaacaacagcctgtgggaccggctgatcttccacaaagtacagtcgagcctgggcggaagagtccggctgatggtgacaggagccgccccggtgtctgccactgtgctgacgttcctcagagcagccctgggctgtcagttttatgaaggatacggacagacagagtgcactgccgggtgctgcctgaccatgcctggagactggaccgcaggccatgttggggccccgatgccgtgcaatttgataaaacttgttgatgtggaagaaatgaattacatggctgccgagggcgagggcgaggtgtgtgtgaaagggccaaatgtatttcagggctacttgaaggacccagcgaaaacagcagaagctttggacaaagacggctggttacacacaggggacattggaaaatggttaccaaatggcaccttgaaaattatcgaccggaaaaagcacatatttaagctggcacaaggagaatacatagcccctgaaaagattgaaaatatctacatgcgaagtgagcctgttgctcaggtgtttgtccacggagaaagcctgcaggcatttctcattgcaattgtggtaccagatgttgagacattatgttcctgggcccaaaagagaggatttgaagggtcgtttgaggaactgtgcagaaataaggatgtcaaaaaagctatcctcgaagatatggtgagacttgggaaggattctggtctgaaaccatttgaacaggtcaaaggcatcacattgcaccctgaattattttctatcgacaatggccttctgactccaacaatgaaggcgaaaaggccagagctgcggaactatttcaggtcgcagatagatgacctctattccactatcaaggtttagtgtgaagaagaaagctcagaggaaatggcacagttccacaatctcttctcctgctgatggccttcatgttgttaattttgaatacagcaagtgtagggaaggaagcgttcgtgtttgacttgtccattcggggttcttctcataggaatgctagaggaaagagaacactgccttacagtcacctcatgttgcagaccatgtttatggtaatacacactttccaaaatgagccttaaaaattgtaaaggggatactataaatgtgctaagttatttgagacttcctcagtttaaaaagtgggttttaaatcttctgtctccctgtttctctaatcaaggggttag

SEQ ID NO: 846 - DNA, 3948 bp, Homo sapiens
  source 1..3948: mol_type = unassigned DNA
aaactccacggtaacggggaccaatgttgttagaggttgaggttcctggtaggtcccaggtgctaaaaggaagagcagcctttgggatgtgagcccgaaaaccatcgtgttggcttctgaagccccaagatgggcatggcagggacgcggaagccctcagaaccgcggaagccctcagaaccgcacagcaggtggccgccgtggtgcagcgcgcagtcggccctcagctcccctgcaccggcgcgagctgcgggcgctgcccacgtcaggctctgcagacaccagacagaaaagaattcagcttagagaactatcaacacaggacaatgcaagcccatgagctgttccggtattttcgaatgccagagctggttgacttccgacagtacgtgcgtactcttccgaccaacacgcttatgggcttcggagcttttgcagcactcaccaccttctggtacgccacgagacccaaacccctgaagccgccatgcgacctctccatgcagtcagtggaagtggcgggtagtggtggtgcacgaagatccgcactacttgacagcgacgagcccttggtgtatttctatgatgatgtcacaacattatacgaaggtttccagaggggaatacaggtgtcaaataatggcccttgtttaggctctcggaaaccagaccaaccctatgaatggctttcatataaacaggttgcagaattgtcggagtgcataggctcagcactgatccagaagggcttcaagactgccccagatcagttcattggcatctttgctcaaaatagacctgagtgggtgattattgaacaaggatgctttgcttattcgatggtgatcgttccactttatgatacccttggaaatgaagccatcacgtacatagtcaacaaagctgaactctctctggtttttgttgacaagccagagaaggccaaactcttattagagggtgtagaaaataagttaataccaggccttaaaatcatagttgtcatggatgcctacggcagtgaactggtggaacgaggccagaggtgtggggtggaagtcaccagcatgaaggcgatggaggacctgggaagagccaacagacggaagcccaagcctccagcacctgaagatcttgcagtaatttgtttcacaagtggaactacaggcaaccccaaaggagcaatggtcactcaccgaaacatagtgagcgattgttcagcttttgtgaaagcaacagagaatacagtcaatccttgcccagatgatactttgatatctttcttgcctctcgcccatatgtttgagagagttgtagagtgtgtaatgctgtgtcatggagctaaaatcggatttttccaaggagatatcaggctgctcatggatgacctcaaggtgcttcaacccactgtcttccccgtggttccaagactgctgaaccggatgtttgaccgaattttcggacaagcaaacaccacgctgaagcgatggctcttggactttgcctccaagaggaaagaagcagagcttcgcagcggcatcatcagaaacaacagcctgtgggaccggctgatcttccacaaagtacagtcgagcctgggcggaagagtccggctgatggtgacaggagccgccccggtgtctgccactgtgctgacgttcctcagagcagccctgggctgtcagttttatgaaggatacggacagacagagtgcactgccgggtgctgcctgaccatgcctggagactggaccgcaggccatgttggggccccgatgccgtgcaatttgataaaacttgttgatgtggaagaaatgaattacatggctgccgagggcgagggcgaggtgtgtgtgaaagggccaaatgtatttcagggctacttgaaggacccagcgaaaacagcagaagctttggacaaagacggctggttacacacaggggacattggaaaatggttaccaaatggcaccttgaaaattatcgaccggaaaaagcacatatttaagctggcacaaggagaatacatagcccctgaaaagattgaaaatatctacatgcgaagtgagcctgttgctcaggtgtttgtccacggagaaagcctgcaggcatttctcattgcaattgtggtaccagatgttgagacattatgttcctgggcccaaaagagaggatttgaagggtcgtttgaggaactgtgcagaaataaggatgtcaaaaaagctatcctcgaagatatggtgagacttgggaaggattctggtctgaaaccatttgaacaggtcaaaggcatcacattgcaccctgaattattttctatcgacaatggccttctgactccaacaatgaaggcgaaaaggccagagctgcggaactatttcaggtcgcagatagatgacctctattccactatcaaggtttagtgtgaagaagaaagctcagaggaaatggcacagttccacaatctcttctcctgctgatggccttcatgttgttaattttgaatacagcaagtgtagggaaggaagcgttcgtgtttgacttgtccattcggggttcttctcataggaatgctagaggaaagagaacactgccttacagtcacctcatgttgcagaccatgtttatggtaatacacactttccaaaatgagccttaaaaattgtaaaggggatactataaatgtgctaagttatttgagacttcctcagtttaaaaagtgggttttaaatcttctgtctccctgtttctctaatcaaggggttaggactttgctatctctgagatgtctgctacttgctgcaaattctgcagctgtctgctgctctaaagagtacagtgcactagagggaagtgttccctttaaaaataagaacaactgtcctggctggagaatctcacaagcggaccagagatctttttaaatccctgctactgtcccttctcacaggcattcacagaacccttctgattcgtaagggttacgaaactcatgttcttctccagtcccctgtggtttctgttggagcataaggtttccagtaagcgggagggcagatccaactcagaaccatgcagataaggagcctctggcaaatgggtgctcatcagaacgcgtggattctctttcatggcagaatgctcttggactcggttctccaggcctgattccccgactccatcctttttcaggggttatttaaaaatctgccttagattctatagtgaagacaagcatttcaagaaagagttacctggatcagccatgctcagctgtgacgcctgaataactgtctactttatcttcactgaaccactcactctgtgtaaaggccaacagatttttaatgtggttttcatatcaaaagatcatgttgggattaacttgcctttttccccaaaaaataaactctcaggcaagcatttctttaaagctattaagggagtatatacttgagtacttattgaaatggacagtaataagcaaatgttcttataatgctacctgatttctatgaaatgtgtttgacaagccaaaattctaggatgtagaaatctggaaagttcatttcctgggattcacttctccagggattttttaaagttaatttgggaaattaacagcagttcactttattgtgagtctttgccacatttgactgaattgagctgtcatttgtacatttaaagcagctgttttggggtctgtgagagtacatgtattatatacaagcacaacagggcttgcactaaagaattgtcattgtaataacactacttggtagcctaacttcatatatgtattcttaattgcacaaaaagtcaataatttgtcaccttggggttttgaatgtttgctttaagtgttggctatttctatgttttataaaccaaaacaaaatttccaaaaacaatgaaggaaaccaaaataaatatttctgcatttca

SEQ ID NO: 847 - DNA, 5679 bp, Homo sapiens
  source 1..5679: mol_type = unassigned DNA
agccccgcacgcgccaccgctcgcgggccaatgggtggcagcctctctgcataggcaacgagtgccggccgggggtgagcgtcccaggcggttccgctcaacagacgctgctgtggctgcgccgggctgcgacactgcagttgtctacgcggccggggccgggacgaggaggcgttggacggggtcgcatacgttcgtcccctcgcattgcggccccgacagctgcgccaggatccccgggcggcggcgcggggcgtgaacgctctggggctcagccaggcctgcgcgggcccgaggccggaggaacccggactccggcgtagcggttttgacacaagggcgcatatcttcaaagcacctagtacctcctaccattgtcaactgatacagaattcgttgttgggaaggactggggaaacagctgtaacatttgccaccctcagaagctgctggtcctgtgtcacaccaccttagcctcttgatcgaggaagattctcgctgaagtctgttaattctactttttgagtacttatgaataaccacgtgtcttcaaaaccatctaccatgaagctaaaacataccatcaaccctattcttttatattttatacattttctaatatcactttatactattttaacatacattccgttttattttttctccgagtcaagacaagaaaaatcaaaccgaattaaagcaaagcctgtaaattcaaaacctgattctgcatacagatctgttaatagtttggatggtttggcttcagtattataccctggatgtgatactttagataaagtttttacatatgcaaaaaacaaatttaagaacaaaagactcttgggaacacgtgaagttttaaatgaggaagatgaagtacaaccaaatggaaaaatttttaaaaaggttattcttggacagtataattggctttcctatgaagatgtctttgttcgagcctttaattttggaaatggattacagatgttgggtcagaaaccaaagaccaacatcgccatcttctgtgagaccagggccgagtggatgatagctgcacaggcgtgttttatgtataattttcagcttgttacattatatgccactctaggaggtccagccattgttcatgcattaaatgaaacagaggtgaccaacatcattactagtaaagaactcttacaaacaaagttgaaggatatagtttctttggtcccacgcctgcggcacatcatcactgttgatggaaagccaccgacctggtccgagttccccaagggcatcattgtgcataccatggctgcagtggaggccctgggagccaaggccagcatggaaaaccaacctcatagcaaaccattgccctcagatattgcagtaatcatgtacacaagtggatccacaggacttccaaagggagtcatgatctcacatagtaacattattgctggtataactgggatggcagaaaggattccagaactaggagaggaagatgtctacattggatatttgcctctggcccatgttctagaattaagtgctgagcttgtctgtctttctcacggatgccgcattggttactcttcaccacagactttagcagatcagtcttcaaaaattaaaaaaggaagcaaaggggatacatccatgttgaaaccaacactgatggcagcagttccggaaatcatggatcggatctacaaaaatgtcatgaataaagtcagtgaaatgagtagttttcaacgtaatctgtttattctggcctataattacaaaatggaacagatttcaaaaggacgtaatactccactgtgcgacagctttgttttccggaaagttcgaagcttgctagggggaaatattcgtctcctgttgtgtggtggcgctccactttctgcaaccacgcagcgattcatgaacatctgtttctgctgtcctgttggtcagggatacgggctcactgaatctgctggggctggaacaatttccgaagtgtgggactacaatactggcagagtgggagcaccattagtttgctgtgaaatcaaattaaaaaactgggaggaaggtggatactttaatactgataagccacaccccaggggtgaaattcttattgggggccaaagtgtgacaatggggtactacaaaaatgaagcaaaaacaaaagctgatttctttgaagatgaaaatggacaaaggtggctctgtactggggatattggagagtttgaacccgatggatgcttaaagattattgatcgtaaaaaggaccttgtaaaactacaggcaggggaatatgtttctcttgggaaagtagaggcagctttgaagaatcttccactagtagataacatttgtgcatatgcaaacagttatcattcttatgtcattggatttgttgtgccaaatcaaaaggaactaactgaactagctcgaaagaaaggacttaaagggacttgggaggagctgtgtaacagttgtgaaatggaaaatgaggtacttaaagtgctttccgaagctgctatttcagcaagtctggaaaagtttgaaattccagtaaaaattcgtttgagtcctgaaccgtggacccctgaaactggtctggtgacagatgccttcaagctgaaacgcaaagagcttaaaacacattaccaggcggacattgagcgaatgtatggaagaaaataattattctcttctggcatcagtttgctacagtgagctcagatcaaataggaaaatacttgaaatgcatgtctcaagctgcaaggcaaactccattcctcatattaaactattacttctcatgacgtcaccatttttaactgacaggattagtaaaacattaagacagcaaacttgtgtctgtctcttctttcattttccccgccaccaacttactttaccacctatgactgtacttgtcagtatgagaatttttctgaatcatattggggaagcagtgattttaaaacctcaagtttttaaacatgatttatatgttctgtataatgttcagtttgtaactttttaaaagtttggatgtatagagggataaataggaaatataagaattggttatttgggggcttttttacttactgtatttaaaaatacaagggtattgatatgaaattatgtaaatttcaaatgcttatgaatcaaatcattgttgaacaaaagatttgttgctgtgtaattattgtcttgtatgcatttgagagaaataaatatacccatacttatgttttaagaagttgagatcttgtgaatatatgcctgtcagtgtcttctttatatatttattttttattagaaaaaatgaagtttggttggtgatgcatgaaacaaaatagcaagagagggttatagtttaatagtaagggagataacacagcatgtgtagcaccagttgataattggtctctagtagcttactgtcaaaatgttcaatgaagtcttctgttcatctgttgaaactaggaaaatacccaaacttaaatggaagaattctgaaagagaggatagaatttaaagaacaagagtatataaagttattctttgaatatttcgttgactatatgtacattgagttatctatatttgtaaacaaattagtcatggaaaattattctatctcaaagtctccttttagtctagataatcattatttcattttaaaattagtgtttttcctagtttgcactgatgcgtgtatggatgtgtgtgagtcagtggtagcttatttaaaaagcaccttatcctttctcccataacctttgtacactaaaaaatgaaagaatttagaatgtatttgatgatagcattctcactaagacacatgagaatttaactttataaccgcgtgagttaagatttaattcataggttttgatgtcattgttgaagttatttgtaattcagaaaccttgcttgtgtgatacatagtctcttcatttattactgcttgtctgttgttatatctggattatcaaaagcaatagtgcaccaattaagatgtgctcaaatcaggacttaaatcataggcaccacatttttcatgtcagactagttactttgttgattctcagttactgtaggcatcaaaaggcaaaaatcaaaaaaaaaaaaaacaaaaacaaaaaaaaagatgaacctaggtctgtgtaaagtaaggggagtgttaggagcagccaggactgtgtagtgtgtgtttggttgcatcacaaacatcgtatgtggagacattgcaatacagtgttttttgttttcaacttttcttgtattgtatatttgtattatgttttgaatgcttttctcttttcataattaaatattaatgtttgggataactgccaagaagaagtaaaaatattgaatggaacttctatatgaggatgctgtgatctaaaaattaaatctcagtgggcggagagaatttgtttctgatgccttgtctttagaataattgtttgctttcagatgattaaaaaaaggagattgtatctaggaaaaaagtgtgaatgcttcaaaggagagatactgataattgtgacttgaaatagtgtcagatgaattatgtagctgatcactgatggaaccatctaatgaggcaggcttaaactctatttagtttcgtttgttttctcatatgaagtttataattcctttcagtcctaaaatgtcagatgccaggtgtcaaatgccacagtagaaagtgaaattaagtagagtccccttttaaacaaatttgtctgtaagcaaaactatctttagtgacttaaaaaataatatcctctaaaattaccctttcaagaggaaaaaactgttcaatgaaaaaaccactcaattatgactcatataagaaatactggtttaaccaggagatatttggggagcaaaattttaaggaatttcaaattgctaaatctaatacaaatatctgacaataagatacagatctaaaagaatggttcttaagaactattgtttactgggaataaactaagctctatgaagaattcgtaagcattacatgttccagtaagtttagcaacttagagccaagactggtggccacctccatttatttccccactgctcctccactgacatccttcttagcagaaacttcatgaaaaagtttttgctgacacagaacaaacctgaaagtagtatctactttctaaatactactttgcttttcagtagtggatttgatatttataatgttctctaaagcttgcaactttttcagcaacgtttaaaaatagattaacctggaataacttacttgtttgctgctaaaatactcaagattttgccatttttaaacaaccagtccctgtgatacaactttgaaaaaacttttaaaaatctctgatgtgtgggctctttttttcccataagaattatgtacatctgtgatgttttacagggggatccgcttttaaacagtgtacatattggaccacactgaaatgtcatatatcctttctctacttaaaattggttatttactgtgagttcatttccgatgtgttcttggttgttgctgttttctgcctgaagacgtgtatcataaagagctacatggtatggactatttatttgtaatttgacataaagtttgaagaataaagatctataaaagttgaagtttctgatattaaa

SEQ ID NO: 848 - DNA, 3147 bp, Homo sapiens
  source 1..3147: mol_type = unassigned DNA
acgcgccaccgctcgcgggccaatgggtggcagcctctctgcataggcaacgagtgccggccgggggtgagcgtcccaggcggttccgctcaacagacgctgctgtggctgcgccgggctgcgacactgcagttgtctacgcggccggggccgggacgaggaggcgttggacggggtcgcatacgttcgtcccctcgcattgcggccccgacagctgcgccaggatccccgggcggcggcgcggggcgtgaacgctctggggctcagccaggcctgcgcgggcccgaggccggaggaacccggactccggcgtagcggttttgacacaagggcgcatatcttcaaagcacctagtacctcctaccattgtcaactgattctcgctgaagtctgttaattctactttttgagtacttatgaataaccacgtgtcttcaaaaccatctaccatgaagctaaaacataccatcaaccctattcttttatattttatacattttctaatatcactttatactattttaacatacattccgttttattttttctccgagtcaagacaagaaaaatcaaaccgaattaaagcaaagcctgtaaattcaaaacctgattctgcatacagatctgttaatagtttggatggtttggcttcagtattataccctggatgtgatactttagataaagtttttacatatgcaaaaaacaaatttaagaacaaaagactcttgggaacacgtgaagttttaaatgaggaagatgaagtacaaccaaatggaaaaatttttaaaaaggttattcttggacagtataattggctttcctatgaagatgtctttgttcgagcctttaattttggaaatggattacagatgttgggtcagaaaccaaagaccaacatcgccatcttctgtgagaccagggccgagtggatgatagctgcacaggcgtgttttatgtataattttcagcttgttacattatatgccactctaggaggtccagccattgttcatgcattaaatgaaacagaggtgaccaacatcattactagtaaagaactcttacaaacaaagttgaaggatatagtttctttggtcccacgcctgcggcacatcatcactgttgatggaaagccaccgacctggtccgagttccccaagggcatcattgtgcataccatggctgcagtggaggccctgggagccaaggccagcatggaaaaccaacctcatagcaaaccattgccctcagatattgcagtaatcatgtacacaagtggatccacaggacttccaaagggagtcatgatctcacatagtaacattattgctggtataactgggatggcagaaaggattccagaactaggagaggaagatgtctacattggatatttgcctctggcccatgttctagaattaagtgctgagcttgtctgtctttctcacggatgccgcattggttactcttcaccacagactttagcagatcagtcttcaaaaattaaaaaaggaagcaaaggggatacatccatgttgaaaccaacactgatggcagcagttccggaaatcatggatcggatctacaaaaatgtcatgaataaagtcagtgaaatgagtagttttcaacgtaatctgtttattctggcctataattacaaaatggaacagatttcaaaaggacgtaatactccactgtgcgacagctttgttttccggaaagttcgaagcttgctagggggaaatattcgtctcctgttgtgtggtggcgctccactttctgcaaccacgcagcgattcatgaacatctgtttctgctgtcctgttggtcagggatacgggctcactgaatctgctggggctggaacaatttccgaagtgtgggactacaatactggcagagtgggagcaccattagtttgctgtgaaatcaaattaaaaaactgggaggaaggtggatactttaatactgataagccacaccccaggggtgaaattcttattgggggccaaagtgtgacaatggggtactacaaaaatgaagcaaaaacaaaagctgatttctttgaagatgaaaatggacaaaggtggctctgtactggggatattggagagtttgaacccgatggatgcttaaagattattgatcgtaaaaaggaccttgtaaaactacaggcaggggaatatgtttctcttgggaaagtagaggcagctttgaagaatcttccactagtagataacatttgtgcatatgcaaacagttatcattcttatgtcattggatttgttgtgccaaatcaaaaggaactaactgaactagctcgaaagaaaggacttaaagggacttgggaggagctgtgtaacagttgtgaaatggaaaatgaggtacttaaagtgctttccgaagctgctatttcagcaagtctggaaaagtttgaaattccagtaaaaattcgtttgagtcctgaaccgtggacccctgaaactggtctggtgacagatgccttcaagctgaaacgcaaagagcttaaaacacattaccaggcggacattgagcgaatgtatggaagaaaataattattctcttctggcatcagtttgctacagtgagctcagatcaaataggaaaatacttgaaatgcatgtctcaagctgcaaggcaaactccattcctcatattaaactattacttctcatgacgtcaccatttttaactgacaggattagtaaaacattaagacagcaaacttgtgtctgtctcttctttcattttccccgccaccaacttactttaccacctatgactgtacttgtcagtatgagaatttttctgaatcatattggggaagcagtgattttaaaacctcaagtttttaaacatgatttatatgttctgtataatgttcagtttgtaactttttaaaagtttggatgtatagagggataaataggaaatataagaattggttatttgggggcttttttacttactgtatttaaaaatacaagggtattgatatgaaattatgtaaatttcaaatgcttatgaatcaaatcattgttgaacaaaagatttgttgctgtgtaattattgtcttgtatgcatttgagagaaataaatatacccatacttatgttttaagaa

SEQ ID NO: 849 - DNA, 650 bp, Homo sapiens
  source 1..650: mol_type = unassigned DNA
actgcgtgcctcccggcgctgtggggcggggtggggaggccacccccttgaattaagagggctctgccgcggccccagcagtgcggtgtccgtggaaggagactcagccctgcgatttcggaaaacccttgtttggcggggcgggaggggctgttgctgcgtggggtgagaagaaactaggttttgacacaagggcgcatatcttcaaagcacctagtacctcctaccattgtcaactgatacagaattcgttgttgggaaggactggggaaacagctgtaacatttgccaccctcagaagctgctggtcctgtgtcacaccaccttagcctcttgatcgaggaagattctcgctgaagtctgttaattctactttttgagtacttatgaataaccacgtgtcttcaaaaccatctaccatgaagctaaaacataccatcaaccctattcttttatattttatacattttctaatatcactttatactattttaacatacattccgttttattttttctccgagtcaagacaagaaaaatcaaaccgaattaaagcaaagcctgtaaattcaaaacctgattctgcatacagatctgttaatagtttggatggtttggcttcagtattataccctggatgtgatacttta

SEQ ID NO: 850 - DNA, 560 bp, Homo sapiens
  source 1..560: mol_type = unassigned DNA
tccgctcaacagacgctgctgtggctgcgccgggctgcgacactgcagttgtctacgcggccggggccgggacgaggaggcgttggacggggtcgcatacgttcgtcccctcgcattgcggccccgacagctgcgccaggatccccgggcggcggcgcggggcgtgaacgctctggggctcagccaggcctgcgcgggcccgaggccggaggaacccggactccggcgtagcgattctcgctgaagtctgttaattctactttttgagtacttatgaataaccacgtgtcttcaaaaccatctaccatgaagctaaaacataccatcaaccctattcttttatattttatacattttctaatatcactttatactattttaacatacattccgttttattttttctccgagtcaagacaagaaaaatcaaaccgaattaaagcaaagcctgtaaattcaaaacctgattctgcatacagatctgttaatagtttggatggtttggcttcagtattataccctggatgtgatactttagataaagtttttacatatgcaaa

SEQ ID NO: 851 - DNA, 3353 bp, Homo sapiens
  source 1..3353: mol_type = unassigned DNA
aaaaccaggaagtgaagtccccgagcacgttagaaagcctgacatggcctgactcgggacagctcagagcagggcagaactggggacactctgggccggccttctgcctgcatggacgctctgaagccaccctgtctctggaggaaccacgagcgagggaagaaggacagggactcgtgtggcaggaagaactcagagccgggaagcccccattcactagaagcactgagagatgcggccccctcgcagggtctgaatttcctgctgctgttcacaaagatgctttttatctttaactttttgttttccccacttccgaccccggcgttgatctgcatcctgacatttggagctgccatcttcttgtggctgatcaccagacctcaacccgtcttacctcttcttgacctgaacaatcagtctgtgggaattgagggaggagcacggaagggggtttcccagaagaacaatgacctaacaagttgctgcttctcagatgccaagactatgtatgaggttttccaaagaggactcgctgtgtctgacaatgggccctgcttgggatatagaaaaccaaaccagccctacagatggctatcttacaaacaggtgtctgatagagcagagtacctgggttcctgtctcttgcataaaggttataaatcatcaccagaccagtttgtcggcatctttgctcagaataggccagagtggatcatctccgaattggcttgttacacgtactctatggtagctgtacctctgtatgacaccttgggaccagaagccatcgtacatattgtcaacaaggctgatatcgccatggtgatctgtgacacaccccaaaaggcattggtgctgatagggaatgtagagaaaggcttcaccccgagcctgaaggtgatcatccttatggacccctttgatgatgacctgaagcaaagaggggagaagagtggaattgagatcttatccctatatgatgctgagaacctaggcaaagagcacttcagaaaacctgtgcctcctagcccagaagacctgagcgtcatctgcttcaccagtgggaccacaggtgaccccaaaggagccatgataacccatcaaaatattgtttcaaatgctgctgcctttctcaaatgtgtggagcatgcttatgagcccactcctgatgatgtggccatatcctacctccctctggctcatatgtttgagaggattgtacaggctgttgtgtacagctgtggagccagagttggattcttccaaggggatattcggttgctggctgacgacatgaagactttgaagcccacattgtttcccgcggtgcctcgactccttaacaggatctacgataaggtacaaaatgaggccaagacacccttgaagaagttcttgttgaagctggctgtttccagtaaattcaaagagcttcaaaagggtatcatcaggcatgatagtttctgggacaagctcatctttgcaaagatccaggacagcctgggcggaagggttcgtgtaattgtcactggagctgcccccatgtccacttcagtcatgacattcttccgggcagcaatgggatgtcaggtgtatgaagcttatggtcaaacagaatgcacaggtggctgtacatttacattacctggggactggacatcaggtcacgttggggtgcccctggcttgcaattacgtgaagctggaagatgtggctgacatgaactactttacagtgaataatgaaggagaggtctgcatcaagggtacaaacgtgttcaaaggatacctgaaggaccctgagaagacacaggaagccctggacagtgatggctggcttcacacaggagacattggtcgctggctcccgaatggaactctgaagatcatcgaccgtaaaaagaacattttcaagctggcccaaggagaatacattgcaccagagaagatagaaaatatctacaacaggagtcaaccagtgttacaaatttttgtacacggggagagcttacggtcatccttagtaggagtggtggttcctgacacagatgtacttccctcatttgcagccaagcttggggtgaagggctcctttgaggaactgtgccaaaaccaagttgtaagggaagccattttagaagacttgcagaaaattgggaaagaaagtggccttaaaacttttgaacaggtcaaagccatttttcttcatccagagccattttccattgaaaatgggctcttgacaccaacattgaaagcaaagcgaggagagctttccaaatactttcggacccaaattgacagcctgtatgagcacatccaggattaggataaggtacttaagtacctgccggcccactgtgcactgcttgtgagaaaatggattaaaaactattcttacatttgttttgcctttcctcctatttttttttaacctgttaaactctaaagccatagcttttgttttatattgagacatataatgtgtaaacttagttcccaaataaatcaatcctgtctttcccatcttcgatgttgctaatattaaggcttcagggctacttttatcaacatgcctgtcttcaagatcccagtttatgttctgtgtccttcctcatgatttccaaccttaatactattagtaaccacaagttcaagggtcaaagggaccctctgtgccttcttctttgttttgtgataaacataacttgccaacagtctctatgcttatttacatcttctactgttcaaactaagagatttttaaattctgaaaaactgcttacaattcatgttttctagccactccacaaaccactaaaattttagttttagcctatcactcatgtcaatcatatctatgagacaaatgtctccgatgctcttctgcgtaaattaaattgtgtactgaagggaaaagtttgatcataccaaacatttcctaaactctctagttagatatctgacttgggagtattaaaaattgggtctatgacatattgtccaaaaggaatgctgttcttaaagcattatttacagtaggaactggggagtaaatctgttccctacagtttgctgctgagctggaagctgtgggggaaggagttgacaggtgggcccagtgaacttttccagtaaatgaagcaagcactgaataaaaacctcctgaactgggaacaaagatctacaggcaagcaagatgcccacacaacaggcttattttctgtgaaggaaccaactgatctcccccacccttggattagagttcctgctctaccttacccacagataacacatgttgtttctacttgtaaatgtaaagtctttaaaataaactattacagatactta

SEQ ID NO: 852 - DNA, 3351 bp, Homo sapiens
  source 1..3351: mol_type = unassigned DNA
cttactgtcagaggttactacaagtgtttgaacaggtaacttctacctttgaacttctgttgtgacagattcaaaggttccaggggagtgtgttggccactctcaggacagtacacagtagcttcgggtgtgtcccagtcagtcctaggagctgtggaaagagtagaagtgcctgaatgtggtgctgaatcaatacagccagctgtgaggggagcacttcctggacccaggaagggagagtcttcttccaaggtctgaatttcctgctgctgttcacaaagatgctttttatctttaactttttgttttccccacttccgaccccggcgttgatctgcatcctgacatttggagctgccatcttcttgtggctgatcaccagacctcaacccgtcttacctcttcttgacctgaacaatcagtctgtgggaattgagggaggagcacggaagggggtttcccagaagaacaatgacctaacaagttgctgcttctcagatgccaagactatgtatgaggttttccaaagaggactcgctgtgtctgacaatgggccctgcttgggatatagaaaaccaaaccagccctacagatggctatcttacaaacaggtgtctgatagagcagagtacctgggttcctgtctcttgcataaaggttataaatcatcaccagaccagtttgtcggcatctttgctcagaataggccagagtggatcatctccgaattggcttgttacacgtactctatggtagctgtacctctgtatgacaccttgggaccagaagccatcgtacatattgtcaacaaggctgatatcgccatggtgatctgtgacacaccccaaaaggcattggtgctgatagggaatgtagagaaaggcttcaccccgagcctgaaggtgatcatccttatggacccctttgatgatgacctgaagcaaagaggggagaagagtggaattgagatcttatccctatatgatgctgagaacctaggcaaagagcacttcagaaaacctgtgcctcctagcccagaagacctgagcgtcatctgcttcaccagtgggaccacaggtgaccccaaaggagccatgataacccatcaaaatattgtttcaaatgctgctgcctttctcaaatgtgtggagcatgcttatgagcccactcctgatgatgtggccatatcctacctccctctggctcatatgtttgagaggattgtacaggctgttgtgtacagctgtggagccagagttggattcttccaaggggatattcggttgctggctgacgacatgaagactttgaagcccacattgtttcccgcggtgcctcgactccttaacaggatctacgataaggtacaaaatgaggccaagacacccttgaagaagttcttgttgaagctggctgtttccagtaaattcaaagagcttcaaaagggtatcatcaggcatgatagtttctgggacaagctcatctttgcaaagatccaggacagcctgggcggaagggttcgtgtaattgtcactggagctgcccccatgtccacttcagtcatgacattcttccgggcagcaatgggatgtcaggtgtatgaagcttatggtcaaacagaatgcacaggtggctgtacatttacattacctggggactggacatcaggtcacgttggggtgcccctggcttgcaattacgtgaagctggaagatgtggctgacatgaactactttacagtgaataatgaaggagaggtctgcatcaagggtacaaacgtgttcaaaggatacctgaaggaccctgagaagacacaggaagccctggacagtgatggctggcttcacacaggagacattggtcgctggctcccgaatggaactctgaagatcatcgaccgtaaaaagaacattttcaagctggcccaaggagaatacattgcaccagagaagatagaaaatatctacaacaggagtcaaccagtgttacaaatttttgtacacggggagagcttacggtcatccttagtaggagtggtggttcctgacacagatgtacttccctcatttgcagccaagcttggggtgaagggctcctttgaggaactgtgccaaaaccaagttgtaagggaagccattttagaagacttgcagaaaattgggaaagaaagtggccttaaaacttttgaacaggtcaaagccatttttcttcatccagagccattttccattgaaaatgggctcttgacaccaacattgaaagcaaagcgaggagagctttccaaatactttcggacccaaattgacagcctgtatgagcacatccaggattaggataaggtacttaagtacctgccggcccactgtgcactgcttgtgagaaaatggattaaaaactattcttacatttgttttgcctttcctcctatttttttttaacctgttaaactctaaagccatagcttttgttttatattgagacatataatgtgtaaacttagttcccaaataaatcaatcctgtctttcccatcttcgatgttgctaatattaaggcttcagggctacttttatcaacatgcctgtcttcaagatcccagtttatgttctgtgtccttcctcatgatttccaaccttaatactattagtaaccacaagttcaagggtcaaagggaccctctgtgccttcttctttgttttgtgataaacataacttgccaacagtctctatgcttatttacatcttctactgttcaaactaagagatttttaaattctgaaaaactgcttacaattcatgttttctagccactccacaaaccactaaaattttagttttagcctatcactcatgtcaatcatatctatgagacaaatgtctccgatgctcttctgcgtaaattaaattgtgtactgaagggaaaagtttgatcataccaaacatttcctaaactctctagttagatatctgacttgggagtattaaaaattgggtctatgacatattgtccaaaaggaatgctgttcttaaagcattatttacagtaggaactggggagtaaatctgttccctacagtttgctgctgagctggaagctgtgggggaaggagttgacaggtgggcccagtgaacttttccagtaaatgaagcaagcactgaataaaaacctcctgaactgggaacaaagatctacaggcaagcaagatgcccacacaacaggcttattttctgtgaaggaaccaactgatctcccccacccttggattagagttcctgctctaccttacccacagataacacatgttgtttctacttgtaaatgtaaagtctttaaaataaactattacagata

SEQ ID NO: 853 - DNA, 3353 bp, Homo sapiens
  source 1..3353: mol_type = unassigned DNA
taaaaccaggaagtgaagtccccgagcacgttagaaagcctgacatggcctgactcgggacagctcagagcagggcagaactggggacactctgggccggccttctgcctgcatggacgctctgaagccaccctgtctctggaggaaccacgagcgagggaagaaggacagggactcgtgtggcaggaagaactcagagccgggaagcccccattcactagaagcactgagagatgcggccccctcgcagggtctgaatttcctgctgctgttcacaaagatgctttttatctttaactttttgttttccccacttccgaccccggcgttgatctgcatcctgacatttggagctgccatcttcttgtggctgatcaccagacctcaacccgtcttacctcttcttgacctgaacaatcagtctgtgggaattgagggaggagcacggaagggggtttcccagaagaacaatgacctaacaagttgctgcttctcagatgccaagactatgtatgaggttttccaaagaggactcgctgtgtctgacaatgggccctgcttgggatatagaaaaccaaaccagccctacagatggctatcttacaaacaggtgtctgatagagcagagtacctgggttcctgtctcttgcataaaggttataaatcatcaccagaccagtttgtcggcatctttgctcagaataggccagagtggatcatctccgaattggcttgttacacgtactctatggtagctgtacctctgtatgacaccttgggaccagaagccatcgtacatattgtcaacaaggctgatatcgccatggtgatctgtgacacaccccaaaaggcattggtgctgatagggaatgtagagaaaggcttcaccccgagcctgaaggtgatcatccttatggacccctttgatgatgacctgaagcaaagaggggagaagagtggaattgagatcttatccctatatgatgctgagaacctaggcaaagagcacttcagaaaacctgtgcctcctagcccagaagacctgagcgtcatctgcttcaccagtgggaccacaggtgaccccaaaggagccatgataacccatcaaaatattgtttcaaatgctgctgcctttctcaaatgtgtggagcatgcttatgagcccactcctgatgatgtggccatatcctacctccctctggctcatatgtttgagaggattgtacaggctgttgtgtacagctgtggagccagagttggattcttccaaggggatattcggttgctggctgacgacatgaagactttgaagcccacattgtttcccgcggtgcctcgactccttaacaggatctacgataaggtacaaaatgaggccaagacacccttgaagaagttcttgttgaagctggctgtttccagtaaattcaaagagcttcaaaagggtatcatcaggcatgatagtttctgggacaagctcatctttgcaaagatccaggacagcctgggcggaagggttcgtgtaattgtcactggagctgcccccatgtccacttcagtcatgacattcttccgggcagcaatgggatgtcaggtgtatgaagcttatggtcaaacagaatgcacaggtggctgtacatttacattacctggggactggacatcaggtcacgttggggtgcccctggcttgcaattacgtgaagctggaagatgtggctgacatgaactactttacagtgaataatgaaggagaggtctgcatcaagggtacaaacgtgttcaaaggatacctgaaggaccctgagaagacacaggaagccctggacagtgatggctggcttcacacaggagacattggtcgctggctcccgaatggaactctgaagatcatcgaccgtaaaaagaacattttcaagctggcccaaggagaatacattgcaccagagaagatagaaaatatctacaacaggagtcaaccagtgttacaaatttttgtacacggggagagcttacggtcatccttagtaggagtggtggttcctgacacagatgtacttccctcatttgcagccaagcttggggtgaagggctcctttgaggaactgtgccaaaaccaagttgtaagggaagccattttagaagacttgcagaaaattgggaaagaaagtggccttaaaacttttgaacaggtcaaagccatttttcttcatccagagccattttccattgaaaatgggctcttgacaccaacattgaaagcaaagcgaggagagctttccaaatactttcggacccaaattgacagcctgtatgagcacatccaggattaggataaggtacttaagtacctgccggcccactgtgcactgcttgtgagaaaatggattaaaaactattcttacatttgttttgcctttcctcctatttttttttaacctgttaaactctaaagccatagcttttgttttatattgagacatataatgtgtaaacttagttcccaaataaatcaatcctgtctttcccatcttcgatgttgctaatattaaggcttcagggctacttttatcaacatgcctgtcttcaagatcccagtttatgttctgtgtccttcctcatgatttccaaccttaatactattagtaaccacaagttcaagggtcaaagggaccctctgtgccttcttctttgttttgtgataaacataacttgccaacagtctctatgcttatttacatcttctactgttcaaactaagagatttttaaattctgaaaaactgcttacaattcatgttttctagccactccacaaaccactaaaattttagttttagcctatcactcatgtcaatcatatctatgagacaaatgtctccgatgctcttctgcgtaaattaaattgtgtactgaagggaaaagtttgatcataccaaacatttcctaaactctctagttagatatctgacttgggagtattaaaaattgggtctatgacatattgtccaaaaggaatgctgttcttaaagcattatttacagtaggaactggggagtaaatctgttccctacagtttgctgctgagctggaagctgtgggggaaggagttgacaggtgggcccagtgaacttttccagtaaatgaagcaagcactgaataaaaacctcctgaactgggaacaaagatctacaggcaagcaagatgcccacacaacaggcttattttctgtgaaggaaccaactgatctcccccacccttggattagagttcctgctctaccttacccacagataacacatgttgtttctacttgtaaatgtaaagtctttaaaataaactattacagatactt

SEQ ID NO: 854 - DNA, 1583 bp, Homo sapiens
  source 1..1583: mol_type = unassigned DNA
attggtgctgatagggaatgtagagaaaggcttcaccccgagcctgaaggtgatcatccttatggacccctttgatgatgacctgaagcaaagaggggagaagagtggaattgagatcttatccctatatgatgctgaggtagatgattttctagagaaatcttatgctcttccctggggcttccattgttcctgaatgttggcttctggtcctgatccagaacctaggcaaagagcacttcagaaaacctgtgcctcctagcccagaagacctgagcgtcatctgcttcaccagtgggaccacaggtgaccccaaaggagccatgataacccatcaaaatattgtttcaaatgctgctgcctttctcaaatgtgtggagcatgcttatgagcccactcctgatgatgtggccatatcctacctccctctggctcatatgtttgagaggattgtacaggctgttgtgtacagctgtggagccagagttggattcttccaaggggatattcggttgctggctgacgacatgaagactttgaagcccacattgtttcccgcggtgcctcgactccttaacaggatctacgataaggtacaaaatgaggccaagacacccttgaagaagttcttgttgaagctggctgtttccagtaaattcaaagagcttcaaaagggtatcatcaggcatgatagtttctgggacaagctcatctttgcaaagatccaggacagcctgggcggaagggttcgtgtaattgtcactggagctgcccccatgtccacttcagtcatgacattcttccgggcagcaatgggatgtcaggtgtatgaagcttatggtcaaacagaatgcacaggtggctgtacatttacattacctggggactggacatcaggtcacgttggggtgcccctggcttgcaattacgtgaagctggaagatgtggctgacatgaactactttacagtgaataatgaaggagaggtctgcatcaagggtacaaacgtgttcaaaggatacctgaaggaccctgagaagacacaggaagccctggacagtgatggctggcttcacacaggagacattggtcgctggctcccgaatggaactctgaagatcatcgaccgtaaaaagaacattttcaagctggcccaaggagaatacattgcaccagagaagatagaaaatatctacaacaggagtcaaccagtgttacaaatttttgtacacggggagagcttacggtcatccttagtaggagtggtggttcctgacacagatgtacttccctcatttgcagccaagcttggggtgaagggctcctttgaggaactgtgccaaaaccaagttgtaagggaagccattttagaagacttgcagaaaattgggaaagaaagtggccttaaaacttttgaacaggtcaaagccatttttcttcatccagagccattttccattgaaaatgggctcttgacaccaacattgaaagcaaagcgaggagagctttccaaatactttcggacccaaattgacagcctgtatgagcacatccaggattaggataaggtacttaagtacctg

SEQ ID NO: 855 - DNA, 3380 bp, Homo sapiens
  source 1..3380: mol_type = unassigned DNA
gccagaggatggaatgccacaggccccacttcgtctcccagcccttcatctttcttccatgtccaaaggcggctccccagaggccaagggctcagctcttgtgttctctgagactgtggcacagctcaccctggcttccttagtaggaagcttttaagaactgctctgtagaaagaacaaaccctaatctagctccagcaaagagccaggatcatgctgaacttcctgtgagccttcgtgggggatcgaggctggagaaagtgctgcttcattctgaggtctgaatttcctgctgctgttcacaaagatgctttttatctttaactttttgttttccccacttccgaccccggcgttgatctgcatcctgacatttggagctgccatcttcttgtggctgatcaccagacctcaacccgtcttacctcttcttgacctgaacaatcagtctgtgggaattgagggaggagcacggaagggggtttcccagaagaacaatgacctaacaagttgctgcttctcagatgccaagactatgtatgaggttttccaaagaggactcgctgtgtctgacaatgggccctgcttgggatatagaaaaccaaaccagccctacagatggctatcttacaaacaggtgtctgatagagcagagtacctgggttcctgtctcttgcataaaggttataaatcatcaccagaccagtttgtcggcatctttgctcagaataggccagagtggatcatctccgaattggcttgttacacgtactctatggtagctgtacctctgtatgacaccttgggaccagaagccatcgtacatattgtcaacaaggctgatatcgccatggtgatctgtgacacaccccaaaaggcattggtgctgatagggaatgtagagaaaggcttcaccccgagcctgaaggtgatcatccttatggacccctttgatgatgacctgaagcaaagaggggagaagagtggaattgagatcttatccctatatgatgctgagaacctaggcaaagagcacttcagaaaacctgtgcctcctagcccagaagacctgagcgtcatctgcttcaccagtgggaccacaggtgaccccaaaggagccatgataacccatcaaaatattgtttcaaatgctgctgcctttctcaaatgtgtggagcatgcttatgagcccactcctgatgatgtggccatatcctacctccctctggctcatatgtttgagaggattgtacaggctgttgtgtacagctgtggagccagagttggattcttccaaggggatattcggttgctggctgacgacatgaagactttgaagcccacattgtttcccgcggtgcctcgactccttaacaggatctacgataaggtacaaaatgaggccaagacacccttgaagaagttcttgttgaagctggctgtttccagtaaattcaaagagcttcaaaagggtatcatcaggcatgatagtttctgggacaagctcatctttgcaaagatccaggacagcctgggcggaagggttcgtgtaattgtcactggagctgcccccatgtccacttcagtcatgacattcttccgggcagcaatgggatgtcaggtgtatgaagcttatggtcaaacagaatgcacaggtggctgtacatttacattacctggggactggacatcaggtcacgttggggtgcccctggcttgcaattacgtgaagctggaagatgtggctgacatgaactactttacagtgaataatgaaggagaggtctgcatcaagggtacaaacgtgttcaaaggatacctgaaggaccctgagaagacacaggaagccctggacagtgatggctggcttcacacaggagacattggtcgctggctcccgaatggaactctgaagatcatcgaccgtaaaaagaacattttcaagctggcccaaggagaatacattgcaccagagaagatagaaaatatctacaacaggagtcaaccagtgttacaaatttttgtacacggggagagcttacggtcatccttagtaggagtggtggttcctgacacagatgtacttccctcatttgcagccaagcttggggtgaagggctcctttgaggaactgtgccaaaaccaagttgtaagggaagccattttagaagacttgcagaaaattgggaaagaaagtggccttaaaacttttgaacaggtcaaagccatttttcttcatccagagccattttccattgaaaatgggctcttgacaccaacattgaaagcaaagcgaggagagctttccaaatactttcggacccaaattgacagcctgtatgagcacatccaggattaggataaggtacttaagtacctgccggcccactgtgcactgcttgtgagaaaatggattaaaaactattcttacatttgttttgcctttcctcctatttttttttaacctgttaaactctaaagccatagcttttgttttatattgagacatataatgtgtaaacttagttcccaaataaatcaatcctgtctttcccatcttcgatgttgctaatattaaggcttcagggctacttttatcaacatgcctgtcttcaagatcccagtttatgttctgtgtccttcctcatgatttccaaccttaatactattagtaaccacaagttcaagggtcaaagggaccctctgtgccttcttctttgttttgtgataaacataacttgccaacagtctctatgcttatttacatcttctactgttcaaactaagagatttttaaattctgaaaaactgcttacaattcatgttttctagccactccacaaaccactaaaattttagttttagcctatcactcatgtcaatcatatctatgagacaaatgtctccgatgctcttctgcgtaaattaaattgtgtactgaagggaaaagtttgatcataccaaacatttcctaaactctctagttagatatctgacttgggagtattaaaaattgggtctatgacatattgtccaaaaggaatgctgttcttaaagcattatttacagtaggaactggggagtaaatctgttccctacagtttgctgctgagctggaagctgtgggggaaggagttgacaggtgggcccagtgaacttttccagtaaatgaagcaagcactgaataaaaacctcctgaactgggaacaaagatctacaggcaagcaagatgcccacacaacaggcttattttctgtgaaggaaccaactgatctcccccacccttggattagagttcctgctctaccttacccacagataacacatgttgtttctacttgtaaatgtaaagtctttaaaataaactattacagatactt

SEQ ID NO: 856 - DNA, 3281 bp, Homo sapiens
  source 1..3281: mol_type = unassigned DNA
taaaaccaggaagtgaagtccccgagcacgttagaaagcctgacatggcctgactcgggacagctcagagcagggcagaactggggacactctgggccggccttctgcctgcatggacgctctgaagccaccctgtctctggaggaaccacgagcgagggaagaaggacagggactcgtgtggcaggaagaactcagagccgggaagcccccattcactagaagcactgagagatgcggccccctcgcagggtctgaatttcctgctgctgttcacaaagatgctttttatctttaactttttgttttccccacttccgaccccggcgttgatctgcatcctgacatttggagctgccatcttcttgtggctgatcaccagacctcaacccgtcttacctcttcttgacctgaacaatcagtctgtgggaattgagggaggagcacggaagggggtttcccagaagaacaatgacctaacaagttgctgcttctcagatgccaagactatgtatgaggttttccaaagaggactcgctgtgtctgacaatgggccctgcttgggatatagaaaaccaaaccagccctacagatggctatcttacaaacaggtgtctgatagagcagagtacctgggttcctgtctcttgcataaaggttataaatcatcaccagaccagtttgtcggcatctttgctcagaataggccagagtggatcatctccgaattggcttgttacacgtactctatggtagctgtacctctgtatgacaccttgggaccagaagccatcgtacatattgtcaacaaggctgatatcgccatggtgatctgtgacacaccccaaaaggcattggtgctgatagggaatgtagagaaaggcttcaccccgagcctgaaggtgatcatccttatggacccctttgatgatgacctgaagcaaagaggggagaagagtggaattgagatcttatccctatatgatgctgagaacctaggcaaagagcacttcagaaaacctgtgcctcctagcccagaagacctgagcgtcatctgcttcaccagtgggaccacaggtgaccccaaaggagccatgataacccatcaaaatattgtttcaaatgctgctgcctttctcaaatgtgtggagcatgcttatgagcccactcctgatgatgtggccatatcctacctccctctggctcatatgtttgagaggattgtacaggctgttgtgtacagctgtggagccagagttggattcttccaaggggatattcggttgctggctgacgacatgaagactttgaagcccacattgtttcccgcggtgcctcgactccttaacaggatctacgataaggtacaaaatgaggccaagacacccttgaagaagttcttgttgaagctggctgtttccagtaaattcaaagagcttcaaaagggtatcatcaggcatgatagtttctgggacaagctcatctttgcaaagatccaggacagcctgggcggaagggttcgtgtaattgtcactggagctgcccccatgtccacttcagtcatgacattcttccgggcagcaatgggatgtcaggtgtatgaagcttatggtcaaacagaatgcacaggtggctgtacatttacattacctggggactggacatcaggtcacgttggggtgcccctggcttgcaattacgtgaagctggaagatgtggctgacatgaactactttacagtgaataatgaaggagaggtctgcatcaagggtacaaacgtgttcaaaggatacctgaaggaccctgagaagacacaggaagccctggacagtgatggctggcttcacacaggagacattggtcgctggctcccgaatggaactctgaagatcatcgaccgtaaaaagaacattttcaagctggcccaaggagaatacattgcaccagagaagatagaaaatatctacaacaggagtcaaccagtgttacaaatttttgtacacggggagagcttacggtcatccttagtaggagtggtggttcctgacacagatgtacttccctcatttgcagccaagcttggggtgaagggctcctttgaggaactgtgccaaaaccaagtcaaagccatttttcttcatccagagccattttccattgaaaatgggctcttgacaccaacattgaaagcaaagcgaggagagctttccaaatactttcggacccaaattgacagcctgtatgagcacatccaggattaggataaggtacttaagtacctgccggcccactgtgcactgcttgtgagaaaatggattaaaaactattcttacatttgttttgcctttcctcctatttttttttaacctgttaaactctaaagccatagcttttgttttatattgagacatataatgtgtaaacttagttcccaaataaatcaatcctgtctttcccatcttcgatgttgctaatattaaggcttcagggctacttttatcaacatgcctgtcttcaagatcccagtttatgttctgtgtccttcctcatgatttccaaccttaatactattagtaaccacaagttcaagggtcaaagggaccctctgtgccttcttctttgttttgtgataaacataacttgccaacagtctctatgcttatttacatcttctactgttcaaactaagagatttttaaattctgaaaaactgcttacaattcatgttttctagccactccacaaaccactaaaattttagttttagcctatcactcatgtcaatcatatctatgagacaaatgtctccgatgctcttctgcgtaaattaaattgtgtactgaagggaaaagtttgatcataccaaacatttcctaaactctctagttagatatctgacttgggagtattaaaaattgggtctatgacatattgtccaaaaggaatgctgttcttaaagcattatttacagtaggaactggggagtaaatctgttccctacagtttgctgctgagctggaagctgtgggggaaggagttgacaggtgggcccagtgaacttttccagtaaatgaagcaagcactgaataaaaacctcctgaactgggaacaaagatctacaggcaagcaagatgcccacacaacaggcttattttctgtgaaggaaccaactgatctcccccacccttggattagagttcctgctctaccttacccacagataacacatgttgtttctacttgtaaatgtaaagtctttaaaataaactattacagatactt

SEQ ID NO: 857 - DNA, 2561 bp, Homo sapiens
  source 1..2561: mol_type = unassigned DNA
ggctgcggggctgcgggtcggggaggccgggccgggccgggccgggccccgctgaccgccatgctgaccttcttcctcgtgtcggggggctccctctggctattcgtagagtttgtcctctcacttctggagaagatgcagacacaggagatcctgaggatactgcgactgcctgagctaggtgacttgggacagtttttccgcagcctctcggccaccaccctcgtgagtatgggtgccctggctgccatccttgcctactggttcactcaccggccaaaggccttgcagccgccatgcaacctcctgatgcagtcagaagaagtagaggacagtggcggggcacggcgatctgtgattgggtctggccctcagctacttacccactactatgatgatgcccggaccatgtaccaggtgttccgccgtgggcttagcatctcagggaatgggccctgtcttggtttcaggaagcctaagcagccttaccagtggctgtcctaccaggaggtggccgacagggctgaatttctggggtccggacttctccagcacaattgtaaagcatgcactgatcagtttattggtgtttttgcacaaaatcggccagagtggatcattgtggagctggcctgctacacatattccatggtggtggtcccgctctatgacaccctgggccctggggctatccgctacatcatcaatacagcggacatcagcaccgtgattgtggacaaacctcagaaggctgtgcttctgctagagcatgtggagaggaaggagactccaggcctcaagctgatcatcctcatggacccattcgaagaagccctgaaagagagagggcagaagtgcggggtggtcattaagtccatgcaggccgtggaggactgtggccaagagaatcaccaggctcctgtgcccccgcagcctgatgacctctccattgtgtgtttcacaagcggcacgacagggaacccaaaaggtgcgatgctcacccatgggaacgtggtggctgatttctcaggctttctgaaagtgacagagagtcagtgggctcccacttgtgcggatgtgcacatttcctatttgcctttagcacacatgtttgagcgaatggtgcagtctgtcgtctattgccacggagggcgtgttggcttcttccagggagatatccgccttctctcagatgacatgaaggctctatgccccaccatcttccctgtggtcccacgactgctgaaccggatgtacgacaagatcttcagccaggcaaacacaccattaaagcgctggctcctggagtttgcagcaaagcgtaagcaagccgaggtccggagtggaatcatcaggaatgatagtatctgggatgaactcttctttaataagattcaggccagtcttggtgggtgtgtgcggatgattgttactggagcagccccagcatcaccaacagttctgggatttctccgggcagctctagggtgccaggtttatgaaggttatggccaaactgagtgcacagctggatgtaccttcaccactcctggcgactggacctcagggcacgtaggggcgccacttccctgcaatcatatcaagctcgttgatgttgaggaactgaactactgggcctgcaaaggagagggagagatatgtgtgagaggaccaaatgtgttcaaaggctacttgaaagatccagacaggacgaaggaggccctggacagcgatggctggcttcacactggagacatcggaaaatggctgccggcaggaactcttaaaattattgatcggaaaaagcatatatttaaacttgctcagggagaatatgttgcacccgagaagattgagaacatctacatccggagccaacctgtggcgcaaatctatgtccatggggacagcttaaaggcctttttggtaggcattgttgtgcctgaccctgaagttatgccctcctgggcccagaagagaggaattgaaggaacatatgcagatctctgcacaaataaggatctgaagaaagccattttggaagatatggtgaggttaggaaaagaaagtggactccattcttttgagcaggttaaagccattcacatccattctgacatgttctcagttcaaaatggcttgctgacaccaacactaaaagctaagagacctgagctgagagagtacttcaaaaaacaaatagaagagctttactcaatctccatgtgaagttcaaggaaagttcttctcagtgtaatgaactgtctagcaatattatagttattcttgaaagtaatgagtcaaaatgacacagctgaaaatgaataagcatctgattttatgactgagccttttcctgtcccaagaggtctttaacaatattttctctatcatcaatgagtatattttatttttattataaaaatgatattgtggtggactgctaaaaatatcacaaatggcaatgtaaaaatcaagacattttctcaagaactgtgtaccactaaaagtaatatattgtcaatgttcacagaactattaaacataaaggaaaaacataa

SEQ ID NO: 858 - DNA, 4499 bp, Homo sapiens
  source 1..4499: mol_type = unassigned DNA
atgcagacacaggagatcctgaggatactgcgactgcctgagctaggtgacttgggacagtttttccgcagcctctcggccaccaccctcgacagtggcggggcacggcgatctgtgattgggtctggccctcagctacttacccactactatgatgatgcccggaccatgtaccaggtgttccgccgtgggcttagcatctcagggaatgggccctgtcttggtttcaggaagcctaagcagccttaccagtggctgtcctaccaggaggtggccgacagggctgaatttctggggtccggacttctccagcacaattgtaaagcatgcactgatcagtttattggtgtttttgcacaaaatcggccagagtggatcattgtggagctggcctgctacacatattccatggtggtggtcccgctctatgacaccctgggccctggggctatccgctacatcatcaatacagcggacatcagcaccgtgattgtggacaaacctcagaaggctgtgcttctgctagagcatgtggagaggaaggagactccaggcctcaagctgatcatcctcatggacccattcgaagaagccctgaaagagagagggcagaagtgcggggtggtcattaagtccatgcaggccgtggaggactgtggccaagagaatcaccaggctcctgtgcccccgcagcctgatgacctctccattgtgtgtttcacaagcggcacgacagggaacccaaaaggtgcgatgctcacccatgggaacgtggtggctgatttctcaggctttctgaaagtgacagagggagatatccgccttctctcagatgacatgaaggctctatgccccaccatcttccctgtggtcccacgactgctgaaccggatgtacgacaagatcttcagccaggcaaacacaccattaaagcgctggctcctggagtttgcagcaaagcgtaagcaagccgaggtccggagtggaatcatcaggaatgatagtatctgggatgaactcttctttaataagattcaggccagtcttggtgggtgtgtgcggatgattgttactggagcagccccagcatcaccaacagttctgggatttctccgggcagctctagggtgccaggtttatgaaggttatggccaaactgagtgcacagctggatgtaccttcaccactcctggcgactggacctcagggcacgtaggggcgccacttccctgcaatcatatcaagctcgttgatgttgaggaactgaactactgggcctgcaaaggagagggagagatatgtgtgagaggaccaaatgtgttcaaaggctacttgaaagatccagacaggacgaaggaggccctggacagcgatggctggcttcacactggagacatcggaaaatggctgccggcaggaactcttaaaattattgatcggaaaaagcatatatttaaacttgctcagggagaatatgttgcacccgagaagattgagaacatctacatccggagccaacctgtggcgcaaatctatgtccatggggacagcttaaaggcctttttggtaggcattgttgtgcctgaccctgaagttatgccctcctgggcccagaagagaggaattgaaggaacatatgcagatctctgcacaaataaggatctgaagaaagccattttggaagatatggtgaggttaggaaaagaaagtggactccattcttttgagcaggttaaagccattcacatccattctgacatgttctcagttcaaaatggcttgctgacaccaacactaaaagctaagagacctgagctgagagagtacttcaaaaaacaaatagaagagctttactcaatctccatgtgaagttcaaggaaagttcttctcagtgtaatgaactgtctagcaatattatagttattcttgaaagtaatgagtcaaaatgacacagctgaaaatgaataagcatctgattttatgactgagccttttcctgtcccaagaggtctttaacaatattttctctatcatcaatgagtatattttatttttattataaaaatgatattgtggtggactgctaaaaatatcacaaatggcaatgtaaaaatcaagacattttctcaagaactgtgtaccactaaaagtaatatattgtcaatgttcacagaactattaaacataaaggaaaaacataagtgatatattctacttaattatttgtgaatcagtaaccagatgcagcaaatatctaggcaatgtggactacctcattcagtaactgattgtcaaaatcacaattaaatcagacttcaaaaattaaagctaggtgtatagaatcatgctaaaagaaaacatgataactcatagtctacgtaacttcagagtctttaaacatgacaatccacattgtcatatgtgaaaattttctctctgatttttactttcattcatgaaaaatgaaaattcagaaattctttttttcctttttgttttgagacagggtctgctctgtcacctaggctggagtgcagtggcttaatcatggctcattgcagtctccatctcctgggctcgagtgatcctcctgtctcacctcccaagtagctgagactacagtacaggcacatgccaccacacctggctaatagaaattttttttttagagattttgctcaggctggtctcaaactcctgagctcaagggatcctcccgccttggcctccctaagtgctaggattacaggcatgagccattgttcccagccaaattcagatattattaaaacacatgtcatatttatatagtaacttacaaagacctttcaatacattttctcatttattaagctcattaaagtattcaggaactacctagaaaaaatataatgtaaaactattcaaggatagtgtgtgtatgttcatggacttcttattataatgaattctaaaagacatctgttgactctacaatgaatggatccttgaggaatacttgggagaagaaactcagagttatttctcagggtaggcagcaattaatgtacctacattccttgctggggtcttctagtcttccattcccaatgtgcccatgctatgcctggaaaccctatatggttgtaattctgaacaatttcactttttttccagtaagaatatcaaggcagaaggtgggaaggaggggacattatttccagggaaaatagtttttcaacaatataactttgataaacctctttaaaatgccccaagaaaactttttaagtccatagacaaagaaatactgcctaatggcataattacattcctaaaatctttaagcgtgccgaagtttaaccactaaaacctcctttcttgcattatgtatttagatgcaccctgtattggggtgtcaacaatttcttataattaaaggccagataccatggacagcaattaagttccaagctatagattgtgcctctgaaaaaggcatggaccccaggaacgtgtttttcttctgtagagacaagactctaaaagcatatcaacaatccatatgcaattcatgtgttaatttaaaatgtatgtgctcagtgtttgtagtctagaagctcctttcccttggaggaatgccaagcagtttgcaaaaataaatgctgttagttaaaaaccacataatcacatgggcctactgaataaatatgcatcagtgattatatacttatatttcagtcttgtcaaaagtgaatcactgtttcatttgatgtatttacccagtctttttatccagtttttcttgggcatattctctctgaagacccactgttgcacttctaaatttgacagttaagaaatgagctagttctatacacactgatttttaaaggcgtttctgaataaactaatacttaaaatgtccaaagtcacatctgtacagcattagatttttatatttaatatatatttgactaattaaaagtgaaagttgttacctgaactggatattcatactattttaagggcaagttgcttacatttcaataacaacaaaaaaagaatctgtttcccattgtcctcctactcaactaaaattcatagttggctttaagcccaaaagaattttgaacaatgtgacagaaacaagtaatgtaaaacttattttgttttatttatactttataatagttagatataacagattatggacaacttaatatttcttctttttggctgggcgcggtggctcatgcctgtaatcccagcactttgggaggccgaggcgggcagatcacgaagtcaggagatcgagaccatcctggctaacacagtgaaaccccgtctctactaaaaaaatacaaaaaattagccgggcgttgtggcgggcgcctgtagtcccagctactcgggaggctgaggcaggagaatggcatgaacctgggaggcggagcttgcagtgagccgagatcccgccactgtactccagcctgggcaacagaacgagactccgtctc

SEQ ID NO: 859 - DNA, 2548 bp, Homo sapiens
  source 1..2548: mol_type = unassigned DNA
tccaggaagcatcattcccagagctgccagagcagtggccctggaaaatatggaagcagctgtcagccatggcccagggcctgagcgtatgattctcaggaaaagtgggcaggacatctgactgtcagagtttgtcctctcacttctggagaagatgcagacacaggagatcctgaggatactgcgactgcctgagctaggtgacttgggacagtttttccgcagcctctcggccaccaccctcgtgagtatgggtgccctggctgccatccttgcctactggttcactcaccggccaaaggccttgcagccgccatgcaacctcctgatgcagtcagaagaagtagaggacagtggcggggcacggcgatctgtgattgggtctggccctcagctacttacccactactatgatgatgcccggaccatgtaccaggtgttccgccgtgggcttagcatctcagggaatgggccctgtcttggtttcaggaagcctaagcagccttaccagtggctgtcctaccaggaggtggccgacagggctgaatttctggggtccggacttctccagcacaattgtaaagcatgcactgatcagtttattggtgtttttgcacaaaatcggccagagtggatcattgtggagctggcctgctacacatattccatggtggtggtcccgctctatgacaccctgggccctggggctatccgctacatcatcaatacagcggacatcagcaccgtgattgtggacaaacctcagaaggctgtgcttctgctagagcatgtggagaggaaggagactccaggcctcaagctgatcatcctcatggacccattcgaagaagccctgaaagagagagggcagaagtgcggggtggtcattaagtccatgcaggccgtggaggactgtggccaagagaatcaccaggctcctgtgcccccgcagcctgatgacctctccattgtgtgtttcacaagcggcacgacagggaacccaaaaggtgcgatgctcacccatgggaacgtggtggctgatttctcaggctttctgaaagtgacagagaaagtgatctttccgagacaggacgatgtgctcatctccttcctgcctctggctcacatgtttgagagagtaatccagtctgtcgtctattgccacggagggcgtgttggcttcttccagggagatatccgccttctctcagatgacatgaaggctctatgccccaccatcttccctgtggtcccacgactgctgaaccggatgtacgacaagatcttcagccaggcaaacacaccattaaagcgctggctcctggagtttgcagcaaagcgtaagcaagccgaggtccggagtggaatcatcaggaatgatagtatctgggatgaactcttctttaataagattcaggccagtcttggtgggtgtgtgcggatgattgttactggagcagccccagcatcaccaacagttctgggatttctccgggcagctctagggtgccaggtttatgaaggttatggccaaactgagtgcacagctggatgtaccttcaccactcctggcgactggacctcagggcacgtaggggcgccacttccctgcaatcatatcaagctcgttgatgttgaggaactgaactactgggcctgcaaaggagagggagagatatgtgtgagaggaccaaatgtgttcaaaggctacttgaaagatccagacaggacgaaggaggccctggacagcgatggctggcttcacactggagacatcggaaaatggctgccggcaggaactcttaaaattattgatcggaaaaagcatatatttaaacttgctcagggagaatatgttgcacccgagaagattgagaacatctacatccggagccaacctgtggcgcaaatctatgtccatggggacagcttaaaggcctttttggtaggcattgttgtgcctgaccctgaagttatgccctcctgggcccagaagagaggaattgaaggaacatatgcagatctctgcacaaataaggatctgaagaaagccattttggaagatatggtgaggttaggaaaagaaagtggactccattcttttgagcaggttaaagccattcacatccattctgacatgttctcagttcaaaatggcttgctgacaccaacactaaaagctaagagacctgagctgagagagtacttcaaaaaacaaatagaagagctttactcaatctccatgtgaagttcaaggaaagttcttctcagtgtaatgaactgtctagcaatattatagttattcttgaaagtaatgagtcaaaatgacacagctgaaaatgaataagcatctgattttatgactgagccttttcctgtcccaagaggtctttaacaatattttctctatcatcaatgagtatattttatttttattataaaaatgatattgtggtggactgctaaaaatatcacaaatggcaatgtaaaaatcaagacattttctcaagaactgtgtaccactaaaagtaatatattgtcaatgttc

SEQ ID NO: 860 - DNA, 2658 bp, Homo sapiens
  source 1..2658: mol_type = unassigned DNA
ggctctaccaccacccggcttctcagagcaggcggctgttgccatcgactgtccccaggagggcagactcggggcagggccttcgccacttttgtgctttgatcaagatgtggtaacttctttccctgggccccacaggccctataaagggaggctggttctagtgggacgagctcagccgcctcctcagtgccaggagcctgctggaaagagtttgtcctctcacttctggagaagatgcagacacaggagatcctgaggatactgcgactgcctgagctaggtgacttgggacagtttttccgcagcctctcggccaccaccctcgtgagtatgggtgccctggctgccatccttgcctactggttcactcaccggccaaaggccttgcagccgccatgcaacctcctgatgcagtcagaagaagtagaggacagtggcggggcacggcgatctgtgattgggtctggccctcagctacttacccactactatgatgatgcccggaccatgtaccaggtgttccgccgtgggcttagcatctcagggaatgggccctgtcttggtttcaggaagcctaagcagccttaccagtggctgtcctaccaggaggtggccgacagggctgaatttctggggtccggacttctccagcacaattgtaaagcatgcactgatcagtttattggtgtttttgcacaaaatcggccagagtggatcattgtggagctggcctgctacacatattccatggtggtggtcccgctctatgacaccctgggccctggggctatccgctacatcatcaatacagcggacatcagcaccgtgattgtggacaaacctcagaaggctgtgcttctgctagagcatgtggagaggaaggagactccaggcctcaagctgatcatcctcatggacccattcgaagaagccctgaaagagagagggcagaagtgcggggtggtcattaagtccatgcaggccgtggaggactgtggccaagagaatcaccaggctcctgtgcccccgcagcctgatgacctctccattgtgtgtttcacaagcggcacgacagggaacccaaaaggtgcgatgctcacccatgggaacgtggtggctgatttctcaggctttctgaaagtgacagagagtcagtgggctcccacttgtgcggatgtgcacatttcctatttgcctttagcacacatgtttgagcgaatggtgcagtctgtcgtctattgccacggagggcgtgttggcttcttccagggagatatccgccttctctcagatgacatgaaggctctatgccccaccatcttccctgtggtcccacgactgctgaaccggatgtacgacaagatcttcagccaggcaaacacaccattaaagcgctggctcctggagtttgcagcaaagcgtaagcaagccgaggtccggagtggaatcatcaggaatgatagtatctgggatgaactcttctttaataagattcaggccagtcttggtgggtgtgtgcggatgattgttactggagcagccccagcatcaccaacagttctgggatttctccgggcagctctagggtgccaggtttatgaaggttatggccaaactgagtgcacagctggatgtaccttcaccactcctggcgactggacctcagggcacgtaggggcgccacttccctgcaatcatatcaagctcgttgatgttgaggaactgaactactgggcctgcaaaggagagggagagatatgtgtgagaggaccaaatgtgttcaaaggctacttgaaagatccagacaggacgaaggaggccctggacagcgatggctggcttcacactggagacatcggaaaatggctgccggcaggaactcttaaaattattgatcggaaaaagcatatatttaaacttgctcagggagaatatgttgcacccgagaagattgagaacatctacatccggagccaacctgtggcgcaaatctatgtccatggggacagcttaaaggcctttttggtaggcattgttgtgcctgaccctgaagttatgccctcctgggcccagaagagaggaattgaaggaacatatgcagatctctgcacaaataaggatctgaagaaagccattttggaagatatggtgaggttaggaaaagaaagtggactccattcttttgagcaggttaaagccattcacatccattctgacatgttctcagttcaaaatggcttgctgacaccaacactaaaagctaagagacctgagctgagagagtacttcaaaaaacaaatagaagagctttactcaatctccatgtgaagttcaaggaaagttcttctcagtgtaatgaactgtctagcaatattatagttattcttgaaagtaatgagtcaaaatgacacagctgaaaatgaataagcatctgattttatgactgagccttttcctgtcccaagaggtctttaacaatattttctctatcatcaatgagtatattttatttttattataaaaatgatattgtggtggactgctaaaaatatcacaaatggcaatgtaaaaatcaagacattttctcaagaactgtgtaccactaaaagtaatatattgtcaatgttcacagaactattaaacataaaggaaaaa

SEQ ID NO: 861 - DNA, 2622 bp, Homo sapiens
  source 1..2622: mol_type = unassigned DNA
aaccgcgacccggctgccattcgagcctgcccagccataaaacccaggctgcgagtcgcgcgggggcagggtcgcgtgttgatggggtgggtggcggcggggtgggctcaatgtcacgctctggcgctcgtcgcccgtgctcccccttccagccggtttccgcagaatgccagagtttgtcctctcacttctggagaagatgcagacacaggagatcctgaggatactgcgactgcctgagctaggtgacttgggacagtttttccgcagcctctcggccaccaccctcgtgagtatgggtgccctggctgccatccttgcctactggttcactcaccggccaaaggccttgcagccgccatgcaacctcctgatgcagtcagaagaagtagaggacagtggcggggcacggcgatctgtgattgggtctggccctcagctacttacccactactatgatgatgcccggaccatgtaccaggtgttccgccgtgggcttagcatctcagggaatgggccctgtcttggtttcaggaagcctaagcagccttaccagtggctgtcctaccaggaggtggccgacagggctgaatttctggggtccggacttctccagcacaattgtaaagcatgcactgatcagtttattggtgtttttgcacaaaatcggccagagtggatcattgtggagctggcctgctacacatattccatggtggtggtcccgctctatgacaccctgggccctggggctatccgctacatcatcaatacagcggacatcagcaccgtgattgtggacaaacctcagaaggctgtgcttctgctagagcatgtggagaggaaggagactccaggcctcaagctgatcatcctcatggacccattcgaagaagccctgaaagagagagggcagaagtgcggggtggtcattaagtccatgcaggccgtggaggactgtggccaagagaatcaccaggctcctgtgcccccgcagcctgatgacctctccattgtgtgtttcacaagcggcacgacagggaacccaaaaggtgcgatgctcacccatgggaacgtggtggctgatttctcaggctttctgaaagtgacagagaaagtgatctttccgagacaggacgatgtgctcatctccttcctgcctctggctcacatgtttgagagagtaatccagtctgtcgtctattgccacggagggcgtgttggcttcttccagggagatatccgccttctctcagatgacatgaaggctctatgccccaccatcttccctgtggtcccacgactgctgaaccggatgtacgacaagatcttcagccaggcaaacacaccattaaagcgctggctcctggagtttgcagcaaagcgtaagcaagccgaggtccggagtggaatcatcaggaatgatagtatctgggatgaactcttctttaataagattcaggccagtcttggtgggtgtgtgcggatgattgttactggagcagccccagcatcaccaacagttctgggatttctccgggcagctctagggtgccaggtttatgaaggttatggccaaactgagtgcacagctggatgtaccttcaccactcctggcgactggacctcagggcacgtaggggcgccacttccctgcaatcatatcaagctcgttgatgttgaggaactgaactactgggcctgcaaaggagagggagagatatgtgtgagaggaccaaatgtgttcaaaggctacttgaaagatccagacaggacgaaggaggccctggacagcgatggctggcttcacactggagacatcggaaaatggctgccggcaggaactcttaaaattattgatcggaaaaagcatatatttaaacttgctcagggagaatatgttgcacccgagaagattgagaacatctacatccggagccaacctgtggcgcaaatctatgtccatggggacagcttaaaggcctttttggtaggcattgttgtgcctgaccctgaagttatgccctcctgggcccagaagagaggaattgaaggaacatatgcagatctctgcacaaataaggatctgaagaaagccattttggaagatatggtgaggttaggaaaagaaagtggactccattcttttgagcaggttaaagccattcacatccattctgacatgttctcagttcaaaatggcttgctgacaccaacactaaaagctaagagacctgagctgagagagtacttcaaaaaacaaatagaagagctttactcaatctccatgtgaagttcaaggaaagttcttctcagtgtaatgaactgtctagcaatattatagttattcttgaaagtaatgagtcaaaatgacacagctgaaaatgaataagcatctgattttatgactgagccttttcctgtcccaagaggtctttaacaatattttctctatcatcaatgagtatattttatttttattataaaaatgatattgtggtggactgctaaaaatatcacaaatggcaatgtaaaaatcaagacattttctcaagaactgtgtaccactaaaagtaatatattgtcaatgttcacagaactattaaacataaaggaaaaaca

SEQ ID NO: 862 - DNA, 2148 bp, Homo sapiens
  source 1..2148: mol_type = unassigned DNA
gggctgcggggctgcggggctgcgggtcggggaggccgggccgggccgggccgggccccgctgaccgccatgctgaccttcttcctcgtgtcggggggctccctctggctattcgtagagtttgtcctctcacttctggagaagatgcagacacaggagatcctgaggatactgcgactgcctgagctaggtgacttgggacagtttttccgcagcctctcggccaccaccctcgtgagtatgggtgccctggctgccatccttgcctactggttcactcaccggccaaaggccttgcagccgccatgcaacctcctgatgcagtcagaagaagtagaggacagtggcggggcacggcgatctgtgattgggtctggccctcagctacttacccactactatgatgatgcccggaccatgtaccaggtgttccgccgtgggcttagcatctcagggaatgggccctgtcttggtttcaggaagcctaagcagccttaccagtggctgtcctaccaggaggtggccgacagggctgaatttctggggtccggacttctccagcacaattgtaaagcatgcactgatcagtttattggtgtttttgcacaaaatcggccagagtggatcattgtggagctggcctgctacacatattccatggtggtggtcccgctctatgacaccctgggccctggggctatccgctacatcatcaatacagcggacatcagcaccgtgattgtggacaaacctcagaaggctgtgcttctgctagagcatgtggagaggaaggagactccaggcctcaagctgatcatcctcatggacccattcgaagaagccctgaaagagagagggcagaagtgcggggtggtcattaagtccatgcaggccgtggaggactgtggccaagagaatcaccaggctcctgtgcccccgcagcctgatgacctctccattgtgtgtttcacaagcggcacgacagggaacccaaaaggtgcgatgctcacccatgggaacgtggtggctgatttctcaggctttctgaaagtgacagagagtcagtgggctcccacttgtgcggatgtgcacatttcctatttgcctttagcacacatgtttgagcgaatggtgcagtctgtcgtctattgccacggagggcgtgttggcttcttccagggagatatccgccttctctcagatgacatgaaggctctatgccccaccatcttccctgtggtcccacgactgctgaaccggatgtacgacaagatcttcagccaggcaaacacaccattaaagcgctggctcctggagtttgcagcaaagcgtaagcaagccgaggtccggagtggaatcatcaggaatgatagtatctgggatgaactcttctttaataagattcaggccagtcttggtgggtgtgtgcggatgattgttactggagcagccccagcatcaccaacagttctgggatttctccgggcagctctagggtgccaggtttatgaaggttatggccaaactgagtgcacagctggatgtaccttcaccactcctggcgactggacctcagggcacgtaggggcgccacttccctgcaatcatatcaagctcgttgatgttgaggaactgaactactgggcctgcaaaggagagggagagatatgtgtgagaggaccaaatgtgttcaaaggctacttgaaagatccagacaggacgaaggaggccctggacagcgatggctggcttcacactggagacatcggaaaatggctgccggcaggaactcttaaaattattgatcggaaaaagcatatatttaaacttgctcagggagaatatgttgcacccgagaagattgagaacatctacatccggagccaacctgtggcgcaaatctatgtccatggggacagcttaaaggcctttttggtaggcattgttgtgcctgaccctgaagttatgccctcctgggcccagaagagaggaattgaaggaacatatgcagatctctgcacaaataaggatctgaagaaagccattttggaagatatggtgaggttaggaaaagaaagtggactccattcttttgagcaggacctaccacagtgcttaatacagattaaggtgttcagtaaatattga

SEQ ID NO: 863 - DNA, 6539 bp, Homo sapiens
  source 1..6539: mol_type = unassigned DNA
cggcagcggcggcggcggcgcggctactgctggggctgctgggctgcggggctgcggggctgcgggtcggggaggccgggccgggccgggccgggccccgctgaccgccatgctgaccttcttcctcgtgtcggggggctccctctggctattcgtagagtttgtcctctcacttctggagaagatgcagacacaggagatcctgaggatactgcgactgcctgagctaggtgacttgggacagtttttccgcagcctctcggccaccaccctcgtgagtatgggtgccctggctgccatccttgcctactggttcactcaccggccaaaggccttgcagccgccatgcaacctcctgatgcagtcagaagaagtagaggacagtggcggggcacggcgatctgtgattgggtctggccctcagctacttacccactactatgatgatgcccggaccatgtaccaggtgttccgccgtgggcttagcatctcagggaatgggccctgtcttggtttcaggaagcctaagcagccttaccagtggctgtcctaccaggaggtggccgacagggctgaatttctggggtccggacttctccagcacaattgtaaagcatgcactgatcagtttattggtgtttttgcacaaaatcggccagagtggatcattgtggagctggcctgctacacatattccatggtggtggtcccgctctatgacaccctgggccctggggctatccgctacatcatcaatacagcggacatcagcaccgtgattgtggacaaacctcagaaggctgtgcttctgctagagcatgtggagaggaaggagactccaggcctcaagctgatcatcctcatggacccattcgaagaagccctgaaagagagagggcagaagtgcggggtggtcattaagtccatgcaggccgtggaggactgtggccaagagaatcaccaggctcctgtgcccccgcagcctgatgacctctccattgtgtgtttcacaagcggcacgacagggaacccaaaaggtgcgatgctcacccatgggaacgtggtggctgatttctcaggctttctgaaagtgacagagaaagtgatctttccgagacaggacgatgtgctcatctccttcctgcctctggctcacatgtttgagagagtaatccagtctgtcgtctattgccacggagggcgtgttggcttcttccagggagatatccgccttctctcagatgacatgaaggctctatgccccaccatcttccctgtggtcccacgactgctgaaccggatgtacgacaagatcttcagccaggcaaacacaccattaaagcgctggctcctggagtttgcagcaaagcgtaagcaagccgaggtccggagtggaatcatcaggaatgatagtatctgggatgaactcttctttaataagattcaggccagtcttggtgggtgtgtgcggatgattgttactggagcagccccagcatcaccaacagttctgggatttctccgggcagctctagggtgccaggtttatgaaggttatggccaaactgagtgcacagctggatgtaccttcaccactcctggcgactggacctcagggcacgtaggggcgccacttccctgcaatcatatcaagctcgttgatgttgaggaactgaactactgggcctgcaaaggagagggagagatatgtgtgagaggaccaaatgtgttcaaaggctacttgaaagatccagacaggacgaaggaggccctggacagcgatggctggcttcacactggagacatcggaaaatggctgccggcaggaactcttaaaattattgatcggaaaaagcatatatttaaacttgctcagggagaatatgttgcacccgagaagattgagaacatctacatccggagccaacctgtggcgcaaatctatgtccatggggacagcttaaaggcctttttggtaggcattgttgtgcctgaccctgaagttatgccctcctgggcccagaagagaggaattgaaggaacatatgcagatctctgcacaaataaggatctgaagaaagccattttggaagatatggtgaggttaggaaaagaaagtggactccattcttttgagcaggttaaagccattcacatccattctgacatgttctcagttcaaaatggcttgctgacaccaacactaaaagctaagagacctgagctgagagagtacttcaaaaaacaaatagaagagctttactcaatctccatgtgaagttcaaggaaagttcttctcagtgtaatgaactgtctagcaatattatagttattcttgaaagtaatgagtcaaaatgacacagctgaaaatgaataagcatctgattttatgactgagccttttcctgtcccaagaggtctttaacaatattttctctatcatcaatgagtatattttatttttattataaaaatgatattgtggtggactgctaaaaatatcacaaatggcaatgtaaaaatcaagacattttctcaagaactgtgtaccactaaaagtaatatattgtcaatgttcacagaactattaaacataaaggaaaaacataagtgatatattctacttaattatttgtgaatcagtaaccagatgcagcaaatatctaggcaatgtggactacctcattcagtaactgattgtcaaaatcacaattaaatcagacttcaaaaattaaagctaggtgtatagaatcatgctaaaagaaaacatgataactcatagtctacgtaacttcagagtctttaaacatgacaatccacattgtcatatgtgaaaattttctctctgatttttactttcattcatgaaaaatgaaaattcagaaattctttttttcctttttgttttgagacagggtctgctctgtcacctaggctggagtgcagtggcttaatcatggctcattgcagtctccatctcctgggctcgagtgatcctcctgtctcacctcccaagtagctgagactacagtacaggcacatgccaccacacctggctaatagaaattttttttttagagattttgctcaggctggtctcaaactcctgagctcaagggatcctcccgccttggcctccctaagtgctaggattacaggcatgagccattgttcccagccaaattcagatattattaaaacacatgtcatatttatatagtaacttacaaagacctttcaatacattttctcatttattaagctcattaaagtattcaggaactacctagaaaaaatataatgtaaaactattcaaggatagtgtgtgtatgttcatggacttcttattataatgaattctaaaagacatctgttgactctacaatgaatggatccttgaggaatacttgggagaagaaactcagagttatttctcagggtaggcagcaattaatgtacctacattccttgctggggtcttctagtcttccattcccaatgtgcccatgctatgcctggaaaccctatatggttgtaattctgaacaatttcactttttttccagtaagaatatcaaggcagaaggtgggaaggaggggacattatttccagggaaaatagtttttcaacaatataactttgataaacctctttaaaatgccccaagaaaactttttaagtccatagacaaagaaatactgcctaatggcataattacattcctaaaatctttaagcgtgccgaagtttaaccactaaaacctcctttcttgcattatgtatttagatgcaccctgtattggggtgtcaacaatttcttataattaaaggccagataccatggacagcaattaagttccaagctatagattgtgcctctgaaaaaggcatggaccccaggaacgtgtttttcttctgtagagacaagactctaaaagcatatcaacaatccatatgcaattcatgtgttaatttaaaatgtatgtgctcagtgtttgtagtctagaagctcctttcccttggaggaatgccaagcagtttgcaaaaataaatgctgttagttaaaaaccacataatcacatgggcctactgaataaatatgcatcagtgattatatacttatatttcagtcttgtcaaaagtgaatcactgtttcatttgatgtatttacccagtctttttatccagtttttcttgggcatattctctctgaagacccactgttgcacttctaaatttgacagttaagaaatgagctagttctatacacactgatttttaaaggcgtttctgaataaactaatacttaaaatgtccaaagtcacatctgtacagcattagatttttatatttaatatatatttgactaattaaaagtgaaagttgttacctgaactggatattcatactattttaagggcaagttgcttacatttcaataacaacaaaaaaagaatctgtttcccattgtcctcctactcaactaaaattcatagttggctttaagcccaaaagaattttgaacaatgtgacagaaacaagtaatgtaaaacttattttgttttatttatactttataatagttagatataacagattatggacaacttaatatttcttctttttggctgggcgcggtggctcatgcctgtaatcccagcactttgggaggccgaggcgggcagatcacgaagtcaggagatcgagaccatcctggctaacacagtgaaaccccgtctctactaaaaaaatacaaaaaattagccgggcgttgtggcgggcgcctgtagtcccagctactcgggaggctgaggcaggagaatggcatgaacctgggaggcggagcttgcagtgagccgagatcccgccactgtactccagcctgggcaacagaacgagactccgtctcaaaaagaaagaaaaaaaaaaaacaaaaacaaggtttcttctttttgccacttaaaatatcttatatttctagatttccaggtctatgtggaaatcatcacacttgggccaataaatgggttagttcagatgtgctgagaaaagtaaatagtgtaccctaaatatcttgcatgtacatttatctatttctctgtttaatgccacttaattttgtaagaaatgagaaatgaaaccctatgtatcagtggaaaaatccttcttgcttcagatttcccaactttattctggaggagaaaaaaatctgtatttctcattaacagagatagaaaaaggtgatgtacttacgatggtcacattcatattgggcattggatctatttaagcctagaagtataacagataatcagttccttaagtgtaaatatgttcttaaatgtttggcctttttatctgttattcaaatgtattagtaattctcatattttgcaaacagatccttttgtgtatattataaaatatataccaaatctgtttttccttttgctgtggaagatgtctttatataatattgagacttcccttgcaaatgagagacgggactctggtcaggtatagtgtgtaggcctagccccatgtattaggaactcataaactcagaaatccaaggattaaacattttatgtctccttcatttatgcaagtcatgctttcattctacatgtagttaaaactacaagtatgagaaaaaatagaactttccattggaattttttccaatcaggtaatgttttagcaacttgaaatcagcacttaatttgattgtattacctatcaaagaaccaataacctttcctttttctgcagtaaagaaaatgaaatatcctttattttccaaatgtatgaagcacaaatgcaatatagttatttaaaatataaaatactttaaaatgaatgtgaagaatgggaaaatatatttttgcatgaaaacagactacttacaaatgtgcttaatatctcaggaaaaaaagaatgaataaccgtatataaaattggtaaactataaattggctgtatttccttgccggttttaattttaaggaagcatttacatgaaaagaaaaaaggatcctagtagtctgaatttcctctcaagtatgctagaaaatactttctatgaatttacaattaactgcaataagaagtgggttagcattcaagtaaggtcaataccccaaatgagaaactcttcagttagaacacattagtggttgtaacacagaggcagtagataaatatttgaaatgtgagcatttctaaacttggtaccaaatggaaagggtttcatgaggtgacagtggcttttaaacattcatttgaccgattattctaattttccttgttaaatcattgcaacagttgcatgggggagaatggatattttttgaagaattgcttattccactttcaatttttaaaaatcgaggggattaaaatattactttttaaatatgcataaaagtatcttaactgtaattacattttcagttgctttgttatagtagcatgcatattaaatataaaatgcatttatgaaaatttttgtaaaaaataaaagatttttcatttctcaaa

SEQ ID NO: 864 - DNA, 4913 bp, Homo sapiens
  source 1..4913: mol_type = unassigned DNA
gggctgcggggctgcggggctgcgggtcggggaggccgggccgggccgggccgggccccgctgaccgccatgctgaccttcttcctcgtgtcggggggctccctctggctattcgtagagtttgtcctctcacttctggagaagatgcagacacaggagatcctgaggatactgcgactgcctgagctaggtgacttgggacagtttttccgcagcctctcggccaccaccctcgtgagtatgggtgccctggctgccatccttgcctactggttcactcaccggccaaaggccttgcagccgccatgcaacctcctgatgcagtcagaagaagtagaggacagtggcggggcacggcgatctgtgattgggtctggccctcagctacttacccactactatgatgatgcccggaccatgtaccaggtgttccgccgtgggcttagcatctcagggaatgggccctgtcttggtttcaggaagcctaagcagccttaccagtggctgtcctaccaggaggtggccgacagggctgaatttctggggtccggacttctccagcacaattgtaaagcatgcactgatcagtttattggtgtttttgcacaaaatcggccagagtggatcattgtggagctggcctgctacacatattccatggtggtggtcccgctctatgacaccctgggccctggggctatccgctacatcatcaatacagggctcagctgccaagaaggagcctctgcaacagcctccacacaggcggacatcagcaccgtgattgtggacaaacctcagaaggctgtgcttctgctagagcatgtggagaggaaggagactccaggcctcaagctgatcatcctcatggacccattcgaagaagccctgaaagagagagggcagaagtgcggggtggtcattaagtccatgcaggccgtggaggactgtggccaagagaatcaccaggctcctgtgcccccgcagcctgatgacctctccattgtgtgtttcacaagcggcacgacagggaacccaaaaggtgcgatgctcacccatgggaacgtggtggctgatttctcaggctttctgaaagtgacagagaaagtgatctttccgagacaggacgatgtgctcatctccttcctgcctctggctcacatgtttgagagagtaatccagtctgtcgtctattgccacggagggcgtgttggcttcttccagggagatatccgccttctctcagatgacatgaaggctctatgccccaccatcttccctgtggtcccacgactgctgaaccggatgtacgacaagatcttcagccaggcaaacacaccattaaagcgctggctcctggagtttgcagcaaagcgtaagcaagccgaggtccggagtggaatcatcaggaatgatagtatctgggatgaactcttctttaataagattcaggccagtcttggtgggtgtgtgcggatgattgttactggagcagccccagcatcaccaacagttctgggatttctccgggcagctctagggtgccaggtttatgaaggttatggccaaactgagtgcacagctggatgtaccttcaccactcctggcgactggacctcagggcacgtaggggcgccacttccctgcaatcatatcaagctcgttgatgttgaggaactgaactactgggcctgcaaaggagagggagagatatgtgtgagaggaccaaatgtgttcaaaggctacttgaaagatccagacaggacgaaggaggccctggacagcgatggctggcttcacactggagacatcggaaaatggctgccggcaggaactcttaaaattattgatcggaaaaagcatatatttaaacttgctcagggagaatatgttgcacccgagaagattgagaacatctacatccggagccaacctgtggcgcaaatctatgtccatggggacagcttaaaggcctttttggtaggcattgttgtgcctgaccctgaagttatgccctcctgggcccagaagagaggaattgaaggaacatatgcagatctctgcacaaataaggatctgaagaaagccattttggaagatatggtgaggttaggaaaagaaagtggactccattcttttgagcaggttaaagccattcacatccattctgacatgttctcagttcaaaatggcttgctgacaccaacactaaaagctaagagacctgagctgagagagtacttcaaaaaacaaatagaagagctttactcaatctccatgtgaagttcaaggaaagttcttctcagtgtaatgaactgtctagcaatattatagttattcttgaaagtaatgagtcaaaatgacacagctgaaaatgaataagcatctgattttatgactgagccttttcctgtcccaagaggtctttaacaatattttctctatcatcaatgagtatattttatttttattataaaaatgatattgtggtggactgctaaaaatatcacaaatggcaatgtaaaaatcaagacattttctcaagaactgtgtaccactaaaagtaatatattgtcaatgttcacagaactattaaacataaaggaaaaacataagtgatatattctacttaattatttgtgaatcagtaaccagatgcagcaaatatctaggcaatgtggactacctcattcagtaactgattgtcaaaatcacaattaaatcagacttcaaaaattaaagctaggtgtatagaatcatgctaaaagaaaacatgataactcatagtctacgtaacttcagagtctttaaacatgacaatccacattgtcatatgtgaaaattttctctctgatttttactttcattcatgaaaaatgaaaattcagaaattctttttttcctttttgttttgagacagggtctgctctgtcacctaggctggagtgcagtggcttaatcatggctcattgcagtctccatctcctgggctcgagtgatcctcctgtctcacctcccaagtagctgagactacagtacaggcacatgccaccacacctggctaatagaaattttttttttagagattttgctcaggctggtctcaaactcctgagctcaagggatcctcccgccttggcctccctaagtgctaggattacaggcatgagccattgttcccagccaaattcagatattattaaaacacatgtcatatttatatagtaacttacaaagacctttcaatacattttctcatttattaagctcattaaagtattcaggaactacctagaaaaaatataatgtaaaactattcaaggatagtgtgtgtatgttcatggacttcttattataatgaattctaaaagacatctgttgactctacaatgaatggatccttgaggaatacttgggagaagaaactcagagttatttctcagggtaggcagcaattaatgtacctacattccttgctggggtcttctagtcttccattcccaatgtgcccatgctatgcctggaaaccctatatggttgtaattctgaacaatttcactttttttccagtaagaatatcaaggcagaaggtgggaaggaggggacattatttccagggaaaatagtttttcaacaatataactttgataaacctctttaaaatgccccaagaaaactttttaagtccatagacaaagaaatactgcctaatggcataattacattcctaaaatctttaagcgtgccgaagtttaaccactaaaacctcctttcttgcattatgtatttagatgcaccctgtattggggtgtcaacaatttcttataattaaaggccagataccatggacagcaattaagttccaagctatagattgtgcctctgaaaaaggcatggaccccaggaacgtgtttttcttctgtagagacaagactctaaaagcatatcaacaatccatatgcaattcatgtgttaatttaaaatgtatgtgctcagtgtttgtagtctagaagctcctttcccttggaggaatgccaagcagtttgcaaaaataaatgctgttagttaaaaaccacataatcacatgggcctactgaataaatatgcatcagtgattatatacttatatttcagtcttgtcaaaagtgaatcactgtttcatttgatgtatttacccagtctttttatccagtttttcttgggcatattctctctgaagacccactgttgcacttctaaatttgacagttaagaaatgagctagttctatacacactgatttttaaaggcgtttctgaataaactaatacttaaaatgtccaaagtcacatctgtacagcattagatttttatatttaatatatatttgactaattaaaagtgaaagttgttacctgaactggatattcatactattttaagggcaagttgcttacatttcaataacaacaaaaaaagaatctgtttcccattgtcctcctactcaactaaaattcatagttggctttaagcccaaaagaattttgaacaatgtgacagaaacaagtaatgtaaaacttattttgttttatttatactttataatagttagatataacagattatggacaacttaatatttcttctttttggctgggcgcggtggctcatgcctgtaatcccagcactttgggaggccgaggcgggcagatcacgaagtcaggagatcgagaccatcctggctaacacagtgaaaccccgtctctactaaaaaaatacaaaaaattagccgggcgttgtggcgggcgcctgtagtcccagctactcgggaggctgaggcaggagaatggcatgaacctgggaggcggagcttgcagtgagccgagatcccgccactgtactccagcctgggcaacagaacgagactccgtctc

SEQ ID NO: 865 - DNA, 2180 bp, Homo sapiens
  source 1..2180: mol_type = unassigned DNA
gacaccgcggtcagtgcggggcaagccccagacccggccggccaggctgcagggcagggaagtttgtcctctcacttctggagaagatgcagacacaggagatcctgaggatactgcgactgcctgagctaggtgacttgggacagtttttccgcagcctctcggccaccaccctcgtgagtatgggtgccctggctgccatccttgcctactggttcactcaccggccaaaggccttgcagccgccatgcaacctcctgatgcagtcagaagaagtagaggacagtggcggggcacggcgatctgtgattgggtctggccctcagctacttacccactactatgatgatgcccggaccatgtaccaggtgttccgccgtgggcttagcatctcagggaatgggccctgtcttggtttcaggaagcctaagcagccttaccagtggctgtcctaccaggaggtggccgacagggctgaatttctggggtccggacttctccagcacaattgtaaagcatgcactgatcagtttattggtgtttttgcacaaaatcggccagagtggatcattgtggagctggcctgctacacatattccatggtggtggtcccgctctatgacaccctgggccctggggctatccgctacatcatcaatacagcggacatcagcaccgtgattgtggacaaacctcagaaggctgtgcttctgctagagcatgtggagaggaaggagactccaggcctcaagctgatcatcctcatggacccattcgaagaagccctgaaagagagagggcagaagtgcggggtggtcattaagtccatgcaggccgtggaggactgtggccaagagaatcaccaggctcctgtgcccccgcagcctgatgacctctccattgtgtgtttcacaagcggcacgacagggaacccaaaaggtgcgatgctcacccatgggaacgtggtggctgatttctcaggctttctgaaagtgacagagagtcagtgggctcccacttgtgcggatgtgcacatttcctatttgcctttagcacacatgtttgagcgaatggtgcagtctgtcgtctattgccacggagggcgtgttggcttcttccagggagatatccgccttctctcagatgacatgaaggctctatgccccaccatcttccctgtggtcccacgactgctgaaccggatgtacgacaagatcttcagccaggcaaacacaccattaaagcgctggctcctggagtttgcagcaaagcgtaagcaagccgaggtccggagtggaatcatcaggaatgatagtatctgggatgaactcttctttaataagattcaggccagtcttggtgggtgtgtgcggatgattgttactggagcagccccagcatcaccaacagttctgggatttctccgggcagctctagggtgccaggtttatgaaggttatggccaaactgagtgcacagctggatgtaccttcaccactcctggcgactggacctcagggcacgtaggggcgccacttccctgcaatcatatcaagctcgttgatgttgaggaactgaactactgggcctgcaaaggagagggagagatatgtgtgagaggaccaaatgtgttcaaaggctacttgaaagatccagacaggacgaaggaggccctggacagcgatggctggcttcacactggagacatcggaaaatggctgccggcaggaactcttaaaattattgatcggaaaaagcatatatttaaacttgctcagggagaatatgttgcacccgagaagattgagaacatctacatccggagccaacctgtggcgcaaatctatgtccatggggacagcttaaaggcctttttggtaggcattgttgtgcctgaccctgaagttatgccctcctgggcccagaagagaggaattgaaggaacatatgcagatctctgcacaaataaggatctgaagaaagccattttggaagatatggtgaggttaggaaaagaaagtggactccattcttttgagcaggttaaagccattcacatccattctgacatgttctcagttcaaaatggcttgctgacaccaacactaaaagctaagagacctgagctgagagagtacttcaaaaaacaaatagaagagctttactcaatctccatgtga

SEQ ID NO: 866 - DNA, 2490 bp, Homo sapiens
  source 1..2490: mol_type = unassigned DNA
gctcgtcgcccgtgctcccccttccagccggtttccgcagaatgccagagtttgtcctctcacttctggagaagatgcagacacaggagatcctgaggatactgcgactgcctgagctaggtgacttgggacagtttttccgcagcctctcggccaccaccctcgtgagtatgggtgccctggctgccatccttgcctactggttcactcaccggccaaaggccttgcagccgccatgcaacctcctgatgcagtcagaagaagtagaggacagtggcggggcacggcgatctgtgattgggtctggccctcagctacttacccactactatgatgatgcccggaccatgtaccaggtgttccgccgtgggcttagcatctcagggaatgggccctgtcttggtttcaggaagcctaagcagccttaccagtggctgtcctaccaggaggtggccgacagggctgaatttctggggtccggacttctccagcacaattgtaaagcatgcactgatcagtttattggtgtttttgcacaaaatcggccagagtggatcattgtggagctggcctgctacacatattccatggtggtggtcccgctctatgacaccctgggccctggggctatccgctacatcatcaatacagcggacatcagcaccgtgattgtggacaaacctcagaaggctgtgcttctgctagagcatgtggagaggaaggagactccaggcctcaagctgatcatcctcatggacccattcgaagaagccctgaaagagagagggcagaagtgcggggtggtcattaagtccatgcaggccgtggaggactgtggccaagagaatcaccaggctcctgtgcccccgcagcctgatgacctctccattgtgtgtttcacaagcggcacgacagggaacccaaaaggtgcgatgctcacccatgggaacgtggtggctgatttctcaggctttctgaaagtgacagagaaagtgatctttccgagacaggacgatgtgctcatctccttcctgcctctggctcacatgtttgagagagtaatccagtctgtcgtctattgccacggagggcgtgttggcttcttccagggagatatccgccttctctcagatgacatgaaggctctatgccccaccatcttccctgtggtcccacgactgctgaaccggatgtacgacaagatcttcagccaggcaaacacaccattaaagcgctggctcctggagtttgcagcaaagcgtaagcaagccgaggtccggagtggaatcatcaggaatgatagtatctgggatgaactcttctttaataagattcaggccagtcttggtgggtgtgtgcggatgattgttactggagcagccccagcatcaccaacagttctgggatttctccgggcagctctagggtgccaggtttatgaaggttatggccaaactgagtgcacagctggatgtaccttcaccactcctggcgactggacctcagggcacgtaggggcgccacttccctgcaatcatatcaagctcgttgatgttgaggaactgaactactgggcctgcaaaggagagggagagatatgtgtgagaggaccaaatgtgttcaaaggctacttgaaagatccagacaggacgaaggaggccctggacagcgatggctggcttcacactggagacatcggaaaatggctgccggcaggaactcttaaaattattgatcggaaaaagcatatatttaaacttgctcagggagaatatgttgcacccgagaagattgagaacatctacatccggagccaacctgtggcgcaaatctatgtccatggggacagcttaaaggcctttttggtaggcattgttgtgcctgaccctgaagttatgccctcctgggcccagaagagaggaattgaaggaacatatgcagatctctgcacaaataaggatctgaagaaagccattttggaagatatggtgaggttaggaaaagaaagtggactccattcttttgagcaggttaaagccattcacatccattctgacatgttctcagttcaaaatggcttgctgacaccaacactaaaagctaagagacctgagctgagagagtacttcaaaaaacaaatagaagagctttactcaatctccatgtgaagttcaaggaaagttcttctcagtgtaatgaactgtctagcaatattatagttattcttgaaagtaatgagtcaaaatgacacagctgaaaatgaataagcatctgattttatgactgagccttttcctgtcccaagaggtctttaacaatattttctctatcatcaatgagtatattttatttttattataaaaatgatattgtggtggactgctaaaaatatcacaaatggcaatgtaaaaatcaagacattttctcaagaactgtgtaccactaaaagtaatatattgtcaatgttcacagaactattaaacataaagg

SEQ ID NO: 867 - DNA, 2147 bp, Homo sapiens
  source 1..2147: mol_type = unassigned DNA
agccatctcttcccaaggcaggtggtgacttgagaactctgtgcctggtttctgaggactgtttcaccatgcagtggctaatgaggttccggaccctctggggcatccacaaatccttccacaacatccaccctgccccttcacagctgcgctgccggtctttatcagaatttggagccccaagatggaatgactatgaagtaccggaggaatttaactttgcaagttatgtactggactactgggctcaaaaggagaaggagggcaagagaggtccaaatccagctttttggtgggtgaatggccaaggggatgaagtaaagtggagcttcagagagatgggagacctaacccgccgtgtagccaacgtcttcacacagacctgtggcctacaacagggagaccatctggccttgatgctgcctcgagttcctgagtggtggctggtggctgtgggctgcatgcgaacagggatcatcttcattcctgcgaccatcctgttgaaggccaaagacattctctatcgactacagttgtctaaagccaagggcattgtgaccatagatgcccttgcctcagaggtggactccatagcttctcagtgcccctctctgaaaaccaagctcctggtgtctgatcacagccgtgaagggtggctggacttccgatcgctggttaaatcagcatccccagaacacacctgtgttaagtcaaagaccttggacccaatggtcatcttcttcaccagtgggaccacaggcttccccaagatggcaaaacactcccatgggttggccttacaaccctccttcccaggaagtaggaaattacggagcctgaagacatctgatgtctcctggtgcctgtcggactcaggatggattgtggctaccatttggaccctggtagaaccatggacagcgggttgtacagtctttatccaccatctgccacagtttgacaccaaggtcatcatacagacattgttgaaataccccattaaccacttttggggggtatcatctatatatcgaatgattctgcagcaggatttcaccagcatcaggttccctgccctggagcactgctatactggcggggaggtcgtgttgcccaaggatcaggaggagtggaaaagacggacgggccttctgctctacgagaactatgggcagtcggaaacgggactaatttgtgccacctactggggaatgaagatcaagccgggtttcatggggaaggccactccaccctacgacgtccagtttcatatggaggcctcagttgaaaactgcattattgtgagcatgaacaccgctgaccctggcagccagggcatcacacacagcctcttgctacaggtcattgatgacaagggcagcatcctgccacctaacacagaaggaaacattggcatcagaatcaaacctgtcaggcctgtgagcctcttcatgtgctatgagggtgacccagagaagacagctaaagtggaatgtggggacttctacaacactggggacagaggtaagatggatgaagagggctacatttgtttcctggggaggagtgatgacatcattaatgcctctgggtatcgcatcgggcctgcagaggttgaaagcgctttggtggagcacccagcggtggcggagtcagccgtggtgggcagcccagacccgattcgaggggaggtggtgaaggcctttattgtcctgaccccacagttcctgtcccatgacaaggatcagctgaccaaggaactgcagcagcatgtcaagtcagtgacagccccatacaagtacccaaggaaggtggagtttgtctcagagctgccaaaaaccatcactggcaagattgaacggaaggaacttcggaaaaaggagactggtcagatgtaatcggcagtgaactcagaacgcactgcacacctaaggcaaatccctggccactttagtctccccactatggtgaggacgagggtggggcattgagagtgttgatttgggaaagtatcaggagtgccatgattccaatgttttccttcttttaaattaaattcagttgctctgcttcctccaagtcctctgtatctttagaatttcccaggtgagcactcataacgcaagtaataaaatactgatatcaac

SEQ ID NO: 868 - DNA, 2051 bp, Homo sapiens
  source 1..2051: mol_type = unassigned DNA
agccatctcttcccaaggcaggtggtgacttgagaactctgtgcctggtttctgaggactgtttcaccatgcagtggctaatgaggttccggaccctctggggcatccacaaatccttccacaacatccaccctgccccttcacagctgcgctgccggtctttatcagaatttggagccccaagatggaatgactatgaagtaccggaggaatttaactttgcaagttatgtactggactactgggctcaaaaggagaaggagggcaagagaggtccaaatccagctttttggtgggtgaatggccaaggggatgaagtaaagtggagcttcagagagatgggagacctaacccgccgtgtagccaacgtcttcacacagacctgtggcctacaacagggagaccatctggccttgatgctgcctcgagttcctgagtggtggctggtggctgtgggctgcatgcgaacagggatcatcttcattcctgcgaccatcctgttgaaggccaaagacattctctatcgactacagttgtctaaagccaagggcattgtgaccatagatgcccttgcctcagaggtggactccatagcttctcagtgcccctctctgaaaaccaagctcctggtgtctgatcacagccgtgaagggtggctggacttccgatcgctggttaaatcagcatccccagaacacacctgtgttaagtcaaagaccttggacccaatggtcatcttcttcaccagtgggaccacaggcttccccaagatggcaaaacactcccatgggttggccttacaaccctccttcccaggaagtaggaaattacggagcctgaagacatctgatgtctcctggtgcctgtcggactcaggatggattgtggctaccatttggaccctggtagaaccatggacagcgggttgtacagtctttatccaccatctgccacagtttgacaccaaggtcatcatacagacattgttgaaataccccattaaccacttttggggggtatcatctatatatcgaatgattctgcagcaggatttcaccagcatcaggttccctgccctggagcactgctatactggcggggaggtcgtgttgcccaaggatcaggaggagtggaaaagacggacgggccttctgctctacgagaactatgggcagtcggaaacgggactaatttgtgccacctactggggaatgaagatcaagccgggtttcatggggaaggccactccaccctacgacgtccaggtcattgatgacaagggcagcatcctgccacctaacacagaaggaaacattggcatcagaatcaaacctgtcaggcctgtgagcctcttcatgtgctatgagggtgacccagagaagacagctaaagtggaatgtggggacttctacaacactggggacagaggtaagatggatgaagagggctacatttgtttcctggggaggagtgatgacatcattaatgcctctgggtatcgcatcgggcctgcagaggttgaaagcgctttggtggagcacccagcggtggcggagtcagccgtggtgggcagcccagacccgattcgaggggaggtggtgaaggcctttattgtcctgaccccacagttcctgtcccatgacaaggatcagctgaccaaggaactgcagcagcatgtcaagtcagtgacagccccatacaagtacccaaggaaggtggagtttgtctcagagctgccaaaaaccatcactggcaagattgaacggaaggaacttcggaaaaaggagactggtcagatgtaatcggcagtgaactcagaacgcactgcacacctaaggcaaatccctggccactttagtctccccactatggtgaggacgagggtggggcattgagagtgttgatttgggaaagtatcaggagtgccatgattccaatgttttccttcttttaaattaaattcagttgctctgcttcctccaagtcctctgtatctttagaatttcccaggtgagcactcataacgcaagtaataaaatactgatatcaac

SEQ ID NO: 869 - DNA, 1894 bp, Homo sapiens
  source 1..1894: mol_type = unassigned DNA
aatcctgcggatcacctgatcagagagaactgaacctacaaaagagagctcaacctccttttccatacctaccagggacctagttcagctacgtcctaaacagtaccaggcaggtggtgacttgagaactctgtgcctggtttctgaggactgtttcaccatgcagtggctaatgaggttccggaccctctggggcatccacaaatccttccacaacatccaccctgccccttcacagctgcgctgccggtctttatcagaatttggagccccaagatggaatgactatgaagtaccggaggaatttaactttgcaagttatgtactggactactgggctcaaaaggagaaggagggcaagagaggtccaaatccagctttttggtgggtgaatggccaaggggatgaagtaaagtggagcttcagagagatgggagacctaacccgccgtgtagccaacgtcttcacacagacctgtggcctacaacagggagaccatctggccttgatgctgcctcgagttcctgagtggtggctggtggctgtgggctgcatgcgaacagggatcatcttcattcctgcgaccatcctgttgaaggccaaagacattctctatcgactacagttgtctaaagccaagggcattgtgaccatagatgcccttgcctcagaggtggactccatagcttctcagtgcccctctctgaaaaccaagctcctggtgtctgatcacagccgtgaagggtggctggacttccgatcgctggttaaatcagcatccccagaacacacctgtgttaagtcaaagaccttggacccaatggtcatcttcttcaccagtgggaccacaggcttccccaagatggcaaaacactcccatgggttggccttacaaccctccttcccaggaagtaggaaattacggagcctgaagacatctgatgtctcctggtgcctgtcggactcaggatggattgtggctaccatttggaccctggtagaaccatggacagcgggttgtacagtctttatccaccatctgccacagtttgacaccaaggtcatcatacagacattgttgaaataccccattaaccacttttggggggtatcatctatatatcgaatgattctgcagcaggatttcaccagcatcaggttccctgccctggagcactgctatactggcggggaggtcgtgttgcccaaggatcaggaggagtggaaaagacggacgggccttctgctctacgagaactatgggcagtcggaaacgggactaatttgtgccacctactggggaatgaagatcaagccgggtttcatggggaaggccactccaccctacgacgtccaggtcattgatgacaagggcagcatcctgccacctaacacagaaggaaacattggcatcagaatcaaacctgtcaggcctgtgagcctcttcatgtgctatgagggtgacccagagaagacagctaaagtggaatgtggggacttctacaacactggggacagaggtaagatggatgaagagggctacatttgtttcctggggaggagtgatgacatcattaatgcctctgggtatcgcatcgggcctgcagaggttgaaagcgctttggtggagcacccagcggtggcggagtcagccgtggtgggcagcccagacccgattcgaggggaggtggtgaaggcctttattgtcctgaccccacagttcctgtcccatgacaaggatcagctgaccaaggaactgcagcagcatgtcaagtcagtgacagccccatacaagtacccaaggaaggtggagtttgtctcagagctgccaaaaaccatcactggcaagattgaacggaaggaacttcggaaaaaggagactggtcagatgtaa

SEQ ID NO: 870 - DNA, 701 bp, Homo sapiens
  source 1..701: mol_type = unassigned DNA
taacaaacaaatgaagaagcaaagaaaacaccctgggaggtcccccttcgctgtggccagaagccaagttctgctgggtgcacaatcctgcggatcacctgatcagagagaactgaacctacaaaagagagctcaacctccttttccatacctaccagggacctagttcagctacgtcctaaacagtaccaggtggtgacttgagaactctgtgcctggtttctgaggactgtttcaccatgcagtggctaatgaggttccggaccctctggggcatccacaaatccttccacaacatccaccctgccccttcacagctgcgctgccggtctttatcagaatttggagccccaagatggaatgactatgaagtaccggaggaatttaactttgcaagttatgtactggactactgggctcaaaaggagaaggagggcaagagaggtccaaatccagctttttggtgggtgaatggccaaggggatgaagtaaagtggagcttcagagagatgggagacctaacccgccgtgtagccaacgtcttcacacagacctgtggcctacaacagggagaccatctggccttgatgctgcctcgagttcctgagtggtggctggtggctgtgggctgcatgcgaacagggatcatcttcattcctgcgaccatcctgttgaaggccaaagacattctctatcgacta

SEQ ID NO: 871 - DNA, 2096 bp, Homo sapiens
  source 1..2096: mol_type = unassigned DNA
gagttactgtgctctcttccaaggctgtaggagttctggagctgctggctggagaggagggtggacgaagctctctctagaaagacatcctgagaggacttggcaggcctgaatatgcattggctgcgaaaagttcagggactttgcaccctgtggggtactcagatgtccagccgcactctctacattaatagtaggcaactggtgtccctgcagtggggccaccaggaagtgccggccaagtttaactttgctagtgatgtgttggatcactgggctgacatggagaaggctggcaagcgactcccaagcccagccctgtggtgggtgaatgggaaggggaaggaattaatgtggaatttcagagaactgagtgaaaacagccagcaggcagccaacgtcctctcgggagcctgtggcctgcagcgtggggatcgtgtggcagtggtgctgccccgagtgcctgagtggtggctggtgatcctgggctgcattcgagcaggtctcatctttatgcctggaaccatccagatgaaatccactgacatactgtataggttgcagatgtctaaggccaaggctattgttgctggggatgaagtcatccaagaagtggacacagtggcatctgaatgtccttctctgagaattaagctactggtgtctgagaaaagctgtgatgggtggctgaacttcaagaaactactaaatgaggcatccaccactcatcactgtgtggagactggaagccaggaagcatctgccatctacttcactagtgggaccagtggtcttcccaagatggcagaacattcctactcgagcctgggcctcaaggccaagatggatgctggttggacaggcctgcaagcctctgatataatgtggaccatatcagacacaggttggatactgaacatcttgtgctcacttatggaaccttgggcattaggagcatgcacatttgttcatctcttgccaaagtttgacccactggttattctaaagacactctccagttatccaatcaagagtatgatgggtgcccccattgtttaccggatgttgctacagcaggatctttccagttacaagttcccccatctacagaactgcgtcactgtaggggagtcccttcttccagaaactctggagaactggagggcccagacaggactggacatccgagaatcctatggccagacagaaacgggattaacttgcatggtttccaagacaatgaaaatcaaaccaggatacatgggaacggctgcttcctgttatgatgtacagatcatagatgataagggcaacgtcctgccccccggcacagaaggagacattggcatcagggtcaaacccatcaggcctataggcatcttctctggctatgtggacaatcccgacaagacagcagccaacattcgaggagacttttggctccttggagaccggggaatcaaagatgaagatgggtatttccagtttatgggacgggcaaatgatatcattaactccagcgggtaccggattggaccctcggaggtagagaatgcactgatggagcaccctgctgtggttgagacggctgtgatcagcagcccagaccccgtccgaggagaggtggtgaaggcatttgtggtcctggcctcgcagttcctgtcccatgacccagaacagctcaccaaggagctgcagcagcatgtgaagtcagtgacagccccatacaagtacccaagaaagatagagtttgtcttgaacctgcccaagactgtcacagggaaaattcaacgagccaagcttcgagacaaggagtggaagatgtccggaaaagcccgtgcgcagtgagacatctaagagacattcatttggattcccctcttctttctctttcttttccctttgggcccttggccttcctatgattatatgagattctttatggaagaacatgaatataagttttgtcttgccttggttattagcacaaaactttaccatgttagatgttgaaagaagaaagggaaggaatgagagagagtgaaaaggagagggtaacagaaaaaaaggaaagaaaagtaagtcagggaaatatt

SEQ ID NO: 872 - DNA, 2734 bp, Homo sapiens
  source 1..2734: mol_type = unassigned DNA
caggcctgaatatgcattggctgcgaaaagttcagggactttgcaccctgtggggtactcagatgtccagccgcactctctacattaatagtaggcaactggtgtccctgcagtggggccaccaggaagtgccggccaagtttaactttgctagtgatgtgttggatcactgggctgacatggagaaggctggcaagcgactcccaagcccagccctgtggtgggtgaatgggaaggggaaggaattaatgtggaatttcagagaactgagtgaaaacagccagcaggcagccaacgtcctctcgggagcctgtggcctgcagcgtggggatcgtgtggcagtggtgctgccccgagtgcctgagtggtggctggtgatcctgggctgcattcgagcaggtctcatctttatgcctggaaccatccagatgaaatccactgacatactgtataggttgcagatgtctaaggccaaggctattgttgctggggatgaagtcatccaagaagtggacacagtggcatctgaatgtccttctctgagaattaagctactggtgtctgagaaaagctgtgatgggtggctgaacttcaagaaactactaaatgaggcatccaccactcatcactgtgtggagactggaagccaggaagcatctgccatctacttcactagtgggaccagtggtcttcccaagatggcagaacattcctactcgagcctgggcctcaaggccaagatggatgctggttggacaggcctgcaagcctctgatataatgtggaccatatcagacacaggttggatactgaacatcttgtgctcacttatggaaccttgggcattaggagcatgcacatttgttcatctcttgccaaagtttgacccactggttattctaaagacactctccagttatccaatcaagagtatgatgggtgcccccattgtttaccggatgttgctacagcaggatctttccagttacaagttcccccatctacagaactgcgtcactgtaggggagtcccttcttccagaaactctggagaactggagggcccagacaggactggacatccgagaatcctatggccagacagaaacgggattaacttgcatggtttccaagacaatgaaaatcaaaccaggatacatgggaacggctgcttcctgttatgatgtacagatcatagatgataagggcaacgtcctgccccccggcacagaaggagacattggcatcagggtcaaacccatcaggcctataggcatcttctctggctatgtggacaatcccgacaagacagcagccaacattcgaggagacttttggctccttggagaccggggaatcaaagatgaagatgggtatttccagtttatgggacgggcaaatgatatcattaactccagcgggtaccggattggaccctcggaggtagagaatgcactgatggagcaccctgctgtggttgagacggctgtgatcagcagcccagaccccgtccgaggagaggtggtgaaggcatttgtggtcctggcctcgcagttcctgtcccatgacccagaacagctcaccaaggagctgcagcagcatgtgaagtcagtgacagccccatacaagtacccaagaaagatagagtttgtcttgaacctgcccaagactgtcacagggaaaattcaacgagccaagcttcgagacaaggagtggaagatgtccggaaaagcccgtgcgcagtgagacatctaagagacattcatttggattcccctcttctttctctttcttttccctttgggcccttggccttcctatgattatatgagattctttatggaagaacatgaatataagttttgtcttgccttggttattagcacaaaactttaccatgttagatgttgaaagaagaaagggaaggaatgagagagagtgaaaaggagagggtaacagaaaaaaaggaaagaaaagtaagtcagggaaatattaaaactgcaagggaaagcaattgaaaaagaaataaagtagggaaagaaggagagaggaagcaagggaaggaggaagaaaggaaagaggagatgaaagggggagaaaagatagaagaaaaataattgaagggagaatcagaaaaataaagagcagaaaggaaagaaataaagagagaaagagaaagaagaaagagcaaaagaacacaagaaagaaagagagggagaaagagagggagaaagggagagaaaaaaattgtaaaaataaaaatagtaaaagaaactgataaagaaaagtaatggaagacaggaagaaaagaagagaaggaagtaaagaggaaaacttataaatattcccacagatagacaaagtcaagcataaaactggagcttgagaaggaaatgaaaggccgtggcaccttcttataccctagaagaagacctccatacaggaagacttgtgtgtggggttgggacattagaatcatccacaagtcaccccaaaccttggaactgtcagggtcagaggggaaccaccatttattaagcatttgccatgtgccaggcactaacccagatgcattataaataccacgttgtttcacctgtgtgtggcatctacagaccttagatcatagctgtgagaacaacgtaagcactgccaaagttatcagctacccatatctcatgtttttgatgttatctactcttcctagaatcaaatattaaaataattttaaaacc

SEQ ID NO: 873 - DNA, 1835 bp, Homo sapiens
  source 1..1835: mol_type = unassigned DNA
gcttgagttactgtgctctcttccaaggctgtaggagttctggagctgctggctggagaggagggtggacgaagctctctctagaaagacatcctgagaggacttggcaggctggcaagcgactcccaagcccagccctgtggtgggtgaatgggaaggggaaggaattaatgtggaatttcagagaactgagtgaaaacagccagcaggcagccaacgtcctctcgggagcctgtggcctgcagcgtggggatcgtgtggcagtggtgctgccccgagtgcctgagtggtggctggtgatcctgggctgcattcgagcaggtctcatctttatgcctggaaccatccagatgaaatccactgacatactgtataggttgcagatgtctaaggccaaggctattgttgctggggatgaagtcatccaagaagtggacacagtggcatctgaatgtccttctctgagaattaagctactggtgtctgagaaaagctgtgatgggtggctgaacttcaagaaactactaaatgaggcatccaccactcatcactgtgtggagactggaagccaggaagcatctgccatctacttcactagtgggaccagtggtcttcccaagatggcagaacattcctactcgagcctgggcctcaaggccaagatggatgctggttggacaggcctgcaagcctctgatataatgtggaccatatcagacacaggttggatactgaacatcttgtgctcacttatggaaccttgggcattaggagcatgcacatttgttcatctcttgccaaagtttgacccactggttattctaaagacactctccagttatccaatcaagagtatgatgggtgcccccattgtttaccggatgttgctacagcaggatctttccagttacaagttcccccatctacagaactgcgtcactgtaggggagtcccttcttccagaaactctggagaactggagggcccagacaggactggacatccgagaatcctatggccagacagaaacgggattaacttgcatggtttccaagacaatgaaaatcaaaccaggatacatgggaacggctgcttcctgttatgatgtacagatcatagatgataagggcaacgtcctgccccccggcacagaaggagacattggcatcagggtcaaacccatcaggcctataggcatcttctctggctatgtggacaatcccgacaagacagcagccaacattcgaggagacttttggctccttggagaccggggaatcaaagatgaagatgggtatttccagtttatgggacgggcaaatgatatcattaactccagcgggtaccggattggaccctcggaggtagagaatgcactgatggagcaccctgctgtggttgagacggctgtgatcagcagcccagaccccgtccgaggagaggtggtgaaggcatttgtggtcctggcctcgcagttcctgtcccatgacccagaacagctcaccaaggagctgcagcagcatgtgaagtcagtgacagccccatacaagtacccaagaaagatagagtttgtcttgaacctgcccaagactgtcacagggaaaattcaacgagccaagcttcgagacaaggagtggaagatgtccggaaaagcccgtgcgcagtgagacatctaagagacattcatttggattcccctcttctttctctttcttttccctttgggcccttggccttcctatgattatatgagattctttatggaagaacatgaatataagttttgtcttgccttggttattagcacaaaactttaccatgttagatgttgaaag

SEQ ID NO: 874 - DNA, 741 bp, Homo sapiens
  source 1..741: mol_type = unassigned DNA
gagttactgtgctctcttccaaggctgtaggagttctggagctgctggctggagaggagggtggacgaagctctctctagaaagacatcctgagaggacttggcaggcctgaatatgcattggctgcgaaaagttcagggactttgcaccctgtggggtactcagatgtccagccgcactctctacattaatagtaggcaactggtgtccctgcagtggggccaccaggaagtgccggccaagtttaactttgctagtgatgtgttggatcactgggctgacatggagaaggctggcaagcgactcccaagcccagccctgtggtgggtgaatgggaaggggaaggaattaatgtggaatttcagagaactgagtgaaaacagccagcaggcagccaacgtcctctcgggagcctgtggcctgcagcgtggggatcgtgtggcagtggtgctgccccgagtgcctgagtggtggctggtgatcctgggctgcattcgagcaggtctcatctttatgcctggaaccatccagatgaaatccactgacatactgtataggttgcagatgtctaaggccaaggctattgttgctggggatgaagtcatccaagaagtggacacagtggcatctgaatgtccttctctgagaattaagctactggtgtctgagaaaagctgtgatgggtggctgaacttcaagaaactactaaaatataaagtcagacacagagacgttaaataa

SEQ ID NO: 875 - DNA, 2748 bp, Homo sapiens
  source 1..2748: mol_type = unassigned DNA
gagttactgtgctctcttccaaggctgtaggagttctggagctgctggctggagaggagggtggacgaagctctctctagaaagacatcctgagaggacttggcaggcctgaatatgcattggctgcgaaaagttcagggactttgcaccctgtggggtactcagatgtccagccgcactctctacattaatagtaggcaactggtgtccctgcagtggggccaccaggaagtgccggccaagtttaactttgctagtgatgtgttggatcactgggctgacatggagaaggctggcaagcgactcccaagcccagccctgtggtgggtgaatgggaaggggaaggaattaatgtggaatttcagagaactgagtgaaaacagccagcaggcagccaacgtcctctcgggagcctgtggcctgcagcgtggggatcgtgtggcagtggtgctgccccgagtgcctgagtggtggctggtgatcctgggctgcattcgagcaggtctcatctttatgcctggaaccatccagatgaaatccactgacatactgtataggttgcagatgtctaaggccaaggctattgttgctggggatgaagtcatccaagaagtggacacagtggcatctgaatgtccttctctgagaattaagctactggtgtctgagaaaagctgtgatgggtggctgaacttcaagaaactactaaatgaggcatccaccactcatcactgtgtggagactggaagccaagatggatgctggttggacaggcctgcaagcctctgatataatgtggaccatatcagacacaggttggatactgaacatcttgtgctcacttatggaaccttgggcattaggagcatgcacatttgttcatctcttgccaaagtttgacccactggttattctaaagacactctccagttatccaatcaagagtatgatgggtgcccccattgtttaccggatgttgctacagcaggatctttccagttacaagttcccccatctacagaactgcgtcactgtaggggagtcccttcttccagaaactctggagaactggagggcccagacaggactggacatccgagaatcctatggccagacagaaacgggattaacttgcatggtttccaagacaatgaaaatcaaaccaggatacatgggaacggctgcttcctgttatgatgtacagatcatagatgataagggcaacgtcctgccccccggcacagaaggagacattggcatcagggtcaaacccatcaggcctataggcatcttctctggctatgtggacaatcccgacaagacagcagccaacattcgaggagacttttggctccttggagaccggggaatcaaagatgaagatgggtatttccagtttatgggacgggcaaatgatatcattaactccagcgggtaccggattggaccctcggaggtagagaatgcactgatggagcaccctgctgtggttgagacggctgtgatcagcagcccagaccccgtccgaggagaggtggtgaaggcatttgtggtcctggcctcgcagttcctgtcccatgacccagaacagctcaccaaggagctgcagcagcatgtgaagtcagtgacagccccatacaagtacccaagaaagatagagtttgtcttgaacctgcccaagactgtcacagggaaaattcaacgagccaagcttcgagacaaggagtggaagatgtccggaaaagcccgtgcgcagtgagacatctaagagacattcatttggattcccctcttctttctctttcttttccctttgggcccttggccttcctatgattatatgagattctttatggaagaacatgaatataagttttgtcttgccttggttattagcacaaaactttaccatgttagatgttgaaagaagaaagggaaggaatgagagagagtgaaaaggagagggtaacagaaaaaaaggaaagaaaagtaagtcagggaaatattaaaactgcaagggaaagcaattgaaaaagaaataaagtagggaaagaaggagagaggaagcaagggaaggaggaagaaaggaaagaggagatgaaagggggagaaaagatagaagaaaaataattgaagggagaatcagaaaaataaagagcagaaaggaaagaaataaagagagaaagagaaagaagaaagagcaaaagaacacaagaaagaaagagagggagaaagagagggagaaagggagagaaaaaaattgtaaaaataaaaatagtaaaagaaactgataaagaaaagtaatggaagacaggaagaaaagaagagaaggaagtaaagaggaaaacttataaatattcccacagatagacaaagtcaagcataaaactggagcttgagaaggaaatgaaaggccgtggcaccttcttataccctagaagaagacctccatacaggaagacttgtgtgtggggttgggacattagaatcatccacaagtcaccccaaaccttggaactgtcagggtcagaggggaaccaccatttattaagcatttgccatgtgccaggcactaacccagatgcattataaataccacgttgtttcacctgtgtgtggcatctacagaccttagatcatagctgtgagaacaacgtaagcactgccaaagttatcagctacccatatctcatgtttttgatgttatctactcttcctagaatcaaatattaaaataattttaaaacc

SEQ ID NO: 876 - DNA, 2839 bp, Homo sapiens
  source 1..2839: mol_type = unassigned DNA
gagttactgtgctctcttccaaggctgtaggagttctggagctgctggctggagaggagggtggacgaagctctctctagaaagacatcctgagaggacttggcaggcctgaatatgcattggctgcgaaaagttcagggactttgcaccctgtggggtactcagatgtccagccgcactctctacattaatagtaggcaactggtgtccctgcagtggggccaccaggaagtgccggccaagtttaactttgctagtgatgtgttggatcactgggctgacatggagaaggctggcaagcgactcccaagcccagccctgtggtgggtgaatgggaaggggaaggaattaatgtggaatttcagagaactgagtgaaaacagccagcaggcagccaacgtcctctcgggagcctgtggcctgcagcgtggggatcgtgtggcagtggtgctgccccgagtgcctgagtggtggctggtgatcctgggctgcattcgagcaggtctcatctttatgcctggaaccatccagatgaaatccactgacatactgtataggttgcagatgtctaaggccaaggctattgttgctggggatgaagtcatccaagaagtggacacagtggcatctgaatgtccttctctgagaattaagctactggtgtctgagaaaagctgtgatgggtggctgaacttcaagaaactactaaatgaggcatccaccactcatcactgtgtggagactggaagccaggaagcatctgccatctacttcactagtgggaccagtggtcttcccaagatggcagaacattcctactcgagcctgggcctcaaggccaagatggatgctggttggacaggcctgcaagcctctgatataatgtggaccatatcagacacaggttggatactgaacatcttgtgctcacttatggaaccttgggcattaggagcatgcacatttgttcatctcttgccaaagtttgacccactggttattctaaagacactctccagttatccaatcaagagtatgatgggtgcccccattgtttaccggatgttgctacagcaggatctttccagttacaagttcccccatctacagaactgcgtcactgtaggggagtcccttcttccagaaactctggagaactggagggcccagacaggactggacatccgagaatcctatggccagacagaaacgggattaacttgcatggtttccaagacaatgaaaatcaaaccaggatacatgggaacggctgcttcctgttatgatgtacagatcatagatgataagggcaacgtcctgccccccggcacagaaggagacattggcatcagggtcaaacccatcaggcctataggcatcttctctggctatgtggacaatcccgacaagacagcagccaacattcgaggagacttttggctccttggagaccggggaatcaaagatgaagatgggtatttccagtttatgggacgggcaaatgatatcattaactccagcgggtaccggattggaccctcggaggtagagaatgcactgatggagcaccctgctgtggttgagacggctgtgatcagcagcccagaccccgtccgaggagaggtggtgaaggcatttgtggtcctggcctcgcagttcctgtcccatgacccagaacagctcaccaaggagctgcagcagcatgtgaagtcagtgacagccccatacaagtacccaagaaagatagagtttgtcttgaacctgcccaagactgtcacagggaaaattcaacgagccaagcttcgagacaaggagtggaagatgtccggaaaagcccgtgcgcagtgagacatctaagagacattcatttggattcccctcttctttctctttcttttccctttgggcccttggccttcctatgattatatgagattctttatggaagaacatgaatataagttttgtcttgccttggttattagcacaaaactttaccatgttagatgttgaaagaagaaagggaaggaatgagagagagtgaaaaggagagggtaacagaaaaaaaggaaagaaaagtaagtcagggaaatattaaaactgcaagggaaagcaattgaaaaagaaataaagtagggaaagaaggagagaggaagcaagggaaggaggaagaaaggaaagaggagatgaaagggggagaaaagatagaagaaaaataattgaagggagaatcagaaaaataaagagcagaaaggaaagaaataaagagagaaagagaaagaagaaagagcaaaagaacacaagaaagaaagagagggagaaagagagggagaaagggagagaaaaaaattgtaaaaataaaaatagtaaaagaaactgataaagaaaagtaatggaagacaggaagaaaagaagagaaggaagtaaagaggaaaacttataaatattcccacagatagacaaagtcaagcataaaactggagcttgagaaggaaatgaaaggccgtggcaccttcttataccctagaagaagacctccatacaggaagacttgtgtgtggggttgggacattagaatcatccacaagtcaccccaaaccttggaactgtcagggtcagaggggaaccaccatttattaagcatttgccatgtgccaggcactaacccagatgcattataaataccacgttgtttcacctgtgtgtggcatctacagaccttagatcatagctgtgagaacaacgtaagcactgccaaagttatcagctacccatatctcatgtttttgatgttatctactcttcctagaatcaaatattaaaataattttaaaaccaa

SEQ ID NO: 877 - DNA, 2884 bp, Homo sapiens
  source 1..2884: mol_type = unassigned DNA
ctctttccgacagtgcagggattctgaagctgtctgcttgagttactgtgctctcttccaaggctgtaggagttctggagctgctggctggagaggagggtggacgaagctctctccagaaagacatcctgagaggacttggcaggcctgaacatgcattggctgcgaaaagttcagggactttgcaccctgtggggtactcagatgtccagccgcactctctacattaatagtaggcaactggtgtccctgcagtggggccaccaggaagtgccggccaagtttaactttgctagtgatgtgttggatcactgggctgacatggagaaggctggcaagcgactcccaagcccagccctgtggtgggtgaatgggaaggggaaggaattaatgtggaatttcagagaactgagtgaaaacagccagcaggcagccaacatcctctcgggagcctgtggcctgcagcgtggggatcgtgtggcagtgatgctgccccgagtgcctgagtggtggctggtgatcctgggctgcattcgagcaggtctcatctttatgcctggaaccatccagatgaaatccactgacatactgtataggttgcagatgtctaaggccaaggctattgttgctggggatgaagtcatccaagaagtggacacagtggcatctgaatgtccttctctgagaattaagctactggtgtctgagaaaagctgcgatgggtggctgaacttcaagaaactactaaatgaggcatccaccactcatcactgtgtggagactggaagccaggaagcatctgccatctacttcactagtgggaccagtggtcttcccaagatggcagaacattcctactcgagcctgggcctcaaggccaagatggatgctggttggacaggcctgcaagcctctgatataatgtggaccatatcagacacaggttggatactgaacatcttgggctcacttttggaatcttggacattaggagcatgcacatttgttcatctcttgccaaagtttgacccactggttattctaaagacactctccagttatccaatcaagagtatgatgggtgcccctattgtttaccggatgttgctacagcaggatctttccagttacaagttcccccatctacagaactgcctcgctggaggggagtcccttcttccagaaactctggagaactggagggcccagacaggactggacatccgagaattctatggccagacagaaacgggattaacttgcatggtttccaagacaatgaaaatcaaaccaggatacatgggaacggctgcttcctgttatgatgtacaggttatagatgataagggcaacgtcctgccccccggcacagaaggagacattggcatcagggtcaaacccatcaggcctataggcatcttctctggctatgtggaaaatcccgacaagacagcagccaacattcgaggagacttttggctccttggagaccggggaatcaaagatgaagatgggtatttccagtttatgggacgggcagatgatatcattaactccagcgggtaccggattggaccctcggaggtagagaatgcactgatgaagcaccctgctgtggttgagacggctgtgatcagcagcccagaccccgtccgaggagaggtggtgaaggcatttgtgatcctggcctcgcagttcctatcccatgacccagaacagctcaccaaggagctgcagcagcatgtgaagtcagtgacagccccatacaagtacccaagaaagatagagtttgtcttgaacctgcccaagactgtcacagggaaaattcaacgaaccaaacttcgagacaaggagtggaagatgtccggaaaagcccgtgcgcagtgaggcgtctaggagacattcatttggattcccctcttctttctctttcttttccctttgggcccttggccttactatgatgatatgagattctttatgaaagaacatgaatgtaagttttgtcttgccctggttattagcacaaaacattactatgttagatattgaaataagaaagggaaggaatgagagagagtgaaaaggagagggtaacagaaaaagaggaaagaaaagtaagtcagggaaatgttaaaaactgcaagagaaagcaattgaaaaagaaataaagtagggagggaaggcgagaggaagcaagggaaggaggaagaaaggaaagaggagatgaaagggggagaaaagatagaagaaaaataattgaagggagaatcagaaaaataaagagaagaaaggaaagaaataaagagagaaagagaaagaagaaagagcaaaagaacacaagaaagaaagagagggagaaagagagggagaaagggagagaaaaaaattgtaaaaataaaaatagtaaaagaaactgataaagaaaagtcatggaagacaggaagaaaggaagagagggaagtaaagaggaaaacctataaatattcccacagatagacaaagtcaagcataaaactggagcttgagaaggaaatgaaaggaaaagaagtggtactttcttttaccctaggagaagacctccatacaggaagacttgtgtgtggggctgggacattagaatcatccgcaagtcactccaaaccttgaaactgtcagggtcagaggggaaccaccatttattaagcatttgccatgtgccaggcactgacccagacacattataaataccacattgtttcacctgtgtgtggcatctacagaccttagatcatagctgtgagaacaaagtaagcactgccaaagttatcagctacccatacctcatgtttttggtgttatctactcttcctagaatcaaatattaaaataattttaaaaccaa

SEQ ID NO: 878 - DNA, 802 bp, Homo sapiens
  source 1..802: mol_type = unassigned DNA
actgtcaatgattagctgagctctctttccgacagtgcagggattctgaagctgtctgcttgagttactgtgctctcttccaaggctgtaggagttctggagctgctggctggagaggagggtggacgaagctctctccagaaagacatcctgagaggacttggcaggcctgaacatgcattggctgcgaaaagttcagggactttgcaccctgtggggtactcagatgtccagccgcactctctacattaatagtaggcaactggtgtccctgcagtggggccaccaggaagtgccggccaagtttaactttgctagtgatgtgttggatcactgggctgacatggagaaggctggcaagcgactcccaagcccagccctgtggtgggtgaatgggaaggggaaggaattaatgtggaatttcagagaactgagtgaaaacagccagcaggcagccaacatcctctcgggagcctgtggcctgcagcgtggggatcgtgtggcagtgatgctgccccgagtgcctgagtggtggctggtgatcctgggctgcattcgagcaggtctcatctttatgcctggaaccatccagatgaaatccactgacatactgtataggttgcagatgtctaaggccaaggctattgttgctggggatgaagtcatccaagaagtggacacagtggcatctgaatgtccttctctgagaattaagctactggtgtctgagaaaagctgcgatgggtggctgaacttcaagaaactactaaaatataaagtgagacacagagaagttaaataa

SEQ ID NO: 879 - DNA, 2557 bp, Homo sapiens
  source 1..2557: mol_type = unassigned DNA
cggattgtcagactgctcctccctcttctttagactgccacgaggaaaaagcagatgtgagaactcaaggttcagggctgctcttctaagaaacaagtctgccataatctccatctgtgttggaatctgttaactaatgaactggtctctgtgcaaatcctgagtgctaaagcttccaacaagactgatgctagctcgtgtcaccaggaagatgctacgtcatgccaagtgttttcagcgcctagcaatttttggttctgtgagggcactgcataaagataatagaacagcaacccctcagaatttctccaactatgaatccatgaaacaggacttcaaactggggattccagagtatttcaactttgctaaagatgtcctggaccaatggactgataaggaaaaggctggaaagaaaccttcaaatccagccttctggtggatcaacagaaatggagaagagatgcgatggagttttgaggaactgggatctctgtccagaaaatttgccaatatactttcagaagcctgttccctacaaagaggagatcgggtaattctgattctgcccagggtcccagagtggtggcttgcaaatgtggcctgtctgcgaacagggacagttttaattccaggaaccactcagctgacccagaaagacattctctacagactacaatcttcaaaagcaaactgcattatcaccaatgatgttttagccccagcagtagacgctgttgcatccaaatgtgaaaatctgcactccaagctgattgtatcagagaactccagagaggggtgggggaacctcaaggagttgatgaaacatgccagtgacagccacacctgtgtgaagacaaaacacaatgagatcatggccatattctttaccagtggaacaagtggatatccgaaaatgactgcacacacccacagcagttttggtttaggattatctgtaaatggaaggttctggctagatttgacaccctcagatgtgatgtggaatacctcagatacgggctgggcaaagtctgcatggagtagtgttttttctccgtggatccagggagcatgtgtattcacacaccatttaccccgttttgagccgacttctatcttgcaaacactctccaagtaccccatcacagtcttctgttcagcaccaactgtataccgaatgcttgtacagaatgatataaccagctataagtttaaaagcttaaagcactgtgtgagtgctggggaaccaattacccctgacgtgactgaaaaatggagaaacaagacgggcctggatatctacgaaggatatggacagactgaaacggtgctaatctgtggaaattttaagggaatgaaaattaaacctggctcaatgggaaaaccttctcctgctttcgatgttaagattgtagatgtaaatggcaatgttctacctcctggacaagaaggagatattggcattcaagttctacccaaccgaccatttggcctttttactcattacgtagataatccttcaaaaacagcttcaactctacgaggcaatttctatatcactggggacagaggatatatggataaagatgggtatttctggtttgttgcaagagcagatgatgtcatattatcctctggctatcgaattggaccatttgaggtagaaaatgccctgaatgaacacccttcagttgcagagtcagctgttgtcagcagcccagaccccatcagaggagaggtagtaaaggcttttgtcgttctaaatcctgattacaagtcacatgatcaagaacaactaataaaggagattcaggagcatgttaaaaaaactacagcaccttacaaatatcccagaaaggtagaatttattcaagagctgccaaagactatcagtgggaagacaaaaagaaatgaactgaggaagaaagaatggaagacaatttaaagttgtttcattaattaccatatctataaaacaaacatagtatctgtcaatctctagaaaccacaagatgatggagaggtcataaaaactgtggtagtatgcttagaaactgttgatttaaaatatcttgtggttatgatatcagaggctaaattttgaaataaaatatttggcaaattcctccacattagtgtcaatgttcctatcatttcttaatataaaaataataccatcaattgctgattaatttttaaatgtatagtatagaagcagtttctgaaccagatctctgctacataggttttcaaactttagttgactaattcttctgatatgttgatatacaaatcagaaccaatgttcaagcctgaaataaaactaaagaacttataaaagtttttagaaaaatataaaatatcagttagaagattatgataatctcaaagtacaagaatctacctgaaaatagactagggatttttattagtcacattttttgcaaataatttaaaaatagtttagacttgtttcaaggtctaactataaaagaaggatcatatactattgttgcttattatatgtaatctaataaatactgtttacaaaaga

SEQ ID NO: 880 - DNA, 1569 bp, Homo sapiens
  source 1..1569: mol_type = unassigned DNA
cggattgtcagactgctcctccctcttctttagactgccacgaggaaaaagcagatgtgagaactcaaggttcagggctgctcttctaagaaacaagtctgccataatctccatctgtgttggaatctgttaactaatgaactggtctctgtgcaaatcctgagtgctaaagcttccaacaagactgatgctagctcgtgtcaccaggaagatgctacgtcatgccaagtgttttcagcgcctagcaatttttggttctgtgagggcactgcataaagataatagaacagcaacccctcagaatttctccaactatgaatccatgaaacaggacttcaaactggggattccagagtatttcaactttgctaaagatgtcctggaccaatggactgataaggaaaaggctggaaagaaaccttcaaatccagccttctggtggatcaacagaaatggagaagagatgcgatggagttttgaggaactgggatctctgtccagaaaatttgccaatatactttcagaagcctgttccctacaaagaggagatcgggtaattctgattctgcccagggtcccagagtggtggcttgcaaatgtggcctgtctgcgaacagggacagttttaattccaggaaccactcagctgacccagaaagacattctctacagactacaatcttcaaaagcaaactgcattatcaccaatgatgttttagccccagcagtagacgctgttgcatccaaatgtgaaaatctgcactccaagctgattgtatcagagaactccagagaggggtgggggaacctcaaggagttgatgaaacatgccagtgacagccacacctgtgtgaagacaaaacacaatgagatcatggccatattctttaccagtggaacaagtggatatccgaaaatgactgcacacacccacagcagttttggtttaggattatctgtaaatggaaggttctggctagatttgacaccctcagatgtgatgtggaatacctcagatacgggctgggcaaagtctgcatggagtagtgttttttctccgtggatccagggagcatgtgtattcacacaccatttaccccgttttgagccgacttctatcttgcaaacactctccaagtaccccatcacagtcttctgttcagcaccaactgtataccgaatgcttgtacagaatgatataaccagctataagtttaaaagcttaaagcactgtgtgagtgctggggaaccaattacccctgacgtgactgaaaaatggagaaacaagacgggcctggatatctacgaaggatatggacagactgaaacggtgctaatctgtggaaattttaagggaatgaaaattaaacctggctcaatgggaaaaccttctcctgctttcgatgttaaggtttgcacatccccttccaggagaatgtttaacaacccaatctgtacactacctacctaccgcttacccccatataaactttctttgttatgatggtgattccattttacttccatgatactttaatttttataaatatgtgaaaatgattagaaatg

SEQ ID NO: 881 - DNA, 1931 bp, Homo sapiens
  source 1..1931: mol_type = unassigned DNA
ctatgaatccatgaaacaggacttcaaactggggattccagagtatttcaactttgctaaagatgtcctggaccaatggactgataaggaaaaggctggaaagaaaccttcaaatccagccttctggtggatcaacagaaatggagaagagatgcgatggagttttgaggaactgggatctctgtccagaaaatttgccaatatactttcagaagcctgttccctacaaagaggagatcgggtaattctgattctgcccagggtcccagagtggtggcttgcaaatgtggcctgtctgcgaacagggacagttttaattccaggaaccactcagctgacccagaaagacattctctacagactacaatcttcaaaagcaaactgcattatcaccaatgatgttttagccccagcagtagacgctgttgcatccaaatgtgaaaatctgcactccaagctgattgtatcagagaactccagagaggggtgggggaacctcaaggagttgatgaaagtctttctctgtcacccaggctggagtacggtggctcgatcttggctcactgcaacctccacctccctggttcaagcgattctcagcctcctgagtagctgggattacagacatgccagtgacagccacacctgtgtgaagacaaaacacaatgagatcatggccatattctttaccagtggaacaagtggatatccgaaaatgactgcacacacccacagcagttttggtttaggattatctgtaaatggaaggttctggctagatttgacaccctcagatgtgatgtggaatacctcagatacgggctgggcaaagtctgcatggagtagtgttttttctccgtggatccagggagcatgtgtattcacacaccatttaccccgttttgagccgacttctatcttgcaaacactctccaagtaccccatcacagtcttctgttcagcaccaactgtataccgaatgcttgtacagaatgatataaccagctataagtttaaaagcttaaagcactgtgtgagtgctggggaaccaattacccctgacgtgactgaaaaatggagaaacaagacgggcctggatatctacgaaggatatggacagactgaaacggtgctaatctgtggaaattttaagggaatgaaaattaaacctggctcaatgggaaaaccttctcctgctttcgatgttaagattgtagatgtaaatggcaatgttctacctcctggacaagaaggagatattggcattcaagttctacccaaccgaccatttggcctttttactcattacgtagataatccttcaaaaacagcttcaactctacgaggcaatttctatatcactggggacagaggatatatggataaagatgggtatttctggtttgttgcaagagcagatgatgtcatattatcctctggctatcgaattggaccatttgaggtagaaaatgccctgaatgaacacccttcagttgcagagtcagctgttgtcagcagcccagaccccatcagaggagaggtagtaaaggcttttgtcgttctaaatcctgattacaagtcacatgatcaagaacaactaataaaggagattcaggagcatgttaaaaaaactacagcaccttacaaatatcccagaaaggtagaatttattcaagagctgccaaagactatcagtgggaagacaaaaagaaatgaactgaggaagaaagaatggaagacaatttaaagttgtttcattaattaccatatctataaaacaaacatagtatctgtcaatctctagaaaccacaagatgatggagaggtcataaaaactgtggtagtatgcttagaaactgttgatttaaaatatcttgtggttatgatatcagaggctaaattttgaaataaaatatttggcaaattcctcc

SEQ ID NO: 882 - DNA, 2796 bp, Homo sapiens
  source 1..2796: mol_type = unassigned DNA
gcatttggggctgaagttccctgtgggaggctgttttctgagggagctgagtgtttacagccactcagccctgctctgctcagctgaagcagaaaacagagaccttttgcattactttggttcaagagcaagacaggaggcgactgcatgagaccatggctgagacacctagtcctccaggcactgaggaactccagggcattctgtgggtctcatgggaagccagcacctctacctgttcctcagaagatcgtggccacctgggaagccatcagcctgggaaggcagctggtgcctgagtacttcaacttcgcccatgatgtgctggatgtgtggagtcggctggaagaggctggacaccgccccccaaatcctgccttctggtgggtcaatggcacaggagcagagatcaagtggagctttgaggagctggggaagcagtccaggaaggcagccaatgtgctggggggtgcatgcggcctgcagcctggggacagaatgatgctggtactcccacggctcccggagtggtggctggtcagtgtggcttgcatgcggacagggactgtgatgattccgggtgtgactcagctgacagagaaggacctcaagtaccggctgcaggcgtccagggccaagtccattatcaccagtgactccctagctccaagggtggatgccatcagtgccgaatgcccctccctccagaccaagctgctggtgtcagacagcagtcggccaggctggttgaacttcagggaactcctccgggaggcttctacagagcacaactgcatgaggacaaagagtcgagacccgctggccatctactttaccagcggaaccaccggggcccccaagatggtcgagcactcccagagcagctacggactgggttttgtggccagcggaagacggtgggtggccttgaccgaatctgacatcttctggaacacgactgacactggctgggtgaaggcagcctggactctcttctctgcctggcctaatggatcttgcatttttgtgcatgagctgccccgagttgatgccaaagttatcctgaatactctctccaaattcccgataaccaccctctgctgtgtcccaaccatctttcggctgcttgtgcaggaggatctgaccaggtaccagtttcagagcctgaggcactgtctgaccggaggagaggccctcaaccctgacgtgagggagaagtggaaacaccagactggtgtggagctgtacgaaggctatggccagtctgaaacggttgtcatctgtgccaatccaaaaggcatgaaaatcaagtctggatccatggggaaggcgtccccaccctacgatgtgcagattgtggatgatgagggcaacgtcctgcctcctggagaagaggggaatgttgccgtccgtatcagacccactcggcccttctgtttcttcaattgctatttggacaatcctgagaagacagctgcatcagaacaaggggacttttacatcacaggggaccgagctcgcatggacaaggatggctacttttggttcatgggaagaaacgacgatgtgatcaattcttcaagctaccggatcgggcctgttgaagtggaaagtgccctggcagagcatcctgctgtcctggagtcggctgtggtcagcagcccagaccccatcaggggagaggtggtaaaggcatttatagtccttactccagcctactcctctcatgacccagaggcactaacgcgggaactccaggagcatgtgaaaagggtgactgctccatacaaataccccaggaaggtggcctttgtttcagaactgccaaagacggtttctggaaagatccaaaggagtaaattgcgaagtcaggagtgggggaaatgaggtgcaccccaggaaggccccgtagacctccgaagactccacaagaaactaatggatcactggtcagtccccatggggagcatcatctcttcgaccctaaagatgtcaaaggtgtgcagcttccaaacggcatccccaggatcactgggcaatgctggaaagagcaaaagaatatcattggccctgatcacatagatgctgcgccgcctagcaaatgcttggtggttcgacttctccctctgtctgggggcaggctcagcatctgcccactggtctcactaagagctttcagatttccctccataggacaggttaccatagacttggggcacttgtgggtactcattttctgccagtgggaatgtaaaggcttcatcctttgtatgtaaccatttggcaaaagtatgcaggaacataaaataaaatatcctttagctcagaaattctatcttcgggagtcaccacaaaagaaaaaaatcaaaatgcagaaaatgtgtggtgcactaagatgatcacacagcattaaaactaaaaaaaaaaaagaaaaaattaacaattaacatccaaacaacaaggaaatgattaacaaaattgtagtagattaactcaattacatatgatgtagccactaaaatatttgagagcagtttagtatgtcttgggaaaagtgtaagctatattaattttaaaaatcagagcaaaaatattcatactggagaatcccaactctgaaaaataaagggaaaactgtggttaattgtaatcctcctggagattgaggagggagggagagaaaataatggatggtagtttttcttcttcctttttccattacatttctgtattttccaagtttttgtacgaagcacatacaactattttaatgaaaaagttatgttaaagaaagca

SEQ ID NO: 883 - DNA, 3680 bp, Homo sapiens
  source 1..3680: mol_type = unassigned DNA
ggcccgcggagactccacggggcgccccgggcgtgaggcacccactctgggagcacagagagctcaggtagcctgcctagatggcggcgcgcaccctgggccgcggcgtcgggaggctgctgggcagcctgcgagggctctcggggcagcccgcgcggccgccgtgcggggtgagcgcgccgcgcagggcggcctcgggaccctcgggcagcgctcccgcagttgcagcagcagcagcacagccaggctcgtatcccgcgctgagtgcacaggcagcccgggagccggccgccttctgggggcctctggcgcgggacactctcgtgtgggacaccccctaccacaccgtctgggactgcgacttcagcactggcaagatcggctggttcctgggaggccagttaaatgtctctgtcaactgcttggaccagcatgttcggaagtcccccgagagcgttgctttgatctgggagcgcgatgagcctggaacggaagtgaggatcacctacagggaactactggagaccacgtgccgcctggccaacacgctgaagaggcatggagtccaccgtggggaccgtgttgccatctacatgcccgtgtccccattggctgtggcagcaatgctggcctgtgccaggatcggagctgtccacacagtcatctttgctggcttcagtgcagagtccttggctgggaggatcaatgatgccaagtgcaaggtggttatcaccttcaaccaaggactccggggtgggcgcgtggtggagctgaagaaaatagtggatgaggctgtgaagcactgccccaccgtgcagcatgtcctggtggctcacaggacagacaacaaggtccacatgggggatctggacgtcccgctggagcaggaaatggccaaggaggaccctgtttgcgccccagagagcatgggcagtgaggacatgctcttcatgctgtacacctcagggagcaccggaatgcccaagggcatcgtccatacccaggcaggctacctgctctatgccgccctgactcacaagcttgtgtttgaccaccagccaggtgacatctttggctgtgtggccgacatcggttggattacaggacacagctacgtggtgtatgggcctctctgcaatggtgccaccagcgtcctttttgagagcaccccagtttatcccaatgctggtcggtactgggagacagtagagaggttgaagatcaatcagttctatggcgccccaacggctgtccggctgttgctgaaatacggtgatgcctgggtgaagaagtatgatcgctcctccctgcggaccctggggtcagtgggagagcccatcaactgtgaggcctgggagtggcttcacagggtggtgggggacagcaggtgcacgctggtggacacctggtggcagacagaaacaggtggcatctgcatcgcaccacggccctcggaagaaggggcggaaatcctccctgccatggcgatgaggcccttctttggcatcgtccccgtcctcatggatgagaagggcagcgtcgtggagggcagcaacgtctccggggccctgtgcatctcccaggcctggccgggcatggccaggaccatctatggcgaccaccagcgatttgtggacgcctacttcaaggcctacccaggctattacttcactggagacggggcttaccgaactgagggcggctattaccagatcacagggcggatggatgatgtcatcaacatcagtggccaccggctggggaccgcagagattgaggacgccatcgccgaccaccctgcagtaccagaaagtgctgtcattggctacccccacgacatcaaaggagaagctgcctttgccttcattgtggtgaaagatagtgcgggtgactcagatgtggtggtgcaggagctcaagtccatggtggccaccaagatcgccaaatatgctgtgcctgatgagatcctggtggtgaaacgtcttccaaaaaccaggtctgggaaggtcatgcggcggctcctgaggaagatcatcactagtgaggcccaggagctgggagacactaccaccttggaggaccccagcatcatcgcagagatcctgagtgtctaccagaagtgcaaggacaagcaggctgctgctaagtgagctggcaccttgtggggctcttgggatgggcgggcacccaagccctggcttgtccttcccagaaggtacccctgaggttggcgtcttcctacgtcccagaagcagcccccaccccacacatgacccacaccgccctcacgtgaagctgggctgagagccctttctcccatccattggaggtcccaggagtgtcacccatggagaggctatgcgacatggctagggctggttctgccatctgagtttggtttcctggaatgaaaaggcattgccatctccattcctctgccctcttgagccagcacaggaaggtgaggccctgggatagcgcgcctgctcagataacacagagctagttagctagtagcaaccgtgttttctccagatctgtctagatacaaaggtcagaaatcttatttttatacttttatattgtggaagaacagcatgcaacactcacatgtagtgtgtggatttacttgaacatgttctttttaacatgtagttatgaaaatctccttttttgcctctactggtgaggaaacatgaggatcagaggccacatttttaattattgttagtgtatttggaagtctgaattggagatgtttgtacctctgtctaaacagttcccttgagaacttccaagcctccggcatcttttcctggtgagtgtttctcctgtgcttggttgtgtataatggagctaactcctaagcggtggggtgaatgtggccgccttagttctgaagctactccagttatgttctgtttcttcaagctgtgatccagaaagatttttgtgcccccagatgcctcttgataggagaggcaacatactccaaatagttgggttcttcagggaagctattagaaactcaggtgacttgttagagcactaacttggtcagagccaaatcctggcaaacgctgcctgaccttcactctgtggttggggcggtgagaaccactgaggtccaatgatgagacttggaggtctggatccagtctctctttgttttaatgtgacttaggtgctgtcaacattagcaagataatggaaatcacgacgccagtgggtgcttacctccctgctaggcatgcaggggctggcggttggcaggggaaggaggcccagtgagccgggtcccttaggggagggagagtttgtcctctttgccccacagtctacccttcagggccttgtggcagtgccagtgttcggggggtgtctgggccactgagtacccactcggtcgtggttgtgctggcctcttgggtgagtgaacctgtgaagcccaggaggtggtgttggctgcagggtacacaaatactgagtggtggtcttttgttacaggcttagcaacaaagctgtgccctgggcatggggggctgtagtgtagctacagttgtgcgtttgtgaaatggcttagctttccatgttgctgagaggaacctggacatggtcccgggcatctgaatgatctgtaggggagggagttcaaataaagctttattttgttcattttc

SEQ ID NO: 884 - DNA, 2244 bp, Homo sapiens
  source 1..2244: mol_type = unassigned DNA
aaaaggaaaacgaggcaccgagaagttaaggaacttgctcaaggtcacagagtttgaactcaggctacagatgctgcagcaactggagaaagtcctcatcgccccatatcacccaccaccgacccccagcaggacgtgacccccgccaggacggaggccggcagctggggggctggagcatgggacccagaacacggactcaggcttgcgcagcctcctggcttctaggcgggagcctagaaaggcgccagcccctttcgcgtgctgctgagactccaggggtggggttcactctcaggggcgcacaaaggcatgaaaaccttggcttcagcctctgagatgcggaactgaccgacctattgtcttgggacccaccagtgcgcttgggtgcaccagcccccttaacgttggtgccggctccctcccggctcctccccatcccagagggtcccctcgccccaggccctgagcctgcgtcctggggtcctgggccgcacgtgcctctggcagctcgaagaagctgtcggggcttgcaggagagcgtgcaaactgaaaccaaaacaggccgactcgaggaacatccgggtgggaccgcagactcaccggagcgcagcgcctgggccagggcctgggaccctgctccgccccgcgctcccctgcaccccttccccacgctgctcccctcttcctaagcggccccccctctcccgggcagcagaagaaggggtgggacccgggcgggctccgggagggggccctggaggaatggatggtggcggaagggcggagcaggggcggggcccgcggagactccacggggcgccccgggcgtgaggcacccactctgggagcacagagagctcaggtagcctgcctagatggcggcgcgcaccctgggccgcggcgtcgggaggctgctgggcagcctgcgagggctctcggggcagcccgcgcggccgccgtgcggggtgagcgcgccgcgcagggcggcctcgggaccctcgggcagcgctcccgcagttgcagcagcagcagcacagccaggctcgtatcccgcgctgagtgcacaggcagcccgggagccggccgccttctgggggcctctggcgcgggacactctcgtgtgggacaccccctaccacaccgtctgggactgcgacttcagcactggcaagatcggctggttcctgggaggccagttaaatgtctctgtcaactgcttggaccagcatgttcggaagtcccccgagagcgttgctttgatctgggagcgcgatgagcctggaacggaagtgaggatcacctacagtccctggttgcagatgccgtgtggcccataggccagcagcattcttctgccctggatcctcgggccccactggacaactgagcggccccccaggtggcccctgcacactggagtgtgcttggctctgaagacccaagctgctgcagctgcccctcgccacggtgggcccagctccatctgcctgcgaacaaagccccttctgagaaggaacttgaggctgctgcccctggagtagttcttcagtaaaagatgaaaaccctctgttgggggtcgggggctaaggagctaactggacacctggaggtccggcagggagggcccagccatggcactccccgaagggccagtttctctccatcagtctctcaggtgtgcctggaccctggggcaggcaggttgtgtgccacgccccctcggctggacgctgcccgtgggagcactgagtgtgtgctaagtagcggttcggtctgtgagcggggctggagccctgtggagacgtgtggttaaacataaaccatgtgagaattctcaggaccacagccagcctgtggaagctaaggacagcttcaggtccatgacactgaaatggccctggcaaagtacttattactctgtctctaaaaataaacaggggccggtcgcagtggctcatgccggtaatcccagcactttgggatggtgaggatcacttgaggacggtgggtggatcgcttgaggtcaggagtttgagaccaacctggccaacatggtgaaaccccgtctctactaaaaatacaaaaattagttgggtgtggtgatgtgcgcctgtagtcccagctacttgggaggctgaagcaggagaactgcttgaaactgggaggtggatgttgcagtgagccaagattgtgccactgcactccatcctgggtgacagagtcagactccatctcaaaaat

SEQ ID NO: 885 - DNA, 3857 bp, Homo sapiens
  source 1..3857: mol_type = unassigned DNA
aaaaggaaaacgaggcaccgagaagttaaggaacttgctcaaggtcacagagtttgaactcaggctacagatgctgcagcaactggagaaagtcctcatcgccccatatcacccaccaccgacccccagcaggacgtgacccccgccaggacggaggccggcagctggggggctggagcatgggacccagaacacggactcaggcttgcgcagcctcctggcttctaggcgggagcctagaaaggcgccagcccctttcgcgtgctgctgagactccaggggtggggttcactctcaggggcgcacaaaggcatgaaaaccttggcttcagcctctgagatgcggaactgaccgacctattgtcttgggacccaccagtgcgcttgggtgcaccagcccccttaacgttggtgccggctccctcccggctcctccccatcccagagggtcccctcgccccaggccctgagcctgcgtcctggggtcctgggccgcacgtgcctctggcagctcgaagaagctgtcggggcttgcaggagagcgtgcaaactgaaaccaaaacaggccgactcgaggaacatccgggtgggaccgcagactcaccggagcgcagcgcctgggccagggcctgggaccctgctccgccccgcgctcccctgcaccccttccccacgctgctcccctcttcctaagcggccccccctctcccgggcagcagaagaaggggtgggacccgggcgggctccgggagggggccctggaggaatggatggtggcggaagggcggagcaggggcggggcccgcggagactccacggggcgccccgggcgtgaggcacccactctgggagcacagagagctcaggtagcctgcctagatggcggcgcgcaccctgggccgcggcgtcgggaggctgctgggcagcctgcgagggctctcggggcagcccgcgcggccgccgtgcggggtgagcgcgccgcgcagggcggcctcgggaccctcgggcagcgctcccgcagttgcagcagcagcagcacagccaggctcgtatcccgcgctgagtgcacaggcagcccgggagccggccgccttctgggggcctctggcgcgggacactctcgtgtgggacaccccctaccacaccgtctgggactgcgacttcagcactggcaagatcggctggttcctgggaggccagttaaatgtctctgtcaactgcttggaccagcatgttcggaagtcccccgagagcgttgctttgatctgggagcgcgatgagcctggaacggaagtgaggatcacctacagggaactactggagaccacgtgccgcctggccaacacgctgaagaggcatggagtccaccgtggggaccgtgttgccatctacatgcccgtgtccccattggctgtggcagcaatgctggcctgtgccaggatcggagctgtccacacagtcatctttgctggcttcagtgcagagtccttggctgggaggatcaatgatgtgggagagcccatcaactgtgaggcctgggagtggcttcacagggtggtgggggacagcaggtgcacgctggtggacacctggtggcagacagaaacaggtggcatctgcatcgcaccacggccctcggaagaaggggcggaaatcctccctgccatggcgatgaggcccttctttggcatcgtccccgtcctcatggatgagaagggcagcgtcgtggagggcagcaacgtctccggggccctgtgcatctcccaggcctggccgggcatggccaggaccatctatggcgaccaccagcgatttgtggacgcctacttcaaggcctacccaggctattacttcactggagacggggcttaccgaactgagggcggctattaccagatcacagggcggatggatgatgtcatcaacatcagtggccaccggctggggaccgcagagattgaggacgccatcgccgaccaccctgcagtaccagaaagtgctgtcattggctacccccacgacatcaaaggagaagctgcctttgccttcattgtggtgaaagatagtgcgggtgactcagatgtggtggtgcaggagctcaagtccatggtggccaccaagatcgccaaatatgctgtgcctgatgagatcctggtggtgaaacgtcttccaaaaaccaggtctgggaaggtcatgcggcggctcctgaggaagatcatcactagtgaggcccaggagctgggagacactaccaccttggaggaccccagcatcatcgcagagatcctgagtgtctaccagaagtgcaaggacaagcaggctgctgctaagtgagctggcaccttgtggggctcttgggatgggcgggcacccaagccctggcttgtccttcccagaaggtacccctgaggttggcgtcttcctacgtcccagaagcagcccccaccccacacatgacccacaccgccctcacgtgaagctgggctgagagccctttctcccatccattggaggtcccaggagtgtcacccatggagaggctatgcgacatggctagggctggttctgccatctgagtttggtttcctggaatgaaaaggcattgccatctccattcctctgccctcttgagccagcacaggaaggtgaggccctgggatagcgcgcctgctcagataacacagagctagttagctagtagcaaccgtgttttctccagatctgtctagatacaaaggtcagaaatcttatttttatacttttatattgtggaagaacagcatgcaacactcacatgtagtgtgtggatttacttgaacatgttctttttaacatgtagttatgaaaatctccttttttgcctctactggtgaggaaacatgaggatcagaggccacatttttaattattgttagtgtatttggaagtctgaattggagatgtttgtacctctgtctaaacagttcccttgagaacttccaagcctccggcatcttttcctggtgagtgtttctcctgtgcttggttgtgtataatggagctaactcctaagcggtggggtgaatgtggccgccttagttctgaagctactccagttatgttctgtttcttcaagctgtgatccagaaagatttttgtgcccccagatgcctcttgataggagaggcaacatactccaaatagttgggttcttcagggaagctattagaaactcaggtgacttgttagagcactaacttggtcagagccaaatcctggcaaacgctgcctgaccttcactctgtggttggggcggtgagaaccactgaggtccaatgatgagacttggaggtctggatccagtctctctttgttttaatgtgacttaggtgctgtcaacattagcaagataatggaaatcacgacgccagtgggtgcttacctccctgctaggcatgcaggggctggcggttggcaggggaaggaggcccagtgagccgggtcccttaggggagggagagtttgtcctctttgccccacagtctacccttcagggccttgtggcagtgccagtgttcggggggtgtctgggccactgagtacccactcggtcgtggttgtgctggcctcttgggtgagtgaacctgtgaagcccaggaggtggtgttggctgcagggtacacaaatactgagtggtggtcttttgttacaggcttagcaacaaagctgtgccctgggcatggggggctgtagtgtagctacagttgtgcgtttgtgaaatggcttagctttccatgttgctgagaggaacctggacatggtcccgggcatctgaatgatctgtaggggagggagttcaaataaagctttattttgttc

SEQ ID NO: 886 - DNA, 2606 bp, Homo sapiens
  source 1..2606: mol_type = unassigned DNA
aaaaggaaaacgaggcaccgagaagttaaggaacttgctcaaggtcacagagtttgaactcaggctacagatgctgcagcaactggagaaagtcctcatcgccccatatcacccaccaccgacccccagcaggacgtgacccccgccaggacggaggccggcagctggggggctggagcatgggacccagaacacggactcaggcttgcgcagcctcctggcttctaggcgggagcctagaaaggcgccagcccctttcgcgtgctgctgagactccaggggtggggttcactctcaggggcgcacaaaggcatgaaaaccttggcttcagcctctgagatgcggaactgaccgacctattgtcttgggacccaccagtgcgcttgggtgcaccagcccccttaacgttggtgccggctccctcccggctcctccccatcccagagggtcccctcgccccaggccctgagcctgcgtcctggggtcctgggccgcacgtgcctctggcagctcgaagaagctgtcggggcttgcaggagagcgtgcaaactgaaaccaaaacaggccgactcgaggaacatccgggtgggaccgcagactcaccggagcgcagcgcctgggccagggcctgggaccctgctccgccccgcgctcccctgcaccccttccccacgctgctcccctcttcctaagcggccccccctctcccgggcagcagaagaaggggtgggacccgggcgggctccgggagggggccctggaggaatggatggtggcggaagggcggagcaggggcggggcccgcggagactccacggggcgccccgggcgtgaggcacccactctgggagcacagagagctcaggtagcctgcctagatggcggcgcgcaccctgggccgcggcgtcgggaggctgctgggcagcctgcgagggctctcggggcagcccgcgcggccgccgtgcggggtgagcgcgccgcgcagggcggcctcgggaccctcgggcagcgctcccgcagttgcagcagcagcagcacagccaggctcgtatcccgcgctgagtgcacaggcagcccgggagccggccgccttctgggggcctctggcgcgggacactctcgtgtgggacaccccctaccacaccgtctgggactgcgacttcagcactggcaagatcggctggttcctgggaggccagttaaatgtctctgtcaactgcttggaccagcatgttcggaagtcccccgagagcgttgctttgatctgggagcgcgatgagcctggaacggaagtgaggatcacctacagggaactactggagaccacgtgccgcctggccaacacgctgaagaggcatggagtccaccgtggggaccgtgttgccatctacatgcccgtgtccccattggctgtggcagcaatgctggcctgtgccaggatcggagctgtccacacagtcatctttgctggcttcagtgcagagtccttggctgggaggatcaatgatgccaagtgcaaggtggttatcaccttcaaccaaggactccggggtgggcgcgtggtggagctgaagaaaatagtggatgaggctgtgaagcactgccccaccgtgcagcatgtcctggtggctcacaggacagacaacaaggtccacatgggggatctggacgtcccgctggagcaggaaatggccaaggaggaccctgtttgcgccccagagagcatgggcagtgaggacatgctcttcatgctgtacacctcagggagcaccggaatgcccaagggcatcgtccatacccaggcaggctacctgctctatgccgccctgactcacaagcttgtgtttgaccaccagccaggtgacatctttggctgtgtggccgacatcggttggattacaggacacagctacgtggtgtatgggcctctctgcaatggtgccaccagcgtcctttttgagagcaccccagtttatcccaatgctggtcggtactgggagacagtagagaggttgaagatcaatcagttctatggcgccccaacggctgtccggctgttgctgaaatacggtgatgcctgggtgaagaagtatgatcgctcctccctgcggaccctggggtcagtgggagagcccatcaactgtgaggcctgggagtggcttcacagggtggtgggggacagcaggtgcacgctggtggacacctggtggcagacagaaacaggtggcatctgcatcgcaccacggccctcggaagaaggggcggaaatcctccctgccatggcgatgaggcccttctttggcatcgtccccgtcctcatggatgagaagggcagcgtcgtggagggcagcaacgtctccggggccctgtgcatctcccaggcctggccgggcatggccaggaccatctatggcgaccaccagcgatttgtggacgcctacttcaaggcctacccaggctattacttcactggagacggggcttaccgaactgagggcggctattaccagatcacagggcggatggatgatgtcatcaacatactccaaatagttgggttcttcagggaagctattagaaactcaggtgacttgttagagcactaa

SEQ ID NO: 887 - DNA, 4877 bp, Homo sapiens
  source 1..4877: mol_type = unassigned DNA
agctatgcaaacacgctgcgagcggccttgagagcccgaggagggtctgctttctgggcccctgcagagggcaggggtcgcgggctggtggtctgccccgcccagagagaaagggccttggcttcccctcattcttcgttctgtgttagctctttttattgcaaataattaattaaagtcagtacagcaagagtgggaaagtggttaatgcaattgccaggtccagattcagagggatgaggcgccgaaaggaaagacaaccttgggatcgcttccacttcctccacttcgcaccgcatggccggcaagttggcggctctcgcctgctcccagttttcccggagttgagtatggttgactctgactggaccaggttgggtcacgtgtcggccctgagccaatcagcttgcccagagagatgatgcgccctgagtggtgggtgaacctggtgataggccccagagtggccagagaggaagggcatgcgcacaccatagacataggcaacgtggtggacgacatgggggctgggcgggggtgctgctcacccaccttgtgcccagtgctttcccttccccttgtccatggtcccctagcttggggagaaagcagggtgcttgctctacccgccagtgctgtctcggggctgcagggagttgtggctgccctgcttgcggtcttcactcccaactcactgtggctttgcagagctggagtccgccctatctgggcttgggggtctgctccctgagagcattatttggtgcccctcgactgtgttgattcagaaatctgggacctgttgtttctcgactaaatgtcttatgagatcagtctttcttttggaggcaaacattttcggaagttttggaaccatgatgatctatgcctcagacacttgtggtccctgagaagctgctgctggaaaaaggggtccccatccggatcccaggagagggttcttggatcatgccgggaaggaatccaaggcgagtggcagagcgcagtgaaaagagatagtttattgaaagcttctcagttacatagtagggcatcctcagcaagaggaggaatgcctctgttttgtttctttcttatataggggtcttatctatgtaaaagctaagctatgtctccctgcgggtaggctgacgaagtgacatttattactttgttgattgaaagaaagctatccttggcattttagtgcataagtacatcaaagcatgcctataatcatcttaaaagcatatattatgcaatattggggcatctggacattctgttgttgcaagagtttgtctttgcaggtattaagctacttcgtcagctgtaaacatcttatgactgtgggtcatgactggcaaggaatgtgccttgctagttttaagatggaattgattctaaaatggtgtcaccatggctcccctacgctcctgttcccctaaaaaaaccctgccgtaagcggacttaaggatagccttgtcaccctagcaatgtggcagtgaatctctgccaatagcaatctacaaatgttaaaaacttttctttttctggaaaagtactttccatgcattaagtattcaagtgcctgttttcctggcactgggctggatgtatatgacataaaatttgcagtattgctccacccccaaactgctctgcattttggccctcctccatctctgatggctttctcttccctgtgctgcagggaactactggagaccacgtgccgcctggccaacacgctgaagaggcatggagtccaccgtggggaccgtgttgccatctacatgcccgtgtccccattggctgtggcagcaatgctggcctgtgccaggatcggagctgtccacacagtcatctttgctggcttcagtgcagagtccttggctgggaggatcaatgatgccaagtgcaaggtggttatcaccttcaaccaaggactccggggtgggcgcgtggtggagctgaagaaaatagtggatgaggctgtgaagcactgccccaccgtgcagcatgtcctggtggctcacaggacagacaacaaggtccacatgggggatctggacgtcccgctggagcaggaaatggccaaggaggaccctgtttgcgccccagagagcatgggcagtgaggacatgctcttcatgctgtacacctcagggagcaccggaatgcccaagggcatcgtccatacccaggcaggctacctgctctatgccgccctgactcacaagcttgtgtttgaccaccagccaggtgacatctttggctgtgtggccgacatcggttggattacaggacacagctacgtggtgtatgggcctctctgcaatggtgccaccagcgtcctttttgagagcaccccagtttatcccaatgctggtcggtactgggagacagtagagaggttgaagatcaatcagttctatggcgccccaacggctgtccggctgttgctgaaatacggtgatgcctgggtgaagaagtatgatcgctcctccctgcggaccctggggtcagtgggagagcccatcaactgtgaggcctgggagtggcttcacagggtggtgggggacagcaggtgcacgctggtggacacctggtggcagacagaaacaggtggcatctgcatcgcaccacggccctcggaagaaggggcggaaatcctccctgccatggcgatgaggcccttctttggcatcgtccccgtcctcatggatgagaagggcagcgtcgtggagggcagcaacgtctccggggccctgtgcatctcccaggcctggccgggcatggccaggaccatctatggcgaccaccagcgatttgtggacgcctacttcaaggcctacccaggctattacttcactggagacggggcttaccgaactgagggcggctattaccagatcacagggcggatggatgatgtcatcaacatcagtggccaccggctggggaccgcagagattgaggacgccatcgccgaccaccctgcagtaccagaaagtgctgtcattggctacccccacgacatcaaaggagaagctgcctttgccttcattgtggtgaaagatagtgcgggtgactcagatgtggtggtgcaggagctcaagtccatggtggccaccaagatcgccaaatatgctgtgcctgatgagatcctggtggtgaaacgtcttccaaaaaccaggtctgggaaggtcatgcggcggctcctgaggaagatcatcactagtgaggcccaggagctgggagacactaccaccttggaggaccccagcatcatcgcagagatcctgagtgtctaccagaagtgcaaggacaagcaggctgctgctaagtgagctggcaccttgtggggctcttgggatgggcgggcacccaagccctggcttgtccttcccagaaggtacccctgaggttggcgtcttcctacgtcccagaagcagcccccaccccacacatgacccacaccgccctcacgtgaagctgggctgagagccctttctcccatccattggaggtcccaggagtgtcacccatggagaggctatgcgacatggctagggctggttctgccatctgagtttggtttcctggaatgaaaaggcattgccatctccattcctctgccctcttgagccagcacaggaaggtgaggccctgggatagcgcgcctgctcagataacacagagctagttagctagtagcaaccgtgttttctccagatctgtctagatacaaaggtcagaaatcttatttttatacttttatattgtggaagaacagcatgcaacactcacatgtagtgtgtggatttacttgaacatgttctttttaacatgtagttatgaaaatctccttttttgcctctactggtgaggaaacatgaggatcagaggccacatttttaattattgttagtgtatttggaagtctgaattggagatgtttgtacctctgtctaaacagttcccttgagaacttccaagcctccggcatcttttcctggtgagtgtttctcctgtgcttggttgtgtataatggagctaactcctaagcggtggggtgaatgtggccgccttagttctgaagctactccagttatgttctgtttcttcaagctgtgatccagaaagatttttgtgcccccagatgcctcttgataggagaggcaacatactccaaatagttgggttcttcagggaagctattagaaactcaggtgacttgttagagcactaacttggtcagagccaaatcctggcaaacgctgcctgaccttcactctgtggttggggcggtgagaaccactgaggtccaatgatgagacttggaggtctggatccagtctctctttgttttaatgtgacttaggtgctgtcaacattagcaagataatggaaatcacgacgccagtgggtgcttacctccctgctaggcatgcaggggctggcggttggcaggggaaggaggcccagtgagccgggtcccttaggggagggagagtttgtcctctttgccccacagtctacccttcagggccttgtggcagtgccagtgttcggggggtgtctgggccactgagtacccactcggtcgtggttgtgctggcctcttgggtgagtgaacctgtgaagcccaggaggtggtgttggctgcagggtacacaaatactgagtggtggtcttttgttacaggcttagcaacaaagctgtgccctgggcatggggggctgtagtgtagctacagttgtgcgtttgtgaaatggcttagctttccatgttgctgagaggaacctggacatggtcccgggcatctgaatgatctgtaggggagggagttcaaataaagctttattttgttc

SEQ ID NO: 888 - DNA, 2228 bp, Homo sapiens
  source 1..2228: mol_type = unassigned DNA
cctttccttgactaccctttgaacagaggagagctatgcaaacacgctgcgagcggccttgagagcccgaggagggtctgctttctgggcccctgcagagggcaggggtcgcgggctggtggtctgccccgcccagagagaaagggccttggcttcccctcattcttcgttctgtgttagctctttttattgcaaataattaattaaagtcagtacagcaagagtgggaaagtggttaatgcaattgccaggtccagattcagagggatgaggcgccgaaaggaaagacaaccttgggatcgcttccacttcctccacttcgcaccgcatggccgggaactactggagaccacgtgccgcctggccaacacgctgaagaggcatggagtccaccgtggggaccgtgttgccatctacatgcccgtgtccccattggctgtggcagcaatgctggcctgtgccaggatcggagctgtccacacagtcatctttgctggcttcagtgcagagtccttggctgggaggatcaatgatgccaagtgcaaggtggttatcaccttcaaccaaggactccggggtgggcgcgtggtggagctgaagaaaatagtggatgaggctgtgaagcactgccccaccgtgcagcatgtcctggtggctcacaggacagacaacaaggtccacatgggggatctggacgtcccgctggagcaggaaatggccaaggaggaccctgtttgcgccccagagagcatgggcagtgaggacatgctcttcatgctgtacacctcagggagcaccggaatgcccaagggcatcgtccatacccaggcaggctacctgctctatgccgccctgactcacaagcttgtgtttgaccaccagccaggtgacatctttggctgtgtggccgacatcggttggattacaggacacagctacgtggtgtatgggcctctctgcaatggtgccaccagcgtcctttttgagagcaccccagtttatcccaatgctggtcggtactgggagacagtagagaggttgaagatcaatcagttctatggcgccccaacggctgtccggctgttgctgaaatacggtgatgcctgggtgaagaagtatgatcgctcctccctgcggaccctggggtcagtgggagagcccatcaactgtgaggcctgggagtggcttcacagggtggtgggggacagcaggtgcacgctggtggacacctggtggcagacagaaacaggtggcatctgcatcgcaccacggccctcggaagaaggggcggaaatcctccctgccatggcgatgaggcccttctttggcatcgtccccgtcctcatggatgagaagggcagcgtcgtggagggcagcaacgtctccggggccctgtgcatctcccaggcctggccgggcatggccaggaccatctatggcgaccaccagcgatttgtggacgcctacttcaaggcctacccaggctattacttcactggagacggggcttaccgaactgagggcggctattaccagatcacagggcggatggatgatgtcatcaacatcagtggccaccggctggggaccgcagagattgaggacgccatcgccgaccaccctgcagtaccagaaagtgctgtcattggctacccccacgacatcaaaggagaagctgcctttgccttcattgtggtgaaagatagtgcgggtgactcagatgtggtggtgcaggagctcaagtccatggtggccaccaagatcgccaaatatgctgtgcctgatgagatcctggtggtgaaacgtcttccaaaaaccaggtctgggaaggtcatgcggcggctcctgaggaagatcatcactagtgaggcccaggagctgggagacactaccaccttggaggaccccagcatcatcgcagagatcctgagtgtctaccagaagtgcaaggacaagcaggctgctgctaagtgagctggcaccttgtggggctcttgggatgggcgggcacccaagccctggcttgtccttcccagaaggtacccctgaggttggcgtcttcctacgtcccagaagcagcccccaccccacacatgacccacaccgccctcacgtgaagctgggctgagagccctttctcccatccattggaggtcccaggagtgtcacccatggagaggctatgcgacatggctagggctggttctgccatctgagtttggtttcct

SEQ ID NO: 889 - DNA, 2925 bp, Homo sapiens
  source 1..2925: mol_type = unassigned DNA
aaaggcggccgcggttctaggaacttgacgtgatggggcttcctgaggagcgggtccggagcggcagcgggagccggggccaggaggaagctggagccggaggccgggcgcggagttggtctccgccgcccgaggtcagccgctccgcgcacgtcccctcgctgcagcgctaccgcgagctgcaccggcgctccgtggaggagccgcgggaattctggggagacattgccaaggaattttactggaagactccatgccctggcccattccttcggtacaactttgatgtgactaaagggaaaatcttcattgagtggatgaaaggagcaactaccaacatctgctacaatgtactggatcgaaatgtccatgagaaaaagcttggagataaagttgctttttactgggagggcaatgagccaggggagaccactcagatcacataccatcagcttctggtccaagtgtgtcagttcagcaatgttctccgaaaacagggcattcagaagggggaccgagtggccatctacatgcctatgatcccagagcttgtggtggccatgctggcatgtgcccgcattggggctttgcactccattgtgtttgcaggcttctcttcagagtctctatgtgaacggatcttggattccagctgcagtcttctcatcactacagatgccttctacaggggggaaaagcttgtgaacctgaaggagctggctgacgaggccctgcagaagtgtcaggagaagggtttcccagtaagatgctgcattgtggtcaagcacctggggcgggcagagctcggcatgggtgactccaccagccagtcccccccaattaagaggtcatgcccagatgtgcagggtaaactgaaagagaaatccaagcgtgttcagccccagatctcatggaaccaagggattgacttgtggtggcatgagctcatgcaagaggcaggggatgagtgtgagcccgagtggtgtgatgccgaggacccactcttcatcctgtacaccagtggctccacaggcaaacccaagggtgtggttcacacagttgggggctacatgctctatgtagccacaaccttcaagtatgtgtttgacttccatgcagaggatgtgttctggtgcacggcagacattggttggatcactggtcattcctacgtcacctatgggccactggccaatggtgccaccagtgttttgtttgaggggattcccacatatccggacgtgaaccgcctgtggagcattgtggacaaatacaaggtgaccaagttctacacagcacccacagccatccgtctgctcatgaagtttggagatgagcctgtcaccaagcatagccgggcatccttgcaggtgttaggcacagtgggtgaacccatcaaccctgaggcctggctatggtaccaccgggtggtaggtgcccagcgctgccccatcgtggacaccttctggcaaacagagacaggtggccacatgttgactccccttcctggtgccacacccatgaaacccggttctgctactttcccattctttggtgtagctcctgcaatcctgaatgagtccggggaagagttggaaggtgaagctgaaggttatctggtgttcaagcagccctggccagggatcatgcgcacagtctatgggaaccacgaacgctttgagacaacctactttaagaagtttcctggatactatgttacaggagatggctgccagcgggaccaggatggctattactggatcactggcaggattgatgacatgctcaatgtatctggacacctgctgagtacagcagaggtggagtcagcacttgtggaacatgaggctgttgcagaggcagctgtggtgggccaccctcatcctgtgaagggtgaatgcctctactgctttgtcaccttgtgtgatggccacaccttcagccccaagctcaccgaggagctcaagaagcagattagagaaaagattggccccattgccacaccagactacatccagaatgcacctggcttgcctaaaacccgctcagggaaaatcatgaggcgagtgcttcggaagattgctcagaatgaccatgacctcggggacatgtctactgtggctgacccatctgtcatcagtcacctcttcagccaccgctgcctgaccatccagtgaacatgatcctgacctttacctaggattcctcctgctccaaactttgcccatcctctttgccccctcaggagtgctgagggccagtgttgacccacactaccctcccttgaccagctgtctgggaccggaaaccagctttgtctccaggtagagacaacatcctgtgactgccaggcagaaaggacagggcccaggtcagcctcagtctgctgtgcctccagactgcagagctctcagaacccagaacagagacgaaaaggctacctctcctacccaagttaagtgttcaaaggggatgtgagggcctccactgaagcagggaggcagctgtgtaatcctatgtcagctctcttaggaagccccagtacttatattgggcatgcacttgcccttaaaaacaatgatttgtgagtccaggaacaatttactatttttaaaatattttgctgcttctgttctgggtctgaattcccttttgtgccagatgccagtactgtctgcccattggctccaggggctgtatgggcagattcagtctccagagggtattcagatcatctgcttctttgaaggagtaaatgtgttttgttcctagggccagaggagcttgtcttccttgtcctctgttcccaccctcccctgaacagaacccagcccataagagacattctcagatgaaactctgttttcttgccccagtcaggctcaagccctgtggttgtaggaataaagcctgtgatctcaagaa

SEQ ID NO: 890 - DNA, 2708 bp, Homo sapiens
  source 1..2708: mol_type = unassigned DNA
atgatggtgaggtgggcacttctttgtgaattctggggagacattgccaaggaattttactggaagactccatgccctggcccattccttcggtacaactttgatgtgactaaagggaaaatcttcattgagtggatgaaaggagcaactaccaacatctgctacaatgtactggatcgaaatgtccatgagaaaaagcttggagataaagttgctttttactgggagggcaatgagccaggggagaccactcagatcacataccatcagcttctggtccaagtgtgtcagttcagcaatgttctccgaaaacagggcattcagaagggggaccgagtggccatctacatgcctatgatcccagagcttgtggtggccatgctggcatgtgcccgcattggggctttgcactccattgtgtttgcaggcttctcttcagagtctctatgtgaacggatcttggattccagctgcagtcttctcatcactacagatgccttctacaggggggaaaagcttgtgaacctgaaggagctggctgacgaggccctgcagaagtgtcaggagaagggtttcccagtaagatgctgcattgtggtcaagcacctggggcgggcagagctcggcatgggtgactccaccagccagtcccccccaattaagaggtcatgcccagatgtgcagatctcatggaaccaagggattgacttgtggtggcatgagctcatgcaagaggcaggggatgagtgtgagcccgagtggtgtgatgccgaggacccactcttcatcctgtacaccagtggctccacaggcaaacccaagggtgtggttcacacagttgggggctacatgctctatgtagccacaaccttcaagtatgtgtttgacttccatgcagaggatgtgttctggtgcacggcagacattggttggatcactggtcattcctacgtcacctatgggccactggccaatggtgccaccagtgttttgtttgaggggattcccacatatccggacgtgaaccgcctgtggagcattgtggacaaatacaaggtgaccaagttctacacagcacccacagccatccgtctgctcatgaagtttggagatgagcctgtcaccaagcatagccgggcatccttgcaggtgttaggcacagtgggtgaacccatcaaccctgaggcctggctatggtaccaccgggtggtaggtgcccagcgctgccccatcgtggacaccttctggcaaacagagacaggtggccacatgttgactccccttcctggtgccacacccatgaaacccggttctgctactttcccattctttggtgtagctcctgcaatcctgaatgagtccggggaagagttggaaggtgaagctgaaggttatctggtgttcaagcagccctggccagggatcatgcgcacagtctatgggaaccacgaacgctttgagacaacctactttaagaagtttcctggatactatgttacaggagatggctgccagcgggaccaggatggctattactggatcactggcaggattgatgacatgctcaatgtatctggacacctgctgagtacagcagaggtggagtcagcacttgtggaacatgaggctgttgcagaggcagctgtggtgggccaccctcatcctgtgaagggtgaatgcctctactgctttgtcaccttgtgtgatggccacaccttcagccccaagctcaccgaggagctcaagaagcagattagagaaaagattggccccattgccacaccagactacatccagaatgcacctggcttgcctaaaacccgctcagggaaaatcatgaggcgagtgcttcggaagattgctcagaatgaccatgacctcggggacatgtctactgtggctgacccatctgtcatcagtcacctcttcagccaccgctgcctgaccatccagtgaacatgatcctgacctttacctaggattcctcctgctccaaactttgcccatcctctttgccccctcaggagtgctgagggccagtgttgacccacactaccctcccttgaccagctgtctgggaccggaaaccagctttgtctccaggtagagacaacatcctgtgactgccaggcagaaaggacagggcccaggtcagcctcagtctgctgtgcctccagactgcagagctctcagaacccagaacagagacgaaaaggctacctctcctacccaagttaagtgttcaaaggggatgtgagggcctccactgaagcagggaggcagctgtgtaatcctatgtcagctctcttaggaagccccagtacttatattgggcatgcacttgcccttaaaaacaatgatttgtgagtccaggaacaatttactatttttaaaatattttgctgcttctgttctgggtctgaattcccttttgtgccagatgccagtactgtctgcccattggctccaggggctgtatgggcagattcagtctccagagggtattcagatcatctgcttctttgaaggagtaaatgtgttttgttcctagggccagaggagcttgtcttccttgtcctctgttcccaccctcccctgaacagaacccagcccataagagacattctcagatgaaactctgttttcttgccccagtcaggctcaagccctgtggttgtaggaataaagcctgtgatctcaagaagtgg

SEQ ID NO: 891 - DNA, 3065 bp, Homo sapiens
  source 1..3065: mol_type = unassigned DNA
tatagtatttctgtccttgccaacctcgatccctccccaaccagacacggccccgccccctctggcaccgcccacccgccagactaagccactcccccactcaccaggccccgcccctctacggaggccccgcctctagttcggcctgttttctcagtcccggcacccgccgcgaccgcaaaggcggccgcggttctaggaacttgacgtgatggggcttcctgaggagcgggtccggagcggcagcgggagccggggccaggaggaagctggagccggaggccgggcgcggagttggtctccgccgcccgaggtcagccgctccgcgcacgtcccctcgctgcagcgctaccgcgagctgcaccggcgctccgtggaggagccgcgggaattctggggagacattgccaaggaattttactggaagactccatgccctggcccattccttcggtacaactttgatgtgactaaagggaaaatcttcattgagtggatgaaaggagcaactaccaacatctgctacaatgtactggatcgaaatgtccatgagaaaaagcttggagataaagttgctttttactgggagggcaatgagccaggggagaccactcagatcacataccatcagcttctggtccaagtgtgtcagttcagcaatgttctccgaaaacagggcattcagaagggggaccgagtggccatctacatgcctatgatcccagagcttgtggtggccatgctggcatgtgcccgcattggggctttgcactccattgtgtttgcaggcttctcttcagagtctctatgtgaacggatcttggattccagctgcagtcttctcatcactacagatgccttctacaggggggaaaagcttgtgaacctgaaggagctggctgacgaggccctgcagaagtgtcaggagaagggtttcccagtaagatgctgcattgtggtcaagcacctggggcgggcagagctcggcatgggtgactccaccagccagtcccccccaattaagaggtcatgcccagatgtgcagatctcatggaaccaagggattgacttgtggtggcatgagctcatgcaagaggcaggggatgagtgtgagcccgagtggtgtgatgccgaggacccactcttcatcctgtacaccagtggctccacaggcaaacccaagggtgtggttcacacagttgggggctacatgctctatgtagccacaaccttcaagtatgtgtttgacttccatgcagaggatgtgttctggtgcacggcagacattggttggatcactggtcattcctacgtcacctatgggccactggccaatggtgccaccagtgttttgtttgaggggattcccacatatccggacgtgaaccgcctgtggagcattgtggacaaatacaaggtgaccaagttctacacagcacccacagccatccgtctgctcatgaagtttggagatgagcctgtcaccaagcatagccgggcatccttgcaggtgttaggcacagtgggtgaacccatcaaccctgaggcctggctatggtaccaccgggtggtaggtgcccagcgctgccccatcgtggacaccttctggcaaacagagacaggtggccacatgttgactccccttcctggtgccacacccatgaaacccggttctgctactttcccattctttggtgtagctcctgcaatcctgaatgagtccggggaagagttggaaggtgaagctgaaggttatctggtgttcaagcagccctggccagggatcatgcgcacagtctatgggaaccacgaacgctttgagacaacctactttaagaagtttcctggatactatgttacaggagatggctgccagcgggaccaggatggctattactggatcactggcaggattgatgacatgctcaatgtatctggacacctgctgagtacagcagaggtggagtcagcacttgtggaacatgaggctgttgcagaggcagctgtggtgggccaccctcatcctgtgaagggtgaatgcctctactgctttgtcaccttgtgtgatggccacaccttcagccccaagctcaccgaggagctcaagaagcagattagagaaaagattggccccattgccacaccagactacatccagaatgcacctggcttgcctaaaacccgctcagggaaaatcatgaggcgagtgcttcggaagattgctcagaatgaccatgacctcggggacatgtctactgtggctgacccatctgtcatcagtcacctcttcagccaccgctgcctgaccatccagtgaacatgatcctgacctttacctaggattcctcctgctccaaactttgcccatcctctttgccccctcaggagtgctgagggccagtgttgacccacactaccctcccttgaccagctgtctgggaccggaaaccagctttgtctccaggtagagacaacatcctgtgactgccaggcagaaaggacagggcccaggtcagcctcagtctgctgtgcctccagactgcagagctctcagaacccagaacagagacgaaaaggctacctctcctacccaagttaagtgttcaaaggggatgtgagggcctccactgaagcagggaggcagctgtgtaatcctatgtcagctctcttaggaagccccagtacttatattgggcatgcacttgcccttaaaaacaatgatttgtgagtccaggaacaatttactatttttaaaatattttgctgcttctgttctgggtctgaattcccttttgtgccagatgccagtactgtctgcccattggctccaggggctgtatgggcagattcagtctccagagggtattcagatcatctgcttctttgaaggagtaaatgtgttttgttcctagggccagaggagcttgtcttccttgtcctctgttcccaccctcccctgaacagaacccagcccataagagacattctcagatgaaactctgttttcttgccccagtcaggctcaagccctgtggttgtaggaataaagcctgtgatctcaagaa

SEQ ID NO: 892 - DNA, 2973 bp, Homo sapiens
  source 1..2973: mol_type = unassigned DNA
actcccccactcaccaggccccgcccctctacggaggccccgcctctagttcggcctgttttctcagtcccggcacccgccgcgaccgcaaaggcggccgcggttctaggaacttgacgtgatggggcttcctgaggagcgggtccggagcggcagcgggagccggggccaggaggaagctggagccggaggccgggcgcggagttggtctccgccgcccgaggtcagccgctccgcgcacgtcccctcgctgcagcgctaccgcgagctgcaccggcgctccgtggaggagccgcgggaattctggggagacattgccaaggaattttactggaagactccatgccctggcccattccttcggtacaactttgatgtgactaaagggaaaatcttcattgagtggatgaaaggagcaactaccaacatctgctacaatgtactggatcgaaatgtccatgagaaaaagcttggagataaagttgctttttactgggagggcaatgagccaggggagaccactcagatcacataccatcagcttctggtccaagtgtgtcagttcagcaatgttctccgaaaacagggcattcagaagggggaccgagtggccatctacatgcctatgatcccagagcttgtggtggccatgctggcatgtgcccgcattggggctttgcactccattgtgtttgcaggcttctcttcagagtctctatgtgaacggatcttggattccagctgcagtcttctcatcactacagatgccttctacaggggggaaaagcttgtgaacctgaaggagctggctgacgaggccctgcagaagtgtcaggagaagggtttcccagtaagatgctgcattgtggtcaagcacctggggcgggcagagctcggcatgggtgactccaccagccagtcccccccaattaagaggtcatgcccagatgtgcagatctcatggaaccaagggattgacttgtggtggcatgagctcatgcaagaggcaggggatgagtgtgagcccgagtggtgtgatgccgagcactcttcatcctgtacaccagtggctccacaggcaaacccaagggtgtggttcacacagttgggggctacatgctatgtagccacaaccttcaagtatgtgtttgacttccatgcagaggatgtgttctggtgcacggcagacattggttggatcactggtcattcctacgtcacctatgggccactggccaatggtgccaccagtgttttgtttgaggggattcccacatatccggacgtgaaccgcctgtggagcattgtggacaaatacaaggtgaccaagttctacacagcacccacagccatccgtctgctcatgaagtttggagatgagcctgtcaccaagcatagccgggcatccttgcaggtgttaggcacagtgggtgaacccatcaaccctgaggcctggctatggtaccaccgggtggtaggtgcccagcgctgccccatcgtggacaccttctggcaaacagagacaggtggccacatgttgactccccttcctggtgccacacccatgaaacccggttctgctactttcccattctttggtgtagctcctgcaatcctgaatgagtccggggaagagttggaaggtgaagctgaaggttatctggtgttcaagcagccctggccagggatcatgcgcacagtctatgggaaccacgaacgctttgagacaacctactttaagaagtttcctggatactatgttacaggagatggctgccagcgggaccaggatggctattactggatcactggcaggattgatgacatgctcaatgtatctggacacctgctgagtacagcagaggtggagtcagcacttgtggaacatgaggctgttgcagaggcagctgtggtgggccaccctcatcctgtgaagggtgaatgcctctactgctttgtcaccttgtgtgatggccacaccttcagccccaagctcaccgaggagctcaagaagcagattagagaaaagattggccccattgccacaccagactacatccagaatgcacctggcttgcctaaaacccgctcagggaaaatcatgaggcgagtgcttcggaagattgctcagaatgaccatgacctcggggacatgtctactgtggctgacccatctgtcatcagtcacctcttcagccaccgctgcctgaccatccagtgaacatgatcctgacctttacctaggattcctcctgctccaaactttgcccatcctctttgccccctcaggagtgctgagggccagtgttgacccacactaccctcccttgaccagctgtctgggaccggaaaccagctttgtctccaggtagagacaacatcctgtgactgccaggcagaaaggacagggcccaggtcagcctcagtctgctgtgcctccagactgcagagctctcagaacccagaacagagacgaaaaggctacctctcctacccaagttaagtgttcaaaggggatgtgagggcctccactgaagcagggaggcagctgtgtaatcctatgtcagctctcttaggaagccccagtacttatattgggcatgcacttgcccttaaaaacaatgatttgtgagtccaggaacaatttactatttttaaaatattttgctgcttctgttctgggtctgaattcccttttgtgccagatgccagtactgtctgcccattggctccaggggctgtatgggcagattcagtctccagagggtattcagatcatctgcttctttgaaggagtaaatgtgttttgttcctagggccagaggagcttgtcttccttgtcctctgttcccaccctcccctgaacagaacccagcccataagagacattctcagatgaaactctgttttcttgccccagtcaggctcaagccctgtggttgtaggaataaagcctgtgatctcaagaagtgg

SEQ ID NO: 893 - DNA, 2400 bp, Homo sapiens
  source 1..2400: mol_type = unassigned DNA
agtcccggcacccgccgcgaccgcaaaggcggccgcggttctaggaacttgacgtgatggggcttcctgaggagcgggtccggagcggcagcgggagccggggccaggaggaagctggagccggaggccgggcgcggagttggtctccgccgcccgaggtcagccgctccgcgcacgtcccctcgctgcagcgctaccgcgagctgcaccggcgctccgtggaggagccgcgggaattctggggagacattgccaaggaattttactggaagactccatgccctggcccattccttcggtacaactttgatgtgactaaagggaaaatcttcattgagtggatgaaaggagcaactaccaacatctgctacaatgtactggatcgaaatgtccatgagaaaaagcttggagataaagttgctttttactgatctcatggaaccaagggattgacttgtggtggcatgagctcatgcaagaggcaggggatgagtgtgagcccgagtggtgtgatgccgaggacccactcttcatcctgtacaccagtggctccacaggcaaacccaagggtgtggttcacacagttgggggctacatgctctatgtagccacaaccttcaagtatgtgtttgacttccatgcagaggatgtgttctggtgcacggcagacattggttggatcactggtcattcctacgtcacctatgggccactggccaatggtgccaccagtgttttgtttgaggggattcccacatatccggacgtgaaccgcctgtggagcattgtggacaaatacaaggtgaccaagttctacacagcacccacagccatccgtctgctcatgaagtttggagatgagcctgtcaccaagcatagccgggcatccttgcaggtgttaggcacagtgggtgaacccatcaaccctgaggcctggctatggtaccaccgggtggtaggtgcccagcgctgccccatcgtggacaccttctggcaaacagagacaggtggccacatgttgactccccttcctggtgccacacccatgaaacccggttctgctactttcccattctttggtgtagctcctgcaatcctgaatgagtccggggaagagttggaaggtgaagctgaaggttatctggtgttcaagcagccctggccagggatcatgcgcacagtctatgggaaccacgaacgctttgagacaacctactttaagaagtttcctggatactatgttacaggagatggctgccagcgggaccaggatggctattactggatcactggcaggattgatgacatgctcaatgtatctggacacctgctgagtacagcagaggtggagtcagcacttgtggaacatgaggctgttgcagaggcagctgtggtgggccaccctcatcctgtgaagggtgaatgcctctactgctttgtcaccttgtgtgatggccacaccttcagccccaagctcaccgaggagctcaagaagcagattagagaaaagattggccccattgccacaccagactacatccagaatgcacctggcttgcctaaaacccgctcagggaaaatcatgaggcgagtgcttcggaagattgctcagaatgaccatgacctcggggacatgtctactgtggctgacccatctgtcatcagtcacctcttcagccaccgctgcctgaccatccagtgaacatgatcctgacctttacctaggattcctcctgctccaaactttgcccatcctctttgccccctcaggagtgctgagggccagtgttgacccacactaccctcccttgaccagctgtctgggaccggaaaccagctttgtctccaggtagagacaacatcctgtgactgccaggcagaaaggacagggcccaggtcagcctcagtctgctgtgcctccagactgcagagctctcagaacccagaacagagacgaaaaggctacctctcctacccaagttaagtgttcaaaggggatgtgagggcctccactgaagcagggaggcagctgtgtaatcctatgtcagctctcttaggaagccccagtacttatattgggcatgcacttgcccttaaaaacaatgatttgtgagtccaggaacaatttactatttttaaaatattttgctgcttctgttctgggtctgaattcccttttgtgccagattcagtctccagagggtattcagatcatctgcttctttgaaggagtaaatgtgttttgttcctagggccagaggagcttgtcttccttgtcctctgttcccaccctcccctgaacagaacccagcccataagagacattctcagatgaaactctgttttcttgccccagtcaggctcaagccctgtggttgtaggaataaagcctgtgatctc

SEQ ID NO: 894 - DNA, 2851 bp, Homo sapiens
  source 1..2851: mol_type = unassigned DNA
gaagggaggctgggctagatggggtcacaaggcctgtgtaggcttcaggaggtgggagctgcccgcttcaggcctcagaatcactcttggagttagatatttaagaatccttcctgccttgacagccagtctgtgaaatgatggtgaggtgggcacttctttgtggtgagtgcagaattctggggagacattgccaaggaattttactggaagactccatgccctggcccattccttcggtacaactttgatgtgactaaagggaaaatcttcattgagtggatgaaaggagcaactaccaacatctgctacaatgtactggatcgaaatgtccatgagaaaaagcttggagataaagttgctttttactgggagggcaatgagccaggggagaccactcagatcacataccatcagcttctggtccaagtgtgtcagttcagcaatgttctccgaaaacagggcattcagaagggggaccgagtggccatctacatgcctatgatcccagagcttgtggtggccatgctggcatgtgcccgcattggggctttgcactccattgtgtttgcaggcttctcttcagagtctctatgtgaacggatcttggattccagctgcagtcttctcatcactacagatgccttctacaggggggaaaagcttgtgaacctgaaggagctggctgacgaggccctgcagaagtgtcaggagaagggtttcccagtaagatgctgcattgtggtcaagcacctggggcgggcagagctcggcatgggtgactccaccagccagtcccccccaattaagaggtcatgcccagatgtgcagatctcatggaaccaagggattgacttgtggtggcatgagctcatgcaagaggcaggggatgagtgtgagcccgagtggtgtgatgccgaggacccactcttcatcctgtacaccagtggctccacaggcaaacccaagggtgtggttcacacagttgggggctacatgctctatgtagccacaaccttcaagtatgtgtttgacttccatgcagaggatgtgttctggtgcacggcagacattggttggatcactggtcattcctacgtcacctatgggccactggccaatggtgccaccagtgttttgtttgaggggattcccacatatccggacgtgaaccgcctgtggagcattgtggacaaatacaaggtgaccaagttctacacagcacccacagccatccgtctgctcatgaagtttggagatgagcctgtcaccaagcatagccgggcatccttgcaggtgttaggcacagtgggtgaacccatcaaccctgaggcctggctatggtaccaccgggtggtaggtgcccagcgctgccccatcgtggacaccttctggcaaacagagacaggtggccacatgttgactccccttcctggtgccacacccatgaaacccggttctgctactttcccattctttggtgtagctcctgcaatcctgaatgagtccggggaagagttggaaggtgaagctgaaggttatctggtgttcaagcagccctggccagggatcatgcgcacagtctatgggaaccacgaacgctttgagacaacctactttaagaagtttcctggatactatgttacaggagatggctgccagcgggaccaggatggctattactggatcactggcaggattgatgacatgctcaatgtatctggacacctgctgagtacagcagaggtggagtcagcacttgtggaacatgaggctgttgcagaggcagctgtggtgggccaccctcatcctgtgaagggtgaatgcctctactgctttgtcaccttgtgtgatggccacaccttcagccccaagctcaccgaggagctcaagaagcagattagagaaaagattggccccattgccacaccagactacatccagaatgcacctggcttgcctaaaacccgctcagggaaaatcatgaggcgagtgcttcggaagattgctcagaatgaccatgacctcggggacatgtctactgtggctgacccatctgtcatcagtcacctcttcagccaccgctgcctgaccatccagtgaacatgatcctgacctttacctaggattcctcctgctccaaactttgcccatcctctttgccccctcaggagtgctgagggccagtgttgacccacactaccctcccttgaccagctgtctgggaccggaaaccagctttgtctccaggtagagacaacatcctgtgactgccaggcagaaaggacagggcccaggtcagcctcagtctgctgtgcctccagactgcagagctctcagaacccagaacagagacgaaaaggctacctctcctacccaagttaagtgttcaaaggggatgtgagggcctccactgaagcagggaggcagctgtgtaatcctatgtcagctctcttaggaagccccagtacttatattgggcatgcacttgcccttaaaaacaatgatttgtgagtccaggaacaatttactatttttaaaatattttgctgcttctgttctgggtctgaattcccttttgtgccagatgccagtactgtctgcccattggctccaggggctgtatgggcagattcagtctccagagggtattcagatcatctgcttctttgaaggagtaaatgtgttttgttcctagggccagaggagcttgtcttccttgtcctctgttcccaccctcccctgaacagaacccagcccataagagacattctcagatgaaactctgttttcttgccccagtcaggctcaagccctgtggttgtaggaataaagcctgtgatctcaagaa

SEQ ID NO: 895 - DNA, 4803 bp, Homo sapiens
  source 1..4803: mol_type = unassigned DNA
ctttctttttacattttcccagtttcctcttttgattcatctttacttacttcctatttttgttttttgtttatttgtttgttttgttttctcattagaaaagccacagaaactccaagcaggcaaattagaagggaggcaatgcaacaagtcctatctgttctctgtctagatcacatgcggagtctggtcagcaggtgaatccgcatcccagtggggtcaccttccctgtgacctgtcaatcaccccaagaagcacttcccaatttgtctggcacaacctccttccactcctcctaccctctcagtggtcaggaaatcccggagcagtccttgccctggagctgcttgtgtttttagtaaccagggactgagctgattttgaaaaatcaatcaatcaataaataacaatcaaagagccttgcctcaacgcaccgagttgctggtttcctgcaggtcagaggcgatgccacctccaccaacgaccttccaaagattaaaccagccgtgtacaaactgctggattgaaaattgagagatgggccgttggcctcctcctaggagtacttgtgtgttgaaatcggaaggacgttctggagtttgagcgcgatttttcccggaaggctgcggggttggaagtgcatgttggggtttggatctcgtgcagcagcgcaactaacctgctgcaacggcgctgtgacacccctgtcccggggcccccactttagcctgttgcttctctggtcgctccaggtcggtttttcccggcgactctagtgtggcttccaaacttctgggctctgggctcacttcggaatttgcccccgccccctactcccttccctcaggccccaggaagttgcaagagtaccatttgtcgcacactcggggaccgcgggtggccggaggagatgaaaccgtcttggctgcagtgtcgtaaagtcaccagcgccggggggctcggagggcccttgcctgggtcctctccggcccggggagccggtgcggccctcagggctttagtggtcccgggcccgcggggcggtctcgggggccggggatgcagggcactgtcctccggcagtggcagcgagtacaagacccacttcgcagcctcggtgaccgaccccgagaggttctggggcaaagctgccgagcagatcagctggtacaagccctggaccaaaacgctggagaacaaacactcgccctctaccaggtggtttgtggaaggaatgcttaacatttgttacaatgccgttgatcgtcatattgaaaatggtaaaggggataagattgctatcatctatgacagtcctgttacaaacactaaagcaacctttacctataaagaagttctggagcaggtctccaagctggctggtgtcttggtcaagcatggcatcaagaaaggtgacactgtggttatctacatgcctatgatcccacaggcgatgtataccatgttggcatgtgcaaggataggtgccatccacagtctcatatttggaggatttgcttccaaagaactaagtagtcgcattgatcatgtaaagcccaaggtggttgttacagcatcatttggcattgaacctggaaggagggtagagtacgtaccacttgtagaagaagcgctaaaaataggacaacacaaaccagacaaaattctcatttataatcgtccaaatatggaggcggttcctttggctcccggtcgtgaccttgattgggatgaagagatggcaaaagcccagtcacatgactgtgttcctgttctttcagaacacccactgtatattctttacacatctggcacaacggggttacctaagggtgtgattaggcccactgggggatacgctgtcatgctacactggtcaatgtcttccatatacggacttcaacccggagaggtgtggtgggcagcttctgacttaggctgggttgttggacattcctatatctgctatggacctcttcttcatgggaacacaacagttttatatgaggggaagcctgtgggaacaccagatgctggcgcttatttccgtgtgcttgcagagcatggagtagctgccttgtttacagcaccaactgcaattagagcaatccgtcaacaggaccctggggcagctttggggaagcagtactctctgacaaggttcaaaacattatttgtggctggagaacgatgtgatgtagagaccctggaatggtccaaaaatgtcttcagagtacctgtcttagaccattggtggcaaactgagactggatctccaattactgcgtcatgtgttggattaggcaattctaaaacacctccaccagggcaagcaggaaaaagcgtcccaggatacaatgttatgattttggatgacaacatgcaaaaactgaaggctcggtgtttaggaaatattgtggtaaagttaccattgccacctggggctttttcaggactctggaagaatcaggaagcattcaagcatttatactttgaaaaatttcctggatattatgataccatggatgctggttacatggatgaagaaggctatttgtatgttatgtctcgagtggatgatgtaataaatgttgcaggtcacagaatttctgcaggcgccattgaagagtcaatcctttcccatggtaccgtggcagactgtgctgttgttggcaaggaagatcccttaaaaggtcatgtccccttagcactctgtgtattgagaaaagatataaatgcaacagaggagcaagttttggaagaaattgtgaaacacgttagacagaacattggccctgtggctgcttttcgaaatgcagtgtttgtcaaacagctacccaaaaccagatctggcaagatcccccgatcagctttatctgccattgtcaatggcaagccatacaagataacttctacaattgaagaccccagcatttttggccacgtagaagaaatgctgaagcaagcataatgagtttgtcttattcctattttgagttgatttaatttcttaattgaaattaaattatttgagttgtttctcagaaataaatatttcagtagaaattacttgcaaaatgaaatgtgaattgtaaaacttggcctaaacaaatctaatgaaaacatgtgaaagacctgtgccttttttttggtttgaccctgttagcattgttattagttatctataacatggcttattgaatgtcatctactgctttaggaaaaacgtatctagtgtattatttttaaaattgtacctcccaagaagaacactttaattgaaagcaacactaatatagagccacttcctgaaaccaagaatctgtagttttgatccaaaatctaaaacttaaagtcagaaaataattaaaatttttcttgtagaaattttagatattttctagtattctttagatgctcacattgttttaaataaaatagatgaaatgggaagtttaggtaatcatctagacagatgaaattattatctaggtaggagggcttttctatacattttctgagggaaagcagaacaccggggttatagctataccttcaggtcttttgttacttaggcaaggaaaaccacatgtctgacctggttcagcatgtaatccgagcactttgggaggctgaggcaggcggatcacttgaggtcagcagtttgagacgagcctggccaacatggtgaaaccctgtagctactgaaaatacaaaaataagccaggcgtggtggcgggaggctgaggcaaggagaatcacttgaatacaagaggcagaggttgcagtgagccaagttcccccactgtactccagcctgggtgacagagtaagactccatctcaaaacaacaaaaacaacaaaaaaaccacatgcctggcggagaacaaagagatcatttagtccaatctcttcatggagatgagggctcctgggagcccctcttcatgtctcaggttcttagttgactatgtttatccaaatgattccagattcctgtggaaacaaggaatcgatgtacaaatggggtagggtggcaaggaaaactcttaagagagaaacatcaaggttttcacattaggttaaagacaagaaggtttctaggcaggtagtgtaatgtctaggtgattttgaagtgaacttaagccactaggtttgagggacaaaggacagtagaaaatggtgaagactgcagatcacctgctatacctcaaggagcagcggacccagcagaatatggcccaaaaaggaggcaggtctcctgttgcaagagcctctgtttttttaaagagaaaacaaagaatcctggtttttatgtgaaatctctaattttaaaataataactcattaaaaatattgtaatgtccaaaagtatctttccatttaacttctaaaaatctcttaaatgttttttttaaataattgtaaagtgagtttttgttaagcttataggaatgggccagttaactaaggtagacagatgtaggaaattaaatatttgatttacttagggatctatatgacatcagttatcaaagaatacattttaacccaaaagtataccatgctcattgtatctttgatcgttcttcaagtatttctcaatcttttaatctatcaggaacattactatcaagagcagattgttgtaacataatactcaggatacatgaaatgtatgtgagagataaatagataatagaaagtttattgttataaaaatgacctacaacttatataaaaaaattctgaaaatgttgactttttttggactgaagactgcaaaataaatggcttctcaaa

SEQ ID NO: 896 - DNA, 2214 bp, Homo sapiens
  source 1..2214: mol_type = unassigned DNA
caaattattttgtgttgactattgaaggacccaaagaaataatgattcaaagataattttataaaagccaaagtaacttgtagctaatatataaaatacttttgaccaggaacttttaaagtggatgctatgaagatagagagtgtttttacacattgtttattgattttaatttcactttttctctccttagggtgtgattaggcccactgggggatacgctgtcatgctacactggtcaatgtcttccatatacggacttcaacccggagaggtgtggtgggcagcttctgacttaggctgggttgttggacattcctatatctgctatggacctcttcttcatgggaacacaacagttttatatgaggggaagcctgtgggaacaccagatgctggcgcttatttccgtgtgcttgcagagcatggagtagctgccttgtttacagcaccaactgcaattagagcaatccgtcaacaggaccctggggcagctttggggaagcagtactctctgacaaggttcaaaacattatttgtggctggagaacgatgtgatgtagagaccctggaatggtccaaaaatgtcttcagagtacctgtcttagaccattggtggcaaactgagactggatctccaattactgcgtcatgtgttggattaggcaattctaaaacacctccaccagggcaagcaggaaaaagcgtcccaggatacaatgttatgattttggatgacaacatgcaaaaactgaaggctcggtgtttaggaaatattgtggtaaagttaccattgccacctggggctttttcaggactctggaagaatcaggaagcattcaagcatttatactttgaaaaatttcctggatattatgataccatggatgctggttacatggatgaagaaggctatttgtatgttatgtctcgagtggatgatgtaataaatgttgcaggtcacagaatttctgcaggcgccattgaagagtcaatcctttcccatggtaccgtggcagactgtgctgttgttggcaaggaagatcccttaaaaggtcatgtccccttagcactctgtgtattgagaaaagatataaatgcaacagaggagcaagttttggaagaaattgtgaaacacgttagacagaacattggccctgtggctgcttttcgaaatgcagtgtttgtcaaacagctacccaaaaccagatctggcaagatcccccgatcagctttatctgccattgtcaatggcaagccatacaagataacttctacaattgaagaccccagcatttttggccacgtagaagaaatgctgaagcaagcataatgagtttgtcttattcctattttgagttgatttaatttcttaattgaaattaaattatttgagttgtttctcagaaataaatatttcagtagaaattacttgcaaaatgaaatgtgaattgtaaaacttggcctaaacaaatctaatgaaaacatgtgaaagacctgtgccttttttttggtttgaccctgttagcattgttattagttatctataacatggcttattgaatgtcatctactgctttaggaaaaacgtatctagtgtattatttttaaaattgtacctcccaagaagaacactttaattgaaagcaacactaatatagagccacttcctgaaaccaagaatctgtagttttgatccaaaatctaaaacttaaagtcagaaaataattaaaatttttcttgtagaaattttagatattttctagtattctttagatgctcacattgttttaaataaaatagatgaaatgggaagtttaggtaatcatctagacagatgaaattattatctaggtaggagggcttttctatacattttctgagggaaagcagaacaccggggttatagctataccttcaggtcttttgttacttaggcaaggaaaaccacatgtctgacctggttcagcatgtaatccgagcactttgggaggctgaggcaggcggatcacttgaggtcagcagtttgagacgagcctggccaacatggtgaaaccctgtagctactgaaaatacaaaaataagccaggcgtggtggcgggaggctgaggcaaggagaatcacttgaatacaagaggcagaggttgcagtgagccaagttcccccactgtactccagcctgggtgacagagtaagactccatctcaaaacaac

SEQ ID NO: 897 - DNA, 1713 bp, Homo sapiens
  source 1..1713: mol_type = unassigned DNA
gccgggacgaaccagtcctggcccagcccattccgcgagccagcaagcttctgaaaagcaaacctaggaagttgctttccaacataaagtggaggtttcaacacaggagactttaagcaagttccagtgtgtctatatttggtctggctgatcggctggactctggccttccccgctcacattagcagacagctctgccctagtgggcgtttagcctgcgacggcagcccgagaggaagagttgggcagagttgcaggggtctccacagctgaggcagtttggccggattatttgggttcctgctcggatggcggcgacgctgatcctggagcccgcgggccgctgctgctgggacgaaccggtgcgaatcgccgtgcgcggcctagccccggagcagccggtcacgctgcgcgcgtccctgcgcgacgagaagggcgcgcttttccaggcccacgcgcgctaccgcgccgacacccttggcgagctggacctggagcgcgcgcccgcgctgggcggcagcttcgcggggcttgagcccatggggctgctctgggccttggagcccgagaaacccttggtgcggctggtgaagcgcgacgtgcgaacgcccttggccgtggagctggaggtgctggatggccacgaccccgaccccgggcggctgctgtgccgggtgcggcacgagcgctacttcctcccgcccggggtgcggcgcgagccggtgcgcgcgggccgggtgcgaggcacgctcttcctgccgccagaacctgggccctttcctggcattgtggacatgttcggaactggaggtggcctgctggagtatcgggctagtctgctggctgggaagggttttgctgtgatggctctggcttactataactatgaagacctccccaagaccatggagacgctccatctggagtactttgaagaagctgtgaactacttgctcagtcatcctgaggtaaaaggtccaggagttgggctgcttggaatttccaaagggggtgagctctgcctttccatggcctctttcctgaagggcatcacggctgctgtcgtcatcaacggctctgtggccaatgttgggggaaccttacgctacaagggcgagaccctgccccctgtgggcgtcaacagaaatcgcatcaaggtgaccaaagatggctatgcagacattgtggatgtcctgaacagccctttggaaggacctgaccagaagagcttcattcctgtggaaagggcagagagcaccttcctgttcctggtaggtcaggatgaccacaactggaagagtgagttctatgctaatgaggcctgtaaacgcttgcaggcccatgggaggagaaagccccagatcatctgttacccagagacagggcactatattgagcctccttacttccccctgtgtcgggcttccctgcatgccttggtgggcagtcctattatctggggaggggagcccagggctcatgccatggctcaggtggatgcttggaaacaactccagactttcttccacaaacacttgggtggccacgaggggacaatcccatcaaaagtgtaaattttatttgatcatgtggcctctctgttgctaatctctcctggaaacatctgccacatttagtgtgtgtatgtgtattcattctttctcataacttcttaaagtttcttcccctcattattaaaatgaatttaccagt

SEQ ID NO: 898 - DNA, 3082 bp, Homo sapiens
  source 1..3082: mol_type = unassigned DNA
atttggagtcaggcctggctgttgctcaggtgaccagcttgtgtctctgggagggcgctgctttccccggccacccggcgcgatgatccagaatgtcggaaatcacctgcgacggggcttggcctctgtgttctccaaccgcacatcccggaagtcagccttacgtgcggggaacgacagtgccatggcagacggcgagggataccggaaccccacggaggtgcagatgagccagctggtgctgccctgccacaccaaccaacgtggtgagctgagcgtcgggcagctgctcaagtggattgacaccacggcttgcctgtccgcggagaggcacgctggctgcccctgtgtcacagcttccatggatgacatctattttgagcacaccattagtgttggacaagtggtgaatatcaaggccaaggtgaaccgggccttcaactccagcatggaggtgggcatccaggtggcctcggaggacctgtgctctgagaagcagtggaatgtgtgcaaggccttggccaccttcgtggcccgccgagagatcaccaaggtgaagctgaagcagatcacgccgcggacagaagaggagaagatggagcacagtgtggcggctgagcgccggcgcatgcgccttgtctatgcagacaccatcaaggacctcctggccaactgcgccattcagggcgatctggagagcagagactgtagccgcatggtgccggctgagaagacccgtgtggagagtgtggagctggtcctgcctccccacgccaatcaccagggcaacacctttgggggccagatcatggcctggatggagaatgtggccaccattgcagccagccggctctgccgtgcccaccctacgctgaaggccattgaaatgttccacttccgaggcccgtcccaggtcggcgaccgtctggtgctcaaagccatcgtgaacaatgccttcaaacatagcatggaggtgggcgtgtgcgtggaggcctatcgccaggaggctgagacccaccggcgccacatcaacagtgcctttatgacctttgtggtcctggacgcagatgaccagccccagttgctgccctggattcggccccagcccggcgatggtgagcggcggtaccgagaggccagtgccagaaagaagatccgcctggacaggaagtacatcgtgtcctgtaagcagacagaggtgcccctctccgtcccctgggaccctagcaaccaggtgtacctgagctacaataacgtctcctccttgaagatgcttgtggccaaggacaactgggtgctgtcctcggagatcagtcaggtccgcctgtacactctggaggatgacaagttcctctccttccacatggagatggtggtgcatgtggatgcagcccaggccttcctgctgctctcggacctgcgtcagaggccagagtgggacaagcactaccggagcgtggagctagtgcagcaggtagacgaggacgacgccatctaccacgtcaccagccctgccctcggaggtcacacaaagccccaggacttcgtgatcctggcctcgaggcggaagccttgtgacaatggggacccctatgtcatcgcgctgaggtcggtcacgctgcccacacaccgagagacgccagagtacagacgcggagagaccctctgctcaggcttctgcctctggcgcgagggggaccagctgaccaaggtatcctactacaaccaggccaccccaggtgttctcaactatgtgaccaccaacgtggccggcctctcctctgagttctacaccaccttcaaggcttgtgagcagtttctcttggacaaccggaatgatctggcccccagcctccagaccctctagatgccctcagtggccacatcatgcccactcccactccatcctgtccccaaggactcacatacagtgcctggagaaagccaaagacctttatttcttcctgcctccccgtgggaagcctccgccctgaggtccgctggcccaccacccctgggtgctcagtttctaccaacatgagccagcaagtccttgtggtagccctggggtagcctgtagtagactcgggtcctgtccacagccctagctgccagcaatgctgtcctcacagaggcatagtcgcccccagctgggttgtgctccactgtgacggtggcccggggggaggatgccagcagcctgcctatggctccagctgtgctgtggcccagcagcatggcctgcatctggaaggacacaggttgccagagcccctggcacaactctagcatatctgtgagcagctgttccctgtagccactgcccagcacctcctcaggccagcctggtgccacagtcacgtgggggaagacctcagccacagctgtaagcagctctctgccagccacatggccggggaccgaaaaactcccgtgggagattttggccccaacccacacaggccaatgcaagaggccaaggctggagaggcgtgccagcaaggccagggatggccggagggctgcgggctccgctatttgcaaatggatgccccagtgtccgggatgtgtggccagctgctgcaggcaggactccagcgtcaggatgttgccacttggagtatgaacaatgggcacggggttttcagccacagttccctcgaggccagtgttcagcaggatcatgccttctgtgtctggaagaggcggcagaggcaacagtgtttaggatttgggttatcataaggtgttaagagtcccttgttaaaggggcagtgggagttatggggtcatcaaggaccttgcctctctggaatctgtcaacccagttttgggctccaggtggatgggttgctttataaatgtgcctggtgcatgagaaactcttgtttcagctcttggcctttacccatgactcagcctgggggctggtgccggccttgcctgcagcaatgtagctgaggactggtctgaaggccaggagccctgtgctcttgacatcactgtactccctctccctccccgcaaccctgccccaccttgcatccagggtatggtgtaaataaacctgtgttgccatggc

SEQ ID NO: 899 - DNA, 6369 bp, Homo sapiens
  source 1..6369: mol_type = unassigned DNA
atttggagtcaggcctggctgttgctcaggtgaccagcttgtgtctctgggagggcgctgctttccccggccacccggcgcgatgatccagaatgtcggaaatcacctgcgacggggcttggcctctgtgttctccaaccgcacatcccggaagtcagccttacgtgcggggaacgacagtgccatggcagacggcgagggataccggaaccccacggaggtgcagatgagccagctggtgctgccctgccacaccaaccaacgtggtgagctgagcgtcgggcagctgctcaagtggattgacaccacggcttgcctgtccgcggagaggcacgctggctgcccctgtgtcacagcttccatggatgacatctattttgagcacaccattagtgttggacaagtggtgaatatcaaggccaaggtgaaccgggccttcaactccagcatggaggtgggcatccaggtggcctcggaggacctgtgctctgagaagcagtggaatgtgtgcaaggccttggccaccttcgtggcccgccgagagatcaccaaggtgaagctgaagcagatcacgccgcggacagaagaggagaagatggagcacagtgtggcggctgagcgccggcgcatgcgccttgtctatgcagacaccatcaaggacctcctggccaactgcgccattcagggcgatctggagagcagagactgtagccgcatggtgccggctgagaagacccgtgtggagagtgtggagctggtcctgcctccccacgccaatcaccagggcaacacctttgggggccagatcatggcctggatggagaatgtggccaccattgcagccagccggctctgccgtgcccaccctacgctgaaggccattgaaatgttccacttccgaggcccgtcccaggtcggcgaccgtctggtgctcaaagccatcgtgaacaatgccttcaaacatagcatggaggtgggcgtgtgcgtggaggcctatcgccaggaggctgagacccaccggcgccacatcaacagtgcctttatgacctttgtggtcctggacgcagatgaccagccccagttgctgccctggattcggccccagcccggcgatggtgagcggcggtaccgagaggccagtgccagaaagaagatccgcctggacaggaagtacatcgtgtcctgtaagcagacagaggtgcccctctccgtcccctgggaccctagcaaccaggtgtacctgagctacaataacgtctcctccttgaagatgcttgtggccaaggacaactgggtgctgtcctcggagatcagtcaggtccgcctgtacactctggaggatgacaagttcctctccttccacatggagatggtggtgcatgtggatgcagcccaggccttcctgctgctctcggacctgcgtcagaggccagagtgggacaagcactaccggagcgtggagctagtgcagcaggtagacgaggacgacgccatctaccacgtcaccagccctgccctcggaggtcacacaaagccccaggacttcgtgatcctggcctcgaggcggaagccttgtgacaatggggacccctatgtcatcgcgctgaggtcggtcacgctgcccacacaccgagagacgccagagtacagacgcggagagaccctctgctcaggcttctgcctctggcgcgagggggaccagctgaccaagtgctgctgggttagggtctccctgactgagctggtctcggcaagtggcttctattcctgggggctcgaatccaggtcaaagggtcgcaggagcgacggttggaatggaaaactagctggaggacacctgagtactcttaaagcaatccccgtggccaaaatcaacagccgatttggataccttcaagacacctgaaaccttatcatgagccagatgccaaggaagagactctgggaggatccagaggaccccctggttgcagccacgtagagactgacgctgaggaggactccaactatcatgagcaacacccgtcgaacacagccaccccgctaagaacagatcaagaagctgtcacagatggcggaagaaaacctgaggaaagcgggacaaccagtcacaatgaataatttaatggtagctatgatagcagttatcaccactgccgtgagtattccttcaataagggctggtaataatgcctggatgcaatcattctatgacacagttacacatgctttctgatctcagtatttaccataataaatcggctcctataattgaggcataccaccctcaaaaacctatttgtaaacaggattggacccagttagaaaaaatgaacgtacttatttaggaagattgctttgcagaataggcagagatgctgcacaacgattcctatggaatcattactaattggtcccccaaggggatgtttagcttgaattgcacctctcagtctgcatgccacggtcacactatgttcagatgatctgaacaaaacagtcagatggtagaaatgttaagtacggcaaaagttcctattatctggaaccatggcggtatagtggcacctcaacctcaaataatatggcccgctctaggagctaaacataaggatttgtaaaaactattaaatgctcttaataagatcaaaatttgggaaagaataaaagagtatctagaaggacactctacaaacttgtttttggatatagcaaaattaaaagaacaaatatgtaaagcatcccgggcaacctgaccttaatgccaggaaccagagtgcttaaaggagctgcagaaaaattagcagctagtaacccatttaaatgggtaaaaacacttggaagctctgtgatttcaatgatgactatgctttttaatctgttgtttgcctttgtatagtctgcagatgcggatcccgactcctgcgagagtctctttgcaaatcgaagaagggagacatgttgggagcaagccccccagagtctggccataaactggccccaaaactggccataagcaaaacctctgcagcactaaaacatgtccataatggccctaacgcccaatctggaaggttgtgggtttatgggaatgagagcaaggaacacctggcctgcccagggcggaaaaccgcttaaaggcattcttaagccacaaacaaaagcatgagcgatctgtgtcttacgggtgtgttcctgctgcaattaattcagcccatccctttgtttcccataagggatacttttagttaatttaatatctatagaaacaatgctaatgactggtttgctgttaaatgaaggggtgggttgcccctccacacctgtgggtgtttctcgttaggtggaacgagagacttggaaaagagacacagagacaaagtatagagaaagaaaagtgggcccaggggaccagcattcagcatacagaggatccacactggcaccggcctctgagttcccttagtatttattgatcattatcgagcatggcaggataataggataatagtggagagaaggtcagaaggtaaacacatgaacaaaggtctctgcatcataaacaaggtaaagaattaagtgctgtgctttagatatgtatacacataaacatctcaatgccttaaagagcagtattgctgcccgcatgtcatacctacagccctaaggcggttttcccctatctcagtagatggaagtatattccatgtaaagtaaatcggctttacacccagacattccattgcccagagacgagcaggagacagaagccttcctcttatctcaactgcaaagaggtgttccttcctcttttactaatcctcctcagcacagaccctttatgggtgtcgggctgggggatggtcaggtctttcccttcccacgaggccatatttcagactatcacatggggagaaaccttggacaatacctggctttcctaggcagaggtccctgcggcctttgcagtattttgcgtctctgggtacttgagattagggagtggtttgagattagggagtggtgatgactcttaaggagcatgctgccttcaagcatttgtttaacaaagcacatcttgcacagcccttaatccatttaaccctgagttgacacagcacatgtttcagggagcacagggttgggggtaaggttacagattaacggcatctcaaggcagaagaatttttcttaatacagaacaaaatggagtctcctatgtctacttctttctacacagacacagtaacaatctgatctctcttttccccacagttaataaatatgtgggtaaatctctgttgggggctctcagctctgaaggctgtgagacccctgattttctacttcacacctctatatttttgtgtgtgtgtctttaattcctctagcgctgctgagttagtgaccgagctggtctcggcagaggtgggcgggtcttttgagttcaggagttcaagagcagcctggccaacatggtgaaaccccttctctactaaaaatatgaaaattatccgggcatggtggtgtgcctctgtactttcagctactcaggaagctgaggcacaagaattgctggaacatgggaggtggaggctgcagtgagctgagatcatgccactgcactccagcccaggcaatagagtaagactctgtctcaaaacaaaaagagttttaggccaggtgtggtggctcacgcctgtaatcccagcactttgggaggctgaggtgggcagatcacctgaggtcaggagttcgagaccagtctggccaacatggcgaaaccccatctctctctactaaaaatacaaaatttagccaggtgtggtggtgggtgcctgtaatcacagctgcttgggaggctgaggcaggagaattggttgaacccaggaggcagaggttacagtgagcagagatcgtgccactgcattccagccggggtaagagagcgagactctgcctcaaaaaaagaaggcttagtgtgcaactcatcagagttgcacagggcagagaaagaatgggaaaaaaacaatttctagaaaacttttcgaattttctgatcaacaccaaatattccaaataggaaaaatacaaaaaaatccatacctatatgtggcataatatgattgtagagcaccaaagtaaaagatcttattttttattaaaattaaaaaaaaattaaaatagagggtctcactatgctgcccaggctggtcttgaactcctggcttcaagctatcctcccaccatggcatcctaaagtgctgggattgcaggcatgagctgctgcatctggcccaaagtaaaagatcttagaagcggccagaaaaaatagatttgggctgggcatgaatagattgatcaccaaaaaggtggcagactaacttctcgacagaatccacagaagccagaaggcagtggaacattagctttgatgtactaaaataaaataccacgctaggctcctacatacagtgaaaatgttttgagaatgagaattataattttttggcaaacaaaactaaaggagtttacaactaagaaactcttttgtgagacagccttgctctgttgcccaggctggagtgcagtgacgaaatctcagctcactgcaacctcggcctcccgggttcaggcaattcttgtgtctcagccttccaagtagctgggattacagatgtgcgccaccaggcccagctactttttatatttttagtggagatggggtttcactgtgttggccaggctggtctcaaactcctgacttcaagtgatctgcccgccttggcctgctaaagtgctgggattacaggcatgagcgactgtgcctctccagtccctgtgtttttttttgtttttggaggttttatttgtttgtttttagagacactttcactgtgttgcccaggcctgtctgttggcctcaagtgatcctcctgccttggatctcccaaagtgctgggattacaggtgtgaaccactgtgctcagcccattttttatttgtttcttgaaggaaggtagcagtattaattaattttggactttgctcactaaagtttgaatgttaagaatagatgtatacagtctggatgcagtggtgcatgcttgtaattttagcactttgggaggctgaagcgggaggatcgcttgggctcaagagtttgagaccagcctgggcaacatggtgaaaccttgtctctacaaaaaaattttaaaaaattagccagacatgatggcatgcacctataatcccagctacttgggaggctgaggtgggaggattgcttgagtccagggaggtcgaggctgcagtgagccatgatcacaccactgcactccagcctgggtgacagagtgatactgtctc

SEQ ID NO: 900 - DNA, 2086 bp, Homo sapiens
  source 1..2086: mol_type = unassigned DNA
gccgcaggcgtagcgctctcgccctggccatggagcggccggcgcccggcgaggtggtcatgagccaagccatccagccggcgcacgccactgcgcgcggcgagctgagcgcggggcagctgctcaagtggatcgacaccaccgcctgcctggcggctgagaaacatgctggagtttcctgcgttacagcctcagtggatgacatacagtttgaggagacagctagagttggacaagttataaccatcaaagcaaaagttactagagcattcagcacaagcatggagatcagtatcaaggtcatggtacaggatatgctcactggcattgagaagcttgttagtgtggctttctccacatttgtagccaaaccagttggaaaagaaaagattcatttaaaaccagtcacacttctaactgaacaagatcatgtggaacataatctggctgctgagagaaggaaagttcgattacaacatgaagatacctttaacaatttaatgaaggaaagtagcaaatttgatgatctcatttttgatgaagaggaaggagcggtttccacaaggggcacctccgttcagagcattgaactggtcctcccaccccatgcaaaccatcacggaaatacatttggtggccagattatggcgtggatggagacagtggctactatttctgcaagccgcctgtgttgggctcatccctttctgaagtccgtagatatgtttaagttccggggaccatctacagttggagatcgtcttgtcttcactgccattgtcaacaatacatttcagacctgtgttgaagttggagttcgcgtggaggcctttgactgtcaggaatgggccgagggccgagggcgtcacatcaacagtgcttttctcatttacaatgctgctgatgataaggaaaatctcatcacgtttcccagaatccaacccatttcaaaggatgatttcagacgctatcggggagctattgcacgcaagcgaattcgcctaggcagaaaatatgttatttcccacaaagaagaggttccactttgcatacactgggatatcagcaagcaggcatccctgagtgacagcaatgtggaggccctcaaaaaactggcagccaaaaggggttgggaggttaccagcactgtggaaaagataaaaatatatactctggaagagcatgatgttttatctgtttgggttgaaaagcacgtgggaagtccagcacatttggcttatcgtctcttgtctgactttacaaagcgacctttgtgggacccccattttgtgtcctgtgaagtcatagactgggtgagtgaagatgatcagctgtatcacatcacctgtcctatactgaatgatgacaaacccaaagacttggtagtactcgtatcacgaagaaaacccctcaaagatggtaacacttacacagtggcagtgaagtcggtcattttgccatcggtccccccgtctccacagtacatcagaagtgaaatcatatgtgccggatttctcatccatgctattgacagcaattcatgcatcgtatcttactttaaccatatgtctgctagcatccttccttactttgctggaaatcttggtggctggtcaaaatccattgaagaaacagcagcctcttgtatacagttcttagagaatcctcctgatgatgggtttgtaagcacattttaaaggtcaactttcaattactggtaatttaatttcccacttttaattccaagcacccttagccctgacatctgtcaagctttggggccacaaaataatttaatataaccctaagcaaaatgcagtgacggagttaaaaaacaaaatgcatcttaagtcaaataccagtgatttggattagcattaaaagagctttagaattctgttgtaagtcatctgtggctctgcctcttccaggggcacagatagtggaaaattgcctgtatgcagtactatgtgttctataaaatggcatgaatttagtttaaattatcgtaaacatttttaggttacagaggtgaaacatgcattctgtgtgaaattccaaaaaaaaaattataaaatctaaaatg

SEQ ID NO: 901 - DNA, 1774 bp, Homo sapiens
  source 1..1774: mol_type = unassigned DNA
aaagcaaacctaggaagtagctttccaacataaagtggaggtttcaacacaggagactttaagcaagttccagtgtgtctatatttggtctggctgatcggctggactctggccttccccgctcacgttagcagacagctctgccctagtgggcgcttagcctgcgacggcagcccgagaggatgtctaacaagcttctttctccccacccccattcagttgttctcaggtctgaattcaaaatggcctcatctcctgctgtccttcgagcgtcccggctgtaccaatggagcctgaagagttcggcgcagttcctggggtctccacagctgaggcaggttggtcagatcattagggttcctgctcggatggcggcgacgctgatcctggagcctgcgggccgctgctgctgggacgaaccggtgcgaatcgccgtgcgcggcctagccccggagcagccggtcacgctgcgcgcgtccctgcgcgacgagaagggcgcgcttttccaggcccacgcgcgctaccgcgccgacactcttggcgagctggacctggagcgcgcgcccgcgctgggcggcagcttcgcggggcttgagcccatggggctgctctgggccttggagcccgagaaacctttggtgcggctggtgaagcgcgacgtgcgaacgcccttggccgtggagctggaggtgctggatggccacgaccccgaccccgggcggctgctgtgccagacgcggcacgagcgctacttcctcccgcccggggtgcggcgcgagccggtgcgcgtgggccgggtgcgaggcacgctcttcctgccgccagaacctgggccctttcctgggattgtggacatgttcggaactggaggtggcctgctggagtatcgggctagtctgctggctgggaagggttttgctgtgatggctctggcttattataactatgaagacctccccaagaccatggagacgctccatctggagtactttgaagaagccatgaactacttgctcagtcatcccgaggtaaaaggtccaggagttgggctgcttggaatttccaaagggggtgagctctgcctttccatggcctctttcctgaagggcatcacggctgctgtcgtcatcaacggctctgtggccaatgttgggggaaccttacactacaagggcgagaccctgccccctgtgggcgtcaacagaaatcgcatcaaggtgaccaaagatggctatgcagacattgtggatgtcctgaacagccctttggaaggacctgaccagaagagcttcattcctgtggaaagggcagagagcaccttcctgttcctggtaggtcaggatgaccacaactggaagagtgagttctatgctaatgaggcctgtaaacgcttgcaggcccatgggaggagaaagccccagatcatctgttacccagagacagggcactatattgagcctccttacttccccctgtgtcgggcttccctgcatgccttggtgggcagtcctattatctggggaggggagcccagggctcatgccatggctcaggtggatgcttggaaacaactccagactttcttccacaaacacttgggtggccacgaggggacaatcccatcaaaagtgtaaattttatttgatcatgtggcctctctgttgctaatctctcctggaaacatctgccacatttagtgtgtgtatgtgtattcattcttttgtttttaataactaaagttttttcccctcattattaaaatgaatttaccagt

SEQ ID NO: 902 - DNA, 2362 bp, Homo sapiens
  source 1..2362: mol_type = unassigned DNA
ttgggcgccacaccttgcgcgccccggggcccaaggagacgaccctgaagaggagcctggctacttttgcctcagacgagtccggagcgccgggttaaccggtctgaagtcccaggggctttctgggactgctcagccaccggcagcttccggcaccaggggacgccggacgccgtccggacattcggcgcgcttgccacgatcttggacgggtctcgggcctcgacctttgaattccccgctccggctccaagatgtcagcaacgctgatcctggagcccccaggccgctgctgctggaacgagccggtgcgcattgccgtgcgcggcctggccccggagcagcgggttacgctgcgcgcgtccctgcgcgacgagaagggcgcgctcttccgggcccacgcgcgctactgcgccgacgcccgcggcgagctggacctggagcgcgcacccgcgctgggcggcagcttcgcgggactcgagcccatggggctgctctgggccctggaacccgagaagcctttttggcgcttcctgaagcgggacgtacagattccttttgtcgtggagttggaggtgctggacggccacgaccccgagcctggacggctgctgtgccaggcgcagcacgagcgccacttcctcccgccaggggtgcggcgccagtcggtgcgagcgggccgggtgcgcgccacgctcttcctgccgccaggacctggacccttcccagggatcattgacatctttggtattggagggggcctcttggaatatcgagccagcctccttgctggccatggctttgccacgttggctctagcttattataactttgaagatctccccaataacatggacaacatatccctggagtacttcgaagaagccgtatgctacatgcttcaacatccccaggtaaaaggcccaggcattgggcttttgggcatttctctaggagctgatatttgtctctcaatggcctcattcttgaagaatgtctcagccacagtttccatcaatggatctgggatcagtgggaacacagccatcaactataagcacagtagcattccaccattgggctatgacctgaggagaatcaaggtagctttctcaggcctcgtggacattgtggatataaggaatgctctcgtaggagggtacaagaaccccagcatgattccaatagagaaggcccaggggcccatcctgctcattgttggtcaggatgaccataactggagaagtgagttgtatgcccaaacagtctctgaacggttacaggcccatggaaaggaaaaaccccagatcatctgttaccctgggactgggcattacatcgagcctccttacttccccctgtgcccagcttcccttcacagattactgaacaaacatgttatatggggtggggagcccagggctcattctaaggcccaggaagatgcctggaagcaaattctagccttcttctgcaaacacctgggaggtacccagaaaacagctgtccctaaattgtaatgcatttgtctgttgttgacatgagagattcaagatcagattctagtgttcagtaaccctatgtgaatcagatgtctcctggataacattaaagccatgtctttgtcattaatggtgtattttacgtaactttgttgaataagctttgtcgttagttttactaatgtaacttgcttgttgtagaagattaagaggcatatgacacatataagtgaaaaacattcccaccagttaacatttgtgtttccttctagatttttttagttaatgttttgagtcacaggtgagctttaaagctggtgactttttccatcactatgaaagaatggtcacttaatgtttgctgttcaaccatcagtagcagggtagaattttctttggccagaaacatacagaggggtgttaatatgaggaaaggcagctgaccttttcattataaacgtgagagaagactcttttgacaggaggagatgagacctgtctctagaatagttaagtctgtactctcttccaagggtgaattactacgatctattttccctctcacttcctctctaagagcagaccctggggccgagtacagtggctcacacctgtaatcccagtactttgggaagtcaaggggggcatattgcttgagctcaggatttcatgaccagcttaggcaacatggcaaaacccaatccctacaaaaattagccaaacatggtacacacctgtagtcccagctactcgagactcagatgggacgattgcttgagcccgggaggtcaagattggtgcagtgagccgtgattgcaccactgcactccagcccaggtaacacagcgagaccccgtttc

SEQ ID NO: 903 - DNA, 1004 bp, Homo sapiens
  source 1..1004: mol_type = unassigned DNA
tatattatcattattgtttgagaaaataagacattttgttctttctctgccaatctctctacccccaatctccttggcttcaaaaacttgtttgcttactgtcttttgagaaactaaagctccctgtgatttgtgatgttctccaggcagggggccctttcctgggatcattgatctgtttgggagcagcaggggcctttgtgaatacagggccagcctcctggccggacatggttttgctgtgcttgccctggcttatttcagatttgaagacctccccgaagatctgaatgatgtacatctggagtactttgaagaagccgtggactttatgctgcagcatccaaaggtgaaaggtcctagtattgcgcttcttggattttccaaaggaggtgacctgtgtctctcaatggcttctttcttgaagggcatcacagccactgtacttatcaatgcctgtgtagccaacacagtagctcctctacattacaaggatatgattattcctaaacttgtcgatgatctaggaaaagtaaaaatcactaagtcaggatttctcacttttatggacacttggagcaatccactggaggaacacaatcaccaaagtcttgttccattggaaaaggcgcaggtgcccttcttgtttattgttggcatggatgatcaaagctggaagagtgaattctatgctcagatagcctctgaaaggctacaagctcatgggaaagaaagaccccagataatctgttacccagaaactggtcactgtattgacccaccttattttcctccttctagagcttctgtgcacgctgttttgggtgaggcaatattctatggaggtgagccaaaggctcactcaaaggcacaggtagatgcctggcagcaaattcaaactttcttccataaacatctcaatggtaaaaaatctgtcaagcacagcaaaatataacattgtagccacagaccagataccattaataaaaatcctattcatacaa

SEQ ID NO: 904 - DNA, 870 bp, Homo sapiens
  source 1..870: mol_type = unassigned DNA
acacacatgagattccatcacccaggcagcattcctgagccttgggggactggtttccaatgattcttaggcttctgtcattctttgctgcctatctgctgagagtgccacttgcttactgccagaactctgtatgcatacaacccaaaatggactctgccagtgattagatttgtgaggcagggggccctttcctgggatcattgatctgtttgggagcagcaggggcctttgtgaatacagggccagcctcctggccggacatggttttgctgtgcttgccctggcttatttcagatttgaagacctccccgaagatctgaatgatgtacatctggagtactttgaagaagccgtggactttatgctgcagcatccaaaggtgaaaggtcctagtattgcgcttcttggattttccaaaggaggtgacctgtgtctctcaatggcttctttcttgaagggcatcacagccactgtacttatcaatgcctgtgtagccaacacagtagctcctctacattacaaggatatgattattcctaaacttgtcgatgatctaggaaaagtaaaaatcactaagtcaggatttctcacttttatggacacttggagcaatccactggaggaacacaatcaccaaagtcttgttccattggaaaaggcgcaggtgcccttcttgtttattgttggcatggatgatcaaagctggaagagtgaattctatgctcagatagcctctgaaaggctacaagctcatgggaaagaaagaccccagataatctgttacccagaaactggtcactgtattgacccaccttattttcctccttctagagcttctgtgcacgctgttttgggtgaggcaatatt

SEQ ID NO: 905 - DNA, 2429 bp, Homo sapiens
  source 1..2429: mol_type = unassigned DNA
gccggagttgcgtgggttttaatttaaagatgtaagtacaaatctatgtgcattgtagaaaattcggaaaaggtccaactgcctagcaagtaaaaagctgtcattccagcacgtggggggtgaccgcttctcccttcttgggtgttttttggtggattttttttggtgaccccgactggcctagactccattcaagggcacatcttgtgcagtaaaacacgcatgtttcagggctcctcactgcaacacgtgcacctccaggctggcgctcagcgctcccagtaaaagctgcaggcggcggtgtagatagtcgccggcctttcctcctccccacctcgtgacgctttgtgctgcggaagcaaaggcccgttccattccccgtgtcttcccagcagccgccaccaatgctcctttctaggaaacagccttccattctctcttagggccgatcttagcgagagccgcgatgcgggcgactggtgccggggtgggttgggggcgggggtgggaatcaggccccactgccaggagcccgggccgcgccttccgctctgacctcatccggccgcccaggcactgggcgcggcagcgaatcggcggcgcgggcggccgggaacgcccagcacaaatatttaccgccgcgcggagagtgagggcccaagtccgccctgctccgccacttaggccgccccagacgcttccctcggggctgccaccgggtcgggcgcggctgccgcggctagcgggccttccccgcaccggcgcggcccaaccgccaccgaaccttctggaagcggcggctgcctgggcccccacgccgccagaatcgtacgcccgcgcgagctctctgcagccttggcggcctgggaggcggggctcggggtggggccggcgcgggggcggggtcggcgcggggaggccgcgttcgattgcccccggcgcgcaggccccgcctcaccagccccatcgctccacctctgccctccccctttatggcgcggcccgggctcattcattccgcgccgggcctgccagacacctgcgcccttctgcagccgcccgccgcatccgccgccgcagcccccagcatgtcgggcccagacgtcgagacgccgtccgccatccagatctgccggatcatgcggccagatgatgccaacgtggccggcaatgtccacggggggaccatcctgaagatgatcgaggaggcaggcgccatcatcagcacccggcattgcaacagccagaacggggagcgctgtgtggccgccctggctcgtgtcgagcgcaccgacttcctgtctcccatgtgcatcggtgaggtggcgcatgtcagcgcggagatcacctacacctccaagcactctgtggaggtgcaggtcaacgtgatgtccgaaaacatcctcacaggtgccaaaaagctgaccaataaggccaccctgtggtatgtgcccctgtcgctgaagaatgtggacaaggtcctcgaggtgcctcctgttgtgtattcccggcaggagcaggaggaggagggccggaagcggtatgaagcccagaagctggagcgcatggagaccaagtggaggaacggggacatcgtccagccagtcctcaacccagagccgaacactgtcagctacagccagtccagcttgatccacctggtggggccttcagactgcaccctgcacggctttgtgcacggaggtgtgaccatgaagctcatggatgaggtcgccgggatcgtggctgcacgccactgcaagaccaacatcgtcacagcttccgtggacgccattaattttcatgacaagatcagaaaaggctgcgtcatcaccatctcgggacgcatgaccttcacgagcaataagtccatggagatcgaggtgttggtggacgccgaccctgttgtggacagctctcagaagcgctaccgggccgccagtgccttcttcacctacgtgtcgctgagccaggaaggcaggtcgctgcctgtgccccagctggtgcccgagaccgaggacgagaagaagcgctttgaggaaggcaaagggcggtacctgcagatgaaggcgaagcgacagggccacgcggagcctcagccctagactccctcctcctgccactggtgcctcgagtagccatggcaacgggcccagtgtccagtcacttagaagttccccccttggccaaaaacccaattcacattgagagctggtgttgtctgaagttttcgtatcacagtgttaacctgtactctctcctgcaaacctacacaccaaagctttatttatatcattccagtatcaatgctacacagtgttgtcccgagcgccgggaggcgttgggcagaaaccctcgggaatgcttccgagcacgctgtagggtatgggaagaacccagcaccactaataaagctgctgcttggctgg

SEQ ID NO: 906 - DNA, 1813 bp, Homo sapiens
  source 1..1813: mol_type = unassigned DNA
aggatgcaggcttggacctgctggagtccttgctggcctgtgaccttcctcccctgtctacatttcagggagctctagaaggcggcagtggggccagacctggctttggctgagaccctggagaaagactagggggtcttgtgccctgtcagagaaggcagagcctcatagccgcttccctgaggccgctcagcagcggcccctctgccttcctgatctcctggcatggcagccagaagagctcacagaattacttcttctgtaattatttataaagcaaggtttccatgacgaccggtttctggtagacgctctggattggcgaggcagcctcttcctggccagattgggcagctcaggaagctgggggtggggggtgctccccaccaagcccggtgtggcagggagctgggacagtcctgggtcaggcaaggactctgtgatgcttccctgctccctcgcctttctctgcatctgatcctgggatgtcctagccaccatggctttccagctgagcaggatcatgcggccagatgatgccaacgtggccggcaatgtccacggggggaccatcctgaagatgatcgaggaggcaggcgccatcatcagcacccggcattgcaacagccagaacggggagcgctgtgtggccgccctggctcgtgtcgagcgcaccgacttcctgtctcccatgtgcatcggtgaggtggcgcatgtcagcgcggagatcacctacacctccaagcactctgtggaggtgcaggtcaacgtgatgtccgaaaacatcctcacaggtgccaaaaagctgaccaataaggccaccctgtggtatgtgcccctgtcgctgaagaatgtggacaaggtcctcgaggtgcctcctgttgtgtattcccggcaggagcaggaggaggagggccggaagcggtatgaagcccagaagctggagcgcatggagaccaagtggaggaacggggacatcgtccagccagtcctcaacccagagccgaacactgtcagctacagccagtccagcttgatccacctggtggggccttcagactgcaccctgcacggctttgtgcacggaggtgtgaccatgaagctcatggatgaggtcgccgggatcgtggctgcacgccactgcaagaccaacatcgtcacagcttccgtggacgccattaattttcatgacaagatcagaaaaggctgcgtcatcaccatctcgggacgcatgaccttcacgagcaataagtccatggagatcgaggtgttggtggacgccgaccctgttgtggacagctctcagaagcgctaccgggccgccagtgccttcttcacctacgtgtcgctgagccaggaaggcaggtcgctgcctgtgccccagctggtgcccgagaccgaggacgagaagaagcgctttgaggaaggcaaagggcggtacctgcagatgaaggcgaagcgacagggccacgcggagcctcagccctagactccctcctcctgccactggtgcctcgagtagccatggcaacgggcccagtgtccagtcacttagaagttccccccttggccaaaaacccaattcacattgagagctggtgttgtctgaagttttcgtatcacagtgttaacctgtactctctcctgcaaacctacacaccaaagctttatttatatcattccagtatcaatgctacacagtgttgtcccgagcgccgggaggcgttgggcagaaaccctcgggaatgcttccgagcacgctgtagggtatgggaagaacccagcaccactaataaagctgctgcttggctgg

SEQ ID NO: 907 - DNA, 1432 bp, Homo sapiens
  source 1..1432: mol_type = unassigned DNA
gagttccatttggctgcagcttctggagggagccgacaggagacgtggggagacgatgctcctgcttcggagaagcttgtcactaaacgtcctcagaaaggaagtcgacagggcctgttttggggagaaggccaaacagatcatgcggccagatgatgccaacgtggccggcaatgtccacggggggaccatcctgaagatgatcgaggaggcaggcgccatcatcagcacccggcattgcaacagccagaacggggagcgctgtgtggccgccctggctcgtgtcgagcgcaccgacttcctgtctcccatgtgcatcggtgaggtggcgcatgtcagcgcggagatcacctacacctccaagcactctgtggaggtgcaggtcaacgtgatgtccgaaaacatcctcacaggtgccaaaaagctgaccaataaggccaccctgtggtatgtgcccctgtcgctgaagaatgtggacaaggtcctcgaggtgcctcctgttgtgtattcccggcaggagcaggaggaggagggccggaagcggtatgaagcccagaagctggagcgcatggagaccaagtggaggaacggggacatcgtccagccagtcctcaacccagagccgaacactgtcagctacagccagtccagcttgatccacctggtggggccttcagactgcaccctgcacggctttgtgcacggaggtgtgaccatgaagctcatggatgaggtcgccgggatcgtggctgcacgccactgcaagaccaacatcgtcacagcttccgtggacgccattaattttcatgacaagatcagaaaaggctgcgtcatcaccatctcgggacgcatgaccttcacgagcaataagtccatggagatcgaggtgttggtggacgccgaccctgttgtggacagctctcagaagcgctaccgggccgccagtgccttcttcacctacgtgtcgctgagccaggaaggcaggtcgctgcctgtgccccagctggtgcccgagaccgaggacgagaagaagcgctttgaggaaggcaaagggcggtacctgcagatgaaggcgaagcgacagggccacgcggagcctcagccctagactccctcctcctgccactggtgcctcgagtagccatggcaacgggcccagtgtccagtcacttagaagttccccccttggccaaaaacccaattcacattgagagctggtgttgtctgaagttttcgtatcacagtgttaacctgtactctctcctgcaaacctacacaccaaagctttatttatatcattccagtatcaatgctacacagtgttgtcccgagcgccgggaggcgttgggcagaaaccctcgggaatgcttccgagcacgctgtagggtatgggaagaacccagcaccactaataaagctgctgcttggctgg

SEQ ID NO: 908 - DNA, 1614 bp, Homo sapiens
  source 1..1614: mol_type = unassigned DNA
cggtcctaggaggagcaggagcctggtgctttctatcagggagggatcacaccggctcactgctgagccggccaggcagacacaggcttgggctctgctgggcatcatacttgtcactgggtaaacagtttgcccacttaccgcaggatgaagctgcttgccagggctctccggctctgtgagtttgggaggcaggcatcttccaggaggctggtggctggccagggatgtgtggggccccggcgagggtgctgcgctcccgtccaggtggttgggcccagggctgatctcccaccctgtggagcctgcattactggaaggatcatgcggccagatgatgccaacgtggccggcaatgtccacggggggaccatcctgaagatgatcgaggaggcaggcgccatcatcagcacccggcattgcaacagccagaacggggagcgctgtgtggccgccctggctcgtgtcgagcgcaccgacttcctgtctcccatgtgcatcggtgaggtggcgcatgtcagcgcggagatcacctacacctccaagcactctgtggaggtgcaggtcaacgtgatgtccgaaaacatcctcacaggtgccaaaaagctgaccaataaggccaccctgtggtatgtgcccctgtcgctgaagaatgtggacaaggtcctcgaggtgcctcctgttgtgtattcccggcaggagcaggaggaggagggccggaagcggtatgaagcccagaagctggagcgcatggagaccaagtggaggaacggggacatcgtccagccagtcctcaacccagagccgaacactgtcagctacagccagtccagcttgatccacctggtggggccttcagactgcaccctgcacggctttgtgcacggaggtgtgaccatgaagctcatggatgaggtcgccgggatcgtggctgcacgccactgcaagaccaacatcgtcacagcttccgtggacgccattaattttcatgacaagatcagaaaaggctgcgtcatcaccatctcgggacgcatgaccttcacgagcaataagtccatggagatcgaggtgttggtggacgccgaccctgttgtggacagctctcagaagcgctaccgggccgccagtgccttcttcacctacgtgtcgctgagccaggaaggcaggtcgctgcctgtgccccagctggtgcccgagaccgaggacgagaagaagcgctttgaggaaggcaaagggcggtacctgcagatgaaggcgaagcgacagggccacgcggagcctcagccctagactccctcctcctgccactggtgcctcgagtagccatggcaacgggcccagtgtccagtcacttagaagttccccccttggccaaaaacccaattcacattgagagctggtgttgtctgaagttttcgtatcacagtgttaacctgtactctctcctgcaaacctacacaccaaagctttatttatatcattccagtatcaatgctacacagtgttgtcccgagcgccgggaggcgttgggcagaaaccctcgggaatgcttccgagcacgctgtagggtatgggaagaacccagcaccactaataaagctgctgcttggctgg

SEQ ID NO: 909 - DNA, 1474 bp, Homo sapiens
  source 1..1474: mol_type = unassigned DNA
agttccatttggctgcagcttctggagggagccgacaggagacgtggggagacgatgctcctgcttcggagaagcttgtcactaaacgtcctcagaaaggaagtcgacagggcctgttttggggagaaggccaaacagatcatgcggccagatgatgccaacgtggccggcaatgtccacggggggaccatcctgaagatgatcgaggaggcaggcgccatcatcagcacccggcattgcaacagccagaacggggagcgctgtgtggccgccctggctcgtgtcgagcgcaccgacttcctgtctcccatgtgcatcggtgaggtggcgcatgtcagcgcggagatcacctacacctccaagcactctgtggaggtgcaggtcaacgtgatgtccgaaaacatcctcacaggtgccaaaaagctgaccaataaggccaccctgtggtatgtgcccctgtcgctgaagaatgtggacaaggtcctcgaggtgcctcctgttgtgtattcccggcaggagcaggaggaggagggccggaagcggtatgaagcccagaagctggagcgcatggagaccaagtggaggaacggggacatcgtccagccagtcctcaacccagagccgaacactgtcagctacagccagtccagcttgatccacctggtggggccttcagactgcaccctgcacggctttgtgcacggaggaggagttgactttcactgaaaaatgcaaaagagggcacagttactcttttccaattccgtgaccttgtttggccggagcccccactgctacgtgggacacaacacaccagaccctcagtgttggggcaaggaaggaaaaaggtggacgaagagctgttccctactcttgaggaacttctggtctagggggatcaagaggtgaacaaacaaatgctttgggacgccgctttcttcctcgtgaagctgagtggcacaggctgcagttaaattccttctagtactcgccttctaggatcttggtgtttgaaaacatcgttctccaggttcttctgttctgaagaacagcttcacgtccatcctgatgcttcagcgggggagcgggacgtggggactggtgaacttgaaccttgaaccccgagatggtgtcaaccctgaaagcctgggcgtggggttcatatcactccagtccaagcatcctataggcacctgtcccaggaactcactttgtcctgcccacactgggtcctcctctcagccgggtccctggtggccagcacgtcatccctctcaaatcatggggcactgacccctttccagaaatatggagtatttggttgaggtcttgccatgaaccgtaagaacgtcctctccctctccccctccccctccccctctccccacggtctccctctccctctcttgccacggtctccctctgatgccgagccgaagctggactgtgctgctgccatcttggctcactgcaa

SEQ ID NO: 910 - DNA, 1294 bp, Homo sapiens
  source 1..1294: mol_type = unassigned DNA
cattccgcgccgggcctgccagacacctgcgcccttctgcagccgcccgccgcatccgccgccgcagcccccagcatgtcgggcccagacgtcgagacgccgtccgccatccagatctgagcgctgtgtggccgccctggctcgtgtcgagcgcaccgacttcctgtctcccatgtgcatcggtgaggtggcgcatgtcagcgcggagatcacctacacctccaagcactctgtggaggtgcaggtcaacgtgatgtccgaaaacatcctcacaggtgccaaaaagctgaccaataaggccaccctgtggtatgtgcccctgtcgctgaagaatgtggacaaggtcctcgaggtgcctcctgttgtgtattcccggcaggagcaggaggaggagggccggaagcggtatgaagcccagaagctggagcgcatggagaccaagtggaggaacggggacatcgtccagccagtcctcaacccagagccgaacactgtcagctacagccagtccagcttgatccacctggtggggccttcagactgcaccctgcacggctttgtgcacggaggtgtgaccatgaagctcatggatgaggtcgccgggatcgtggctgcacgccactgcaagaccaacatcgtcacagcttccgtggacgccattaattttcatgacaagatcagaaaaggctgcgtcatcaccatctcgggacgcatgaccttcacgagcaataagtccatggagatcgaggtgttggtggacgccgaccctgttgtggacagctctcagaagcgctaccgggccgccagtgccttcttcacctacgtgtcgctgagccaggaaggcaggtcgctgcctgtgccccagctggtgcccgagaccgaggacgagaagaagcgctttgaggaaggcaaagggcggtacctgcagatgaaggcgaagcgacagggccacgcggagcctcagccctagactccctcctcctgccactggtgcctcgagtagccatggcaacgggcccagtgtccagtcacttagaagttccccccttggccaaaaacccaattcacattgagagctggtgttgtctgaagttttcgtatcacagtgttaacctgtactctctcctgcaaacctacacaccaaagctttatttatatcattccagtatcaatgctacacagtgttgtcccgagcgccgggaggcgttgggcagaaaccctcgggaatgcttccgagcacgctgtagggtatgggaagaacccagcaccactaataaagctgctgcttggctgg

SEQ ID NO: 911 - DNA, 1168 bp, Homo sapiens
  source 1..1168: mol_type = unassigned DNA
tactagggcaatctgccggaagagtcaggttctgtgtatgtctccgcgtcttccgcggagcgggtgtgcagggcctgcagcattgaactagatgtcgtccccgcaggccccagaagatgggcagggctgtggcgaccgcggcgatccccctggggacctccgtagcgtcttggtcacgaccgtgctcaacctcgagccgctggacgaggatctcttcagaggaaggcattactgggtaccggccaagaggctgtttggtggtcagatcgtgggccaggccctggtggctgcagccaagtctgtgagtgaagacgtccacgtgcactccctgcactgctactttgttcgggcaggggacccgaagctgccagtactgtaccaagtggagcggacacgaacagggtcgagcttctcggtgcgctctgtgaaggccgtgcaacatgggaagcccatcttcatctgccaggcctccttccagcaggcccagcccagccccatgcagcaccagttctccatgcccactgtgccaccaccagaagagctgcttgactgtgagaccctcattgaccagtatttaagggaccctaacctccaaaagaggtacccattggcgctcaaccgaattgctgctcaggaggtccccattgagatcaagccagtaaacccatcccccctgagccagctgcagagaatggagcccaaacagatgttctgggtgcgagcccggggctatattggcgagggcgacatgaagatgcactgctgcgtggccgcctatatctccgactatgccttcttgggcactgcactgctgcctcaccagtggcagcacaaggtgcacttcatggtctcactggaccattccatgtggttccacgcccccttccgagctgaccactggatgctctatgaatgcgagagcccctgggccggtggctctcgggggctggtccatgggcggctgtggcgtcaggatggagtcctagctgtgacctgtgcccaggagggcgtgatccgagtgaagccccaggtctcagagagcaagctgtagccagaggtaccagcttcgcctggggcttcaagaacctcccatctatccccattcctgagacaggagttacagtcccttttggccctcacatccaataaagagactgataccactgga

SEQ ID NO: 912 - DNA, 423 bp, Homo sapiens
  source 1..423: mol_type = unassigned DNA
atctgccggaagagtcaggttctgtgtatgtctccgcgtcttccgcggagcgggtgtgcagggcctgcagcattgaactagatgtcgtccccgcaggccccagaagatgggcagggctgtggcgaccgcggcgatccccctggggacctccgtagcgtcttggtcacgaccgtgctcaacctcgagccgctggacgaggatctcttcagaggaaggcattactgggtaccggccaagaggctgtttggtggtcagatcgtgggccaggccctggtggctgcagccaagtctgtgagtgaagacgtccacgtgcactccctgcactgctactttgttcgggcagagcagatgccctcatgtgttctgcgtagatccccagctgagaagagtttgtggacctttacagtatgtgatttgtattaa

SEQ ID NO: 913 - DNA, 1675 bp, Homo sapiens
  source 1..1675: mol_type = unassigned DNA
gctgtccggctcccgggctgtcctcagcaagggcgcggtctggtactcgtgcgtcttttatcgcctcagtttccctccgccgactagcgcgcggggcccggttctccatcgcgcgcacggcagcctagcgcaatgaggcgggcagcactgcggctttgtgccttgggcaaagggcagcttactcctggaagaggactgactcaaggaccccagaaccccaagaaacagggaatcttccacattcatgaagttcgagataagttgcgggagatagtaggagcatccacaaactggagagaccatgtgaaggcaatggaagaaaggaaattacttcatagtttcttggctaaatcacaggatggactgcctcctaggagaatgaaggacagttatattgaagttctcttgcctttgggcagtgagcctgaattacgagagaaatatttgactgttcaaaacaccgtaagatttggcaggattcttgaggatcttgacagcttgggagttcttatttgttacatgcacaacaaaatccactccgccaagatgtctcctttatcgatagttacagccctggtggataagattgatatgtgtaagaagagcttgagcccagaacaggacattaagttcagtggccatgttagctgggtcgggaagacatccatggaagtgaagatgcaaatgttccagttacatggtgatgaattttgtcctgttttggatgcaacatttgtaatggtggctcgtgattctgaaaataaagggccggcatttgtaaatccactcatccctgaaagcccagaggaagaggagctctttagacaaggggaattgaacaaggggagaagaattgccttcagctccacgtcgttactgaaaatggcccccagcgctgaggagaggaccaccatacatgagatgtttctcagcacactggatccaaagactataagttttcggagtcgagttttaccctctaatgcagtgtggatggagaattcaaaactgaagagtttggaaatttgccaccctcaggagcggaacattttcaatcggatctttggtggtttccttatgaggaaggcatatgaacttgcgtgggctactgcttgtagctttggtggttctcgaccgtttgtggtagcagtagatgacatcatgtttcagaaacctgttgaggttggctcattgctctttctttcttcacaggtatgctttactcagaataattatattcaagtcagagtacacagtgaagtggcctccctgcaggagaagcagcatacaaccaccaatgtctttcatttcacgttcatgtcggaaaaagaagtgccattggttttcccaaaaacatatggagagtccatgttgtacttagatgggcagcggcatttcaactccatgagtggcccagcgaccttgagaaaggactaccttgtggagccctaagaacaccacatttgttgaaaactagcactctacccacagtgacgtggtatctgatgaagacctgatcgagtgtattgattttagtattgcttcgtgtcctccacacaggaggaggatgtattcagcctttaggatgatcagaaaagcagaaagagagagtggccggatggggctgaggggagaaagaattattaaacaataaatactttcaagacaattttaa

SEQ ID NO: 914 - DNA, 2768 bp, Homo sapiens
  source 1..2768: mol_type = unassigned DNA
aagagcagtaacacaaacagggctgaaacacgccctcctcccgtccccacacccccgcgacttgccatgttgcgggtgatgtgaaggagagaagtgctgtggcccttcagggagcacagacctaggggctccctgagccagggctgtgacaccctctttggggctctgcggtttctggtatcttcaaacttccgggcaccactgcattccccttgtccagacacaggtgcccacagcagaagccgcttgtggttcatcagatccagctgcagacttgcatagaaccggcacctttgccggcgcctggagctgcctgcccagctgcagcagctggtgtgtccggctctgcgcagtggccagaccctgcgttcgctcgcctgcacacccctcgctgttccgtgcctggctcaccctcggcaggcgtggaatcctggctggtagcatgagctgagcacagcctgccaggccacgtcagtggaacaagtctggcgggcctgatcaaaactcaggcaaaggcaccactggtcacagagctttctagctggaaaagcaacacctgaaggatcccgtgacacaatcaacctgctaggagatccctgccaccctgagaggctgcaggaagctgcctccatccaggcctcttcacagaaggagaattgcagagaccgtaggatttttctactcacaggaacagatggtgtccggtcaggaaggtaaaatgcttcaagaaaagtgcaatagggattataatactgatgatctgagactctgataatgactctgagatgattcccaattctatgatgaatcatctcagaatgactccgagatgatgattcctgattctacgatgattgaggcagagctcactggttggtgaatctagttggtagagctgaggcaccgcaataccatcatttctttctgaggaaatctaaagatgaaagaattcatcactaaaactgtactacgagaaatgctaaaggaagttgttcaaactgatggaaaattataccagatggacacttgaatttgcccaaaggaatgaagagcaccagaaatggcaaatgtgtggtcttactgtatcttcatgtcagtgtcatatcaaggacaagacagcagaaatggtccactccagttgcagatagtaaagaccctgtagctccagcatcagctcacctttctggttttgaatttcatgcttattaccatcctgtcatcacctactgtttccatggtagacgggactaagagatgggctttgtgccttgggcaaagggcagcttactcctggaagaggactgactcaaggaccccagaaccccaagaaacagggaatcttccacattcatgaagttcgagataagttgcgggagatagtaggagcatccacaaactggagagaccatgtgaaggcaatggaagaaaggaaattacttcatagtttcttggctaaatcacaggatggactgcctcctaggagaatgaaggacagttatattgaagttctcttgcctttgggcagtgagcctgaattacgagagaaatatttgactgttcaaaacaccgtaagatttggcaggattcttgaggatcttgacagcttgggagttcttatttgttacatgcacaacaaaatccactccgccaagatgtctcctttatcgatagttacagccctggtggataagattgatatgtgtaagaagagcttgagcccagaacaggacattaagttcagtggccatgttagctgggtcgggaagacatccatggaagtgaagatgcaaatgttccagttacatggtgatgaattttgtcctgttttggatgcaacatttgtaatggtggctcgtgattctgaaaataaagggccggcatttgtaaatccactcatccctgaaagcccagaggaagaggagctctttagacaaggggaattgaacaaggggagaagaattgccttcagctccacgtcgttactgaaaatggcccccagcgctgaggagaggaccaccatacatgagatgtttctcagcacactggatccaaagactataagttttcggagtcgagttttaccctctaatgcagtgtggatggagaattcaaaactgaagagtttggaaatttgccaccctcaggagcggaacattttcaatcggatctttggtggtttccttatgaggaaggcatatgaacttgcgtgggctactgcttgtagctttggtggttctcgaccgtttgtggtagcagtagatgacatcatgtttcagaaacctgttgaggttggctcattgctctttctttcttcacaggtatgctttactcagaataattatattcaagtcagagtacacagtgaagtggcctccctgcaggagaagcagcatacaaccaccaatgtctttcatttcacgttcatgtcggaaaaagaagtgccattggttttcccaaaaacatatggagagtccatgttgtacttagatgggcagcggcatttcaactccatgagtggcccagcgaccttgagaaaggactaccttgtggagccctaagaacaccacatttgttgaaaactagcactctacccacagtgacgtggtatctgatgaagacctgatcgagtgtattgattttagtattgcttcgtgtcctccacacaggaggaggatgtattcagcctttaggatgatcagaaaagcagaaagagagagtggccggatggggctgaggggagaaagaattattaaacaataaatactttc

SEQ ID NO: 915 - DNA, 3117 bp, Homo sapiens
  source 1..3117: mol_type = unassigned DNA
gtccggctcccgggctgtcctcagcaagggcgcggtctggtactcgtgcgtcttttatcgcctcagtttccctccgccgactagcgcgcggggcccggttctccatcgcgcgcacggcagcctagcgcaatgaggcgggcagcactgcggctttgtgccttgggcaaagggcagcttactcctggaagaggactgactcaaggaccccagaaccccaagaaacagggaatcttccacattcatgaagcatgttcatctatacatgtgaatcatgttcgagataagttgcgggagatagtaggagcatccacaaactggagagaccatgtgaaggcaatggaagaaaggaaattacttcatagtttcttggctaaatcacaggatggactgcctcctaggagaatgaaggacagttatattgaagttctcttgcctttgggcagtgagcctgaattacgagagaaatatttgactgttcaaaacaccgtaagatttggcaggattcttgaggatcttgacagcttgggagttcttatttgttacatgcacaacaaaatccactccgccaagatgtctcctttatcgatagttacagccctggtggataagattgatatgtgtaagaagagcttgagcccagaacaggacattaagttcagtggccatgttagctgggtcgggaagacatccatggaagtgaagatgcaaatgttccagttacatggtgatgaattttgtcctgttttggatgcaacatttgtaatggtggctcgtgattctgaaaataaagggccggcatttgtaaatccactcatccctgaaagcccagaggaagaggagctctttagacaaggggaattgaacaaggggagaagaattgccttcagctccacgtcgttactgaaaatggcccccagcgctgaggagaggaccaccatacatgagatgtttctcagcacactggatccaaagactataagttttcggagtcgagttttaccctctaatgcagtgtggatggagaattcaaaactgaagagtttggaaatttgccaccctcaggagcggaacattttcaatcggatctttggtggtttccttatgaggaaggcatatgaacttgcgtgggctactgcttgtagctttggtggttctcgaccgtttgtggtagcagtagatgacatcatgtttcagaaacctgttgaggttggctcattgctctttctttcttcacaggtatgctttactcagaataattatattcaagtcagagtacacagtgaagtggcctccctgcaggagaagcagcatacaaccaccaatgtctttcatttcacgttcatgtcggaaaaagaagtgccattggttttcccaaaaacatatggagagtccatgttgtacttagatgggcagcggcatttcaactccatgagtggcccagcgaccttgagaaaggactaccttgtggagccctaagaacaccacatttgttgaaaactagcactctacccacagtgacgtggtatctgatgaagacctgatcgagtgtattgattttagtattgcttcgtgtcctccacacaggaggaggatgtattcagcctttaggatgatcagaaaagcagaaagagagagtggccggatggggctgaggggagaaagaattattaaacaataaatactttcaagacaattttaattgtgaacctaccatgttgcctcccatcttctgaaaaaacaaaaaaattgagaggctgggcgtggtggctcatgcctataatcccagcactttgggaggctgaggcgggcggatcatgaagtcaggagatcaagaccatcctggccaacatggtgaaaccctgtctctactaaaaatacagaaaattagccgtggtggcatgtgcctgtagtcccagctacttgggaggctgaggcaggagaattgcttgaacccaggaggtggaggttgcagtgagctgagattgcaccattgcactccagcctgggcgacagagagagactgtctcaaaaattaattaattaattaattaattgaggataccattggatgcattcttttcttacacatattgcaactgtcagtatacaaggtttcctgccagggtatttggatgacgttctttaaacctaaccacttgctctgtgctgtctaaatcccatcagccgtacatgattcctttgcttccctctatttcccagcttttgttgtcagagggtagatgaaaagttggggcgaagggatttaacaaaagttactgcatccgtaaagatttgtgggaagatttaggtctgaaaccataccattagaaggtgtttagagatgatctagataaggaaatacaggaccatttggtcattctttcattcaccagacagctatttagcacattctgctagtggctccgcaggatatatctgatttaaaaaataggaaccacaataataatagctgcttatgcttatggagcattgccatgtgctagataggcaccatcctcagcccttggcaggtctgagctcctttatttcttccaatcaacactatgaggcaggttctgtaaccccccttagggttaggccactcgggaaactgaagcacagagagtttaagtaacttcctggaggtccgacgcgtaacatgtggaggtgctgggattcaaaaccaggcaatgtgggtcccgggcactcttgaccagtgcctgtacttcttccaaggaatagagcaagggaggtcataccgaatatcacagtgtcacctaggaagcccaagggaggtattcccgttaatctgcagccaaggccgggcgcggtagctcatgcctgtaatcccagcactttgggaggccaaggcggatggatcatgaggtcaggagttcaagaccagcctggccgagatggtgaaaccccgtttctactaaaaatacaaaaattagccgggcgtggtggcggacgcctgtaatcccagctactcgggaggctgaggcagagaactgcttgaacctgggaggcagaggttgcagtgagctgtgatcatgccactgcactccagcctgggtgacagaacgagactccatctcaaaaaaaaaaaaaaaaaaa

SEQ ID NO: 916 - DNA, 3849 bp, Homo sapiens
  source 1..3849: mol_type = unassigned DNA
atgaaaggaagagtgagccaataaacgagggaacgccgggaaaggcagcctcaagccggtgggccctgccacccccaccgtccctgagcatccgagccggttcccgcccccggcccgaactggcccgcgcgcgctcgcagccccgcggcggaacccgagggcggcggcagcggtttcccttgaacgagccggggaatctggagggagcacacaggaaaggcagagccgcgagctggaccagccgtgcaaatctctagaagatgacggtgttctttaaaacgcttcgaaatcactggaagaaaactacagctgggctctgcctgctgacctggggaggccattggctctatggaaaacactgtgataacctcctaaggagagcagcctgtcaagaagctcaggtgtttggcaatcaactcattcctcccaatgcacaagtgaagaaggccactgtttttctcaatcctgcagcttgcaaaggaaaagccaggactctatttgaaaaaaatgctgccccgattttacatttatctggcatggatgtgactattgttaagacagattatgagggacaagccaagaaactcctggaactgatggaaaacacggatgtgatcattgttgcaggaggagatgggacactgcaggaggttgttactggtgttcttcgacgaacagatgaggctaccttcagtaagattcccattggatttatcccactgggagagaccagtagtttgagtcataccctctttgccgaaagtggaaacaaagtccaacatattactgatgccacacttgccattgtgaaaggagagacagttccacttgatgtcttgcagatcaagggtgaaaaggaacagcctgtatttgcaatgaccggccttcgatggggatctttcagagatgctggcgtcaaagttagcaagtactggtatcttgggcctctaaaaatcaaagcagcccactttttcagcactcttaaggagtggcctcagactcatcaagcctctatctcatacacgggacctacagagagacctcccaatgaaccagaggagacccctgtacaaaggccttctttgtacaggagaatattacgaaggcttgcgtcctactgggcacaaccacaggatgccctttcccaagaggtgagcccggaggtctggaaagatgtgcagctgtccaccattgaactgtccatcacaacacggaataatcagcttgacccgacaagcaaagaagattttctgaatatctgcattgaacctgacaccatcagcaaaggagactttataactataggaagtcgaaaggtgagaaaccccaagctgcacgtggagggcacggagtgtctccaagccagccagtgcactttgcttatcccggagggagcagggggctcttttagcattgacagtgaggagtatgaagcgatgcctgtggaggtgaaactgctccccaggaagctgcagttcttctgtgatcctaggaagagagaacagatgctcacaagccccacccagtgagcagcagaagacaagcactctgagaccacactttaggccaccggtgggaccaaaagggaacaggtgcctcagccatcccaacagtgtcgtcagagggtccccagggcattttcatggcaagtacccctctgcccccactccagcagtgcttcccaaagtgtgctctgtcacctgctttgcaatcggcttccattagcgcatgttttattttggtgtgacggttggccctcctaaacacggactttcctcaggctggttcaagacggaaaaggactttcttctgttttcttccaaagtgcaaccacagtggagagcccacggtgggcttagcctgcctaggcccttccatttctcttctttgaccgtgctaggaattccaggaaagtgcattcctgccctggtgaccttttcctatgtctaggctcctccacaggtgctgctattttgtgagctccggctcctgtttagcttttatttcagttctaacctcagtccagaaacatatgtgaggttgtttccctcttcagccacggctacaataccggaaaatgctagtttttatttatttttttaagtagtgcttcctaaatggtttgcatgagagccacctggggtacatgttgaaaacttatttggggtctaccccaaacctaataacccaaatttggggatggggcccaggaatatgcatttttaaaaagtcatctgcccttcccaggtgattctgtaagttgtccctcaactgtacttggagaaatcgtgttttaaagcagtagtccacaaagtattctgctcatgtgcccccaaaagtattttgaaaaatcatgtataccctcacccatctaagttgatatctaaaattttatctaagttggtatctaaaatttttcatgggaagttaaatagttgacaaagtatgtatttgctggtgtcgtgtaaatattggtattttaaaataaaaactgttacatcactattttaaacatatccagtacaatttaaatatcacaacaatttgacacccttcattcatttataaaaataaatgagctagttctttagtagttaaacatttcaaattggcttttctccttctgtatttccataccacttttcagccaagaatcctatcataatgtaatctattatgcccgacatcttttaatcattcaccccattacttcttgtcaacaaaaaatataaatggaaattttttttttagctcttgctttaagtgtttgtttgttatctcagtccagaaccaatattatcgtaattaattattggtatataatgaaaacggtattaattcttggatgattaaaagtttttttattagaatgttctttatcctaattagttcatttatccaagaatacatgaatgtgatttacagctgagatggggttcaacctcagctgtattccttgtttctgtatagatgtaagcacataaattcgatggaatagaattacgttaacaatgtttttacagttctttggattcctttggcattttgacaaagatcacagtgctctatcatcaagaattattaatgatgatctatcaactaacaaacaacttgattagattctcctttagtctgttgaaagcagagaactgaaatccacctgatttaccatggctttgccagccagtcattagcaccatttacttttactatcgctgacattttcctttgttcagtggccctgaggttcttacactctagggggcagtgcaccacaggaagatagatcaatgagggaggattgcgagggggaaggggaggaagcagagctggcaggccttagctacaggctctctctcaggcagatcccttttaagatacatacaccatgcccacacatcccatggagagagaccaatgctttagtagattacagaacagctatgaaaagtccatgaatgaagatcacaaaaaggaaggctttcttatttcatactgtattcttcagggtggtaaaatttctgcttttggcaaaaacataacagacggttccaaacatcagcataaagatcactcatcccataccacccacaggtagggaggaaggatgctgtagtatatgaaaacaaaagttttcacctgagctgagagcatttagcatatcgtggttctgtaacaatatcaaggaccagtgcagaatctggctttcttttctgataggctaccagtgtgtgtttatgtgtgctcattttgtggttctaatcataatggtacatataattagggaaggatatggaagccactttagaatcttattcatttttaaatataaatatgccttgtttcaaa

SEQ ID NO: 917 - DNA, 245 bp, Homo sapiens
  source 1..245: mol_type = unassigned DNA
ggaaaggcagagccgcgagctggaccagccgtgcaaatctctagaagatgacggtgttctttaaaacgcttcgaaatcactggaagaaaactacagctgggctctgcctgctgacctggggaggccattggctctatggaaaacactgtgataacctcctaaggagagcagcctgtcaagaagctcagcactatcaggatgaatcacgctgggagccaactctgagtagaactccaggaagttaa

SEQ ID NO: 918 - DNA, 1046 bp, Homo sapiens
  source 1..1046: mol_type = unassigned DNA
caaatctctagaagatgacggtgttctttaaaacgcttcgaaatcactggaagaaaactacagctgggctctgcctgctgacctggggaggccattggctctatggaaaacactgtgataacctcctaaggagagcagcctgtcaagaagctcagcactatcaggatgaatcacgctgggagccaactctgagtagaactccaggaagttaaccatctggtgaagagcagttctgacgcccacccctatagactgtttgtttctggattggtcccaagaacacagaactggactggtagaagctctgggaatttgtttgtgtctgcagttgtctttgtagatttgtctaacccctgaatcatccctgatctgaataacccccaaggatatcagttcagagcaagtgttacctctaaaagtcaaatcttcttaaaattgttgattcatatttttaaagctcatctccaagttcaactgatccatatcatgtacactgttatattccatgagattttacttaaatattcatttatatggctaattatagctggattataatatttgtcctttcaaatataagacagcatttttgcccccccactgcaaaaatgtgcattataccttgcagatgaaattctgagactgagttgcctttttgttttatatcatttgagcttatgatgtcagaaataccaaaatagaaacatgaaaatcaaaagtggcaaatgtgtgaagcatttagtaataaaaataggtggcagacctcatgtttgtttctgaaatgttttaatggatgacagtgagaatagatactataaattaattcctctctttagcgattgttacaatagatactataaattaattcctctctttagcagttgttacagtatatactataattcctctttttagcgattgttatctagctgttctaaacctgtgttttacgaatttgattacttctttgtttaaatgtattatctttcatatggctctaagttgttttggaaatcaattcaaataaactttaatattaaattaaa

SEQ ID NO: 919 - DNA, 976 bp, Homo sapiens
  source 1..976: mol_type = unassigned DNA
agagccgcgagctggaccagccgtgcaaatctctagaagatgacggtgttctttaaaacgcttcgaaatcactggaagaaaactacagctgggctctgcctgctgacctggggaggccattggctctatggaaaacactgtgataacctcctaaggagagcagcctgtcaagaagctcaggtgtttggcaatcaactcattcctcccaatgcacaagtgaagaaggccactgtttttctcaatcctgcagcttgcaaagggactctatttgaaaaaaatgctgccccgattttacatttatctggcatggatgtgactattgttaagacagattatgagggacaagccaagaaactcctggaactgatggaaaacacggatgtgatcattgttgcaggaggagatgggacactgcaggaggttgttactggtgttcttcgacgaacagatgaggctaccttcagtaagattcccattggatttatcccactgggagagaccagtagtttgagtcataccctctttgccgaaagtggaaacaaagtccaacatattactgatgccacacttgccattgtgaaaggagagacagttccacttgatgtcttgcagatcaagggtgaaaaggaacagcctgtatttgcaatgaccggccttcgatggggatctttcagagatgctggcgtcaaagttagcaagtactggtatcttgggcctctaaaaatcaaagcagcccactttttcagcactcttaagccctttcccaagaggtgagcccggaggtctggaaagatgtgcagctgtccaccattgaactgtccatcacaacacggaataatcagcttgacccgacaagcaaagaagattttctgaatatctgcattgaacctgacaccatcagcaaaggagactttataactataggaagtcgaaaggtgagaaaccccaagctgcacgtggagggcacggagtgtct

SEQ ID NO: 920 - DNA, 2379 bp, Homo sapiens
  source 1..2379: mol_type = unassigned DNA
acagatcagttccggcaagcctcgaggctcacggggtttatgcacactaacttcactgagccagggagcacggaagttgtgccactgtgcaacttgggttttctttatcctgcagtctttacctcagcagaaccgcacaccacagactccctccagctctttgtgtgtggctctctcagggtccaacaagagcaagctgtgggtctgtgagtgtttatgtgtgcttttattcacttcacacttattgaaaagtgtgtatgtgagagggtggggtgtgtgtgtcaaagagagtgaggaagagaaggagagagagatcaattgattctgcagcctcagctccagcatccctcagttgggagcttccaaagccgggtgatcacttggggtgcatagctcggagatgcagtccccctggaaaatccttacggtggcgcctctattcttgctcctgtctcttcagtcctcggcctctccagccaacgatgaccagtccaggcccagcctctcgaatgggcacacctgtgtagggtgtgtgctggtggtgtctgtaatagaacagcttgctcaagttcacaactcgacggtccaggcctcgatggagagactgtgcagctacctgcctgaaaaactgttcttgaaaaccacctgctatttagtcattgacaagtttggatcagacatcataaaactgcttagcgcagatatgaatgctgatgtggtatgtcacactctggagttttgtaaacagaacactggccaaccattgtgtcatctctaccctcttcccaaggagacatggaaatttacactacagaaggcaagacaaattgtcaagaagtccccgattctgaaatattctagaagtggttctgacatttgttcactcccggttttggccaagatctgccagaaaattaaattagctatggaacagtctgtgccattcaaagatgtggattcagacaaatacagcgttttcccaacactgcggggctatcactggcgggggagagactgtaatgacagcgacgagtcagtgtacccaggtagaaggccgaacaactgggatgtccatcaggattcaaactgtaatggcatttggggtgtcgatccaaaagatggagttccatatgagaagaaattctgtgaaggttcacagcccaggggaatcattttgctgggagactcagctggggctcattttcacatctctcctgaatggatcacagcgtcgcagatgtctttgaactctttcatcaatctaccaacagcccttaccaacgagcttgactggccccaactctctggtgctacaggatttctggactccactgttggaattaaagaaaaatctatttaccttcgcttatggaaaagaaaccactgtaatcacagggactaccagaatatttcaagaaatggtgcatcttcccgaaacctgaagaaatttatagaaagcttgtctagaaacaaggtgttggactatcccgccatcgttatatatgccatgattggaaatgatgtctgcagtgggaagagtgacccagtcccagccatgaccactcctgagaaactctactccaacgtcatgcagactctgaagcatctaaattcccacctgcccaatggcagccatgttattttgtatggcttaccagatggaacctttctctgggataatttgcacaacagatatcatcctctcggccagctaaataaagacatgacctatgcgcagttgtactccttcctgaactgcctccaggtcagcccctgccacggctggatgtcttccaacaagacgttgcggactctcacttcagagagagcagagcaactctccaacacactgaaaaaaattgcagccagtgagaaatttacaaacttcaatcttttctacatggattttgccttccatgaaatcatacaggagtggcagaagagaggcggacagccctggcagctcatcgagcccgtggatggattccaccccaacgaggtggctttgctgttgttggcggatcatttctggaaaaaggtgcagctccagtggccccaaatcctgggaaaggagaatccgttcaacccccagattaaacaggtgtttggagaccaaggcgggcactgagcctctcaggagcatgcacccctggggagcacagggaggcagaggcttgggtaaactcattccacaaccctatgggggctgccacgtcacaggcccaaaggactcttcttcagcagcatctttgcaaatgtctttctctcaatgaagagcatatctggacgactgtgcaatgctgtgtgctcccgggatcagtaacccttccgctgttcctgaaataacctttcataaagtgctttgggtgccattccaaa

SEQ ID NO: 921 - DNA, 2334 bp, Homo sapiens
  source 1..2334: mol_type = unassigned DNA
aacagatcagttccggcaagcctcgaggctcacggggtttatgcacactaacttcactgagccagggagcacggaagttgtgccactgtgcaacttgggttttctttatcctgcagtctttacctcagcagaaccgcacaccacagactccctccagctctttgtgtgtggctctctcagggtccaacaagagcaagctgtgggtctgtgagtgtttatgtgtgcttttattcacttcacacttattgaaaagtgtgtatgtgagagggtggggtgtgtgtgtcaaagagagtgaggaagagaaggagagagagatcaattgattctgcagcctcagctccagcatccctcagttgggagcttccaaagccgggtgatcacttggggtgcatagctcggagatgcagtccccctggaaaatccttacggtggcgcctctattcttgctcctgtctcttcagtcctcggcctctccagccaacgatgaccagtccaggcccagcctctcgaatgggcacacctgtgtagaaaaactgttcttgaaaaccacctgctatttagtcattgacaagtttggatcagacatcataaaactgcttagcgcagatatgaatgctgatgtggtatgtcacactctggagttttgtaaacagaacactggccaaccattgtgtcatctctaccctcttcccaaggagacatggaaatttacactacagaaggcaagacaaattgtcaagaagtccccgattctgaaatattctagaagtggttctgacatttgttcactcccggttttggccaagatctgccagaaaattaaattagctatggaacagtctgtgccattcaaagatgtggattcagacaaatacagcgttttcccaacactgcggggctatcactggcgggggagagactgtaatgacagcgacgagtcagtgtacccaggtagaaggccgaacaactgggatgtccatcaggattcaaactgtaatggcatttggggtgtcgatccaaaagatggagttccatatgagaagaaattctgtgaaggttcacagcccaggggaatcattttgctgggagactcagctggggctcattttcacatctctcctgaatggatcacagcgtcgcagatgtctttgaactctttcatcaatctaccaacagcccttaccaacgagcttgactggccccaactctctggtgctacaggatttctggactccactgttggaattaaagaaaaatctatttaccttcgcttatggaaaagaaaccactgtaatcacagggactaccagaatatttcaagaaatggtgcatcttcccgaaacctgaagaaatttatagaaagcttgtctagaaacaaggtgttggactatcccgccatcgttatatatgccatgattggaaatgatgtctgcagtgggaagagtgacccagtcccagccatgaccactcctgagaaactctactccaacgtcatgcagactctgaagcatctaaattcccacctgcccaatggcagccatgttattttgtatggcttaccagatggaacctttctctgggataatttgcacaacagatatcatcctctcggccagctaaataaagacatgacctatgcgcagttgtactccttcctgaactgcctccaggtcagcccctgccacggctggatgtcttccaacaagacgttgcggactctcacttcagagagagcagagcaactctccaacacactgaaaaaaattgcagccagtgagaaatttacaaacttcaatcttttctacatggattttgccttccatgaaatcatacaggagtggcagaagagaggcggacagccctggcagctcatcgagcccgtggatggattccaccccaacgaggtggctttgctgttgttggcggatcatttctggaaaaaggtgcagctccagtggccccaaatcctgggaaaggagaatccgttcaacccccagattaaacaggtgtttggagaccaaggcgggcactgagcctctcaggagcatgcacccctggggagcacagggaggcagaggcttgggtaaactcattccacaaccctatgggggctgccacgtcacaggcccaaaggactcttcttcagcagcatctttgcaaatgtctttctctcaatgaagagcatatctggacgactgtgcaatgctgtgtgctcccgggatcagtaacccttccgctgttcctgaaataacctttcataaagtgctttgggtgccattccaaacaagagagtatctgtgccctttacagctaattgttctaaaaggagtttct

SEQ ID NO: 922 - DNA, 1352 bp, Homo sapiens
  source 1..1352: mol_type = unassigned DNA
acaagagctgagcggaagccaggtcaagggtggtgctgatcattgtgacttccctgatgaagttgaagaactctttcatcaatctaccaacagcccttaccaacgagcttgactggccccaactctctggtgctacaggatttctggactccactgttggaattaaagaaaaatctatttaccttcgcttatggaaaagaaaccactgtaatcacagggactaccagaatatttcaagaaatggtgcatcttcccgaaacctgaagaaatttatagaaagcttgtctagaaacaaggtgttggactatcccgccatcgttatatatgccatgattggaaatgatgtctgcagtgggaagagtgacccagtcccagccatgaccactcctgagaaactctactccaacgtcatgcagactctgaagcatctaaattcccacctgcccaatggcagccatgttattttgtatggcttaccagatggaacctttctctgggataatttgcacaacagatatcatcctctcggccagctaaataaagacatgacctatgcgcagttgtactccttcctgaactgcctccaggtcagcccctgccacggctggatgtcttccaacaagacgttgcggactctcacttcagagagagcagagcaactctccaacacactgaaaaaaattgcagccagtgagaaatttacaaacttcaatcttttctacatggattttgccttccatgaaatcatacaggagtggcagaagagaggcggacagccctggcagctcatcgagcccgtggatggattccaccccaacgaggtggctttgctgttgttggcggatcatttctggaaaaaggtgcagctccagtggccccaaatcctgggaaaggagaatccgttcaacccccagattaaacaggtgtttggagaccaaggcgggcactgagcctctcaggagcatgcacccctggggagcacagggaggcagaggcttgggtaaactcattccacaaccctatgggggctgccacgtcacaggcccaaaggactcttcttcagcagcatctttgcaaatgtctttctctcaatgaagagcatatctggacgactgtgcaatgctgtgtgctcccgggatcagtaacccttccgctgttcctgaaataacctttcataaagtgctttgggtgccattccaaacaagagagtatctgtgccctttacagctaattgttctaaaaggagtttctaaaaacacttaagtccagcgatgttcagcaatttacccagggtcttggcatgccaggggactgatcccccctgtgttgctgacttctttaaaatggccggg

SEQ ID NO: 923 - DNA, 2462 bp, Homo sapiens
  source 1..2462: mol_type = unassigned DNA
aacagatcagttccggcaagcctcgaggctcacggggtttatgcacactaacttcactgagccagggagcacggaagttgtgccactgtgcaacttgggttttctttatcctgcagtctttacctcagcagaaccgcacaccacagactccctccagctctttgtgtgtggctctctcagggtccaacaagagcaagctgtgggtctgtgagtgtttatgtgtgcttttattcacttcacacttattgaaaagtgtgtatgtgagagggtggggtgtgtgtgtcaaagagagtgaggaagagaaggagagagagatcaattgattctgcagcctcagctccagcatccctcagttgggagcttccaaagccgggtgatcacttggggtgcatagctcggagatgcagtccccctggaaaatccttacggtggcgcctctattcttgctcctgtctcttcagtcctcggcctctccagccaacgatgaccagtccaggcccagcctctcgaatgggcacacctgtgtagggtgtgtgctggtggtgtctgtaatagaacagcttgctcaagttcacaactcgacggtccaggcctcgatggagagactgtgcagctacctgcctgaaaaactgttcttgaaaaccacctgctatttagtcattgacaagtttggatcagacatcataaaactgcttagcgcagatatgaatgctgatgtggtatgtcacactctggagttttgtaaacagaacactggccaaccattgtgtcatctctaccctcttcccaaggagacatggaaatttacactacagaaggcaagacaaattgtcaagaagtccccgattctgaaatattctagaagtggttctgacatttgttcactcccggttttggccaagatctgccagaaaattaaattagctatggaacagtctgtgccattcaaagatgtggattcagacaaatacagcgttttcccaacactgcggggctatcactggcgggggagagactgtaatgacagcgacgagtcagtgtacccaggtagaaggccgaacaactgggatgtccatcaggattcaaactgtaatggcatttggggtgtcgatccaaaagatggagttccatatgagaagaaattctgtgaaggttcacagcccaggggaatcattttgctgggagactcagctggggctcattttcacatctctcctgaatggatcacagcgtcgcagatgtctttgaactctttcatcaatctaccaacagcccttaccaacgagcttgactggccccaactctctggtgctacaggatttctggactccactgttggaattaaagaaaaatctatttaccttcgcttatggaaaagaaaccactgtaatcacagggactaccagaatatttcaagaaatggtgcatcttcccgaaacctgaagaaatttatagaaagcttgtctagaaacaaggtgttggactatcccgccatcgttatatatgccatgattggaaatgatgtctgcagtgggaagagtgacccagtcccagccatgaccactcctgagaaactctactccaacgtcatgcagactctgaagcatctaaattcccacctgcccaatggcagccatgttattttgtatggcttaccagatggaacctttctctgggataatttgcacaacagatatcatcctctcggccagctaaataaagacatgacctatgcgcagttgtactccttcctgaactgcctccaggtcagcccctgccacggctggatgtcttccaacaagacgttgcggactctcacttcagagagagcagagcaactctccaacacactgaaaaaaattgcagccagtgagaaatttacaaacttcaatcttttctacatggattttgccttccatgaaatcatacaggagtggcagaagagaggcggacagccctggcagctcatcgagcccgtggatggattccaccccaacgagagaaagagcatcctcctcaaaggcatattaatgacaagccagacactggacaaccaagaatggacccagctaacatcatggataaagggaaacctgacatgcgacagcagaaccagagagtggctttgctgttgttggcggatcatttctggaaaaaggtgcagctccagtggccccaaatcctgggaaaggagaatccgttcaacccccagattaaacaggtgtttggagaccaaggcgggcactgagcctctcaggagcatgcacccctggggagcacagggaggcagaggcttgggtaaactcattccacaactatgggggctgccacgtcacaggcccaaaggactcttcttcagcagcatctttaaatgtctttctctcaatgaagagcatatctggacgactgtgcaatgctgtgtgctcccgggatcagtaacccttccgctgttcctgaaataa

SEQ ID NO: 924 - DNA, 2396 bp, Homo sapiens
  source 1..2396: mol_type = unassigned DNA
tttctttatcctgcagtctttacctcagcagaaccgcacaccacagactccctccagctctttgtgtgtggctctctcagggtccaacaagagcaagctgtgggtctgtgagtgtttatgtgtgcttttattcacttcacacttattgaaaagtgtgtatgtgagagggtggggtgtgtgtgtcaaagagagtgaggaagagaaggagagagagatcaattgattctgcagcctcagctccagcatccctcagttgggagcttccaaagccgggtgatcacttggggtgcatagctcggagatgcagtccccctggaaaatccttacggtggcgcctctattcttgctcctgtctcttcagtcctcggcctctccagccaacgatgaccagtccaggcccagcctctcgaatgggcacacctgtgtagggtgtgtgctggtggtgtctgtaatagaacagcttgctcaagttcacaactcgacggtccaggcctcgatggagagactgtgcagctacctgcctgaaaaactgttcttgaaaaccacctgctatttagtcattgacaagtttggatcagacatcataaaactgcttagcgcagatatgaatgctgatgtggtatgtcacactctggagttttgtaaacagaacactggccaaccattgtgtcatctctaccctcttcccaaggagacatggaaatttacactacagaaggcaagacaaattgtcaagaagtccccgattctgaaatattctagaagtggttctgacatttgttcactcccggttttggccaagatctgccagaaaattaaattagctatggaacagtctgtgccattcaaagatgtggattcagacaaatacagcgttttcccaacactgcggggctatcactggcgggggagagactgtaatgacagcgacgagtcagtgtacccaggtagaaggccgaacaactgggatgtccatcaggattcaaactgtaatggcatttggggtgtcgatccaaaagatggagttccatatgagaagaaattctgtgaaggttcacagcccaggggaatcattttgctgggagactcagctggggctcattttcacatctctcctgaatggatcacagcgtcgcagatgtctttgaactctttcatcaatctaccaacagcccttaccaacgagcttgactggccccaactctctggtgctacaggatttctggactccactgttggaattaaagaaaaatctatttaccttcgcttatggaaaagaaaccactgtaatcacagggactaccagaatatttcaagaaatggtgcatcttcccgaaacctgaagaaatttatagaaagcttgtctagaaacaaggtgttggactatcccgccatcgttatatatgccatgattggaaatgatgtctgcagtgggaagagtgacccagtcccagccatgaccactcctgagaaactctactccaacgtcatgcagactctgaagcatctaaattcccacctgcccaatggcagccatgttattttgtatggcttaccagatggaacctttctctgggataatttgcacaacagatatcatcctctcggccagctaaataaagacatgacctatgcgcagttgtactccttcctgaactgcctccaggtcagcccctgccacggctggatgtcttccaacaagacgttgcggactctcacttcagagagagcagagcaactctccaacacactgaaaaaaattgcagccagtgagaaatttacaaacttcaatcttttctacatggattttgccttccatgaaatcatacaggagtggcagaagagaggcggacagccctggcagctcatcgagcccgtggatggattccaccccaacgagagaaagagcatcctcctcaaaggcatattaatgacaagccagacactggacaaccaagaatggacccagctaacatcatggataaagggaaacctgacatgcgacagcagaaccagagagtggctttgctgttgttggcggatcatttctggaaaaaggtgcagctccagtggccccaaatcctgggaaaggagaatccgttcaacccccagattaaacaggtgtttggagaccaaggcgggcactgagcctctcaggagcatgcacccctggggagcacagggaggcagaggcttgggtaaactcattccacaaccctatgggggctgccacgtcacaggcccaaaggactcttcttcagcagcatctttgcaaatgtctttctctcaatgaagagcatatctggacgactgtgcaatgctgtgtgctcccgggatcagtaacccttccgctgttcctgaaataacctttcataaagtgctttgggtgccattcc

SEQ ID NO: 925 - DNA, 627 bp, Homo sapiens
  source 1..627: mol_type = unassigned DNA
actaaacttccgggcgcggaggtttgcgcgccttggtgagccgttggcgtggtggtcccggagtgatcctggcagccggtggggaagacaaggagggtttgagcatggcagaaggaaacaccctgatatcagtggattatgaaatttttgggaaggtgcaaggggtgtttttccgtaagcatactcaggctgagggtaaaaagctgggattggtaggctgggtccagaacactgaccggggcacagtgcaaggacaattgcaaggtcccatctccaaggtgcgtcatatgcaggaatggcttgaaacaagaggaagtcctaaatcacacatcgacaaagcaaacttcaacaatgaaaaagtcatcttgaagttggattactcagacttccaaattgtaaaataatggcctgaatttaagttttctaagataaactcagtggtttggtttttattattaatagagatagaactattgtgtgttaatattagcattagtcaataagttattttaatgtcagatttttgaatgttattatatattacctgtatgatggaaggattaccactgtacacaaatctaatcaataaaaacgttagaaccttctgcttagagtacttttaaaaaa

SEQ ID NO: 926 - DNA, 650 bp, Homo sapiens
  source 1..650: mol_type = unassigned DNA
ggtgagccgttggcgtggtggtcccggagtgatcctggcagccggtggggaagacaaggagggtttgagcatggcagaaggaaacaccctgatatcagtggattatgaaatttttgggaaggtgcaaggggtgtttttccgtaagcatactcaggaaatgactgttgaaaacagaattgctgaaactcacagcaagagctgtgttccagttagctttgctaccagttatgcaggctgagggtaaaaagctgggattggtaggctgggtccagaacactgaccggggcacagtgcaaggacaattgcaaggtcccatctccaaggtgcgtcatatgcaggaatggcttgaaacaagaggaagtcctaaatcacacatcgacaaagcaaacttcaacaatgaaaaagtcatcttgaagttggattactcagacttccaaattgtaaaataatggcctgaatttaagttttctaagataaactcagtggtttggtttttattattaatagagatagaactattgtgtgttaatattagcattagtcaataagttattttaatgtcagatttttgaatgttattatatattacctgtatgatggaaggattaccactgtacacaaatctaatcaataaaaacgttagaaccttc

SEQ ID NO: 927 - DNA, 565 bp, Homo sapiens
  source 1..565: mol_type = unassigned DNA
tttgcgcgccttggtgagccgttggcgtggtggtcccggagtgatcctggcagccggtttgagcatggcagaaggaaacaccctgatatcagtggattatgaaatttttgggaaggtgcaaggggtgtttttccgtaagcatactcaggctgagggtaaaaagctgggattggtaggctgggtccagaacactgaccggggcacagtgcaaggacaattgcaaggtcccatctccaaggtgcgtcatatgcaggaatggcttgaaacaagaggaagtcctaaatcacacatcgacaaagcaaacttcaacaatgaaaaagtcatcttgaagttggattactcagacttccaaattgtaaaataatggcctgaatttaagttttctaagataaactcagtggtttggtttttattattaatagagatagaactattgtgtgttaatattagcattagtcaataagttattttaatgtcagatttttgaatgttattatatattacctgtatgatggaaggattaccactgtacacaaatctaatcaataaaaacgttagaaccttc

SEQ ID NO: 928 - DNA, 993 bp, Homo sapiens
  source 1..993: mol_type = unassigned DNA
cggctgccctcgctcccaggccccgcagtctcatttgccgcttccgacgcgtgaccccggcgcgctagcgtccgggaccggtgacaggcgcggggtgcgccaagcagtcccatgtgtcccctccctctcgcagccgccgcagtcgctgcgccccgagcccctctccggctcctcaacagagggctcgccgccgccatgtctaccgcccagtcactcaaatccgtggactacgaggtgttcggaagagtgcagggtgtttgcttcagaatgtatacagaagatgaagctaggaaaataggagtggttggctgggtgaagaataccagcaaaggcaccgtgacaggccaagtgcaggggccagaagacaaagtcaattccatgaagtcctggctgagcaaggttggaagccctagttctcgcattgaccgcacaaacttttctaatgaaaaaaccatctctaagcttgaatactctaattttagtattagatactaatagaagagaaaaattgtaacacactgaacaatagatactgtatgttcttaagactatgtatactagaataatagtagcagagtagggtgaaaaggaactttctgttctgaaagctaagcgactgtacgtgctactaaaaatgtctgacactgaaataattttactcaactatgttttcaacaagcaaaaatatagtattctaagattaaaatgtcattacaaaatatttagtgtgaacatttaatttaaacttgtctcatggaatctttaatttcaatgaacattacagcatatatatgttatttggcgagacatcaaataaagttaaccatttaaaaattattttcatatactgttgtctatgttgaattataaaatcctctgaataatttgttactacggttatttgttattaaactcttcaaaaagaaccagtgattagaaataaatgtgatgatcaatataaccataaaatattatcaacaaagagttttaaaa

SEQ ID NO: 929 - DNA, 1913 bp, Homo sapiens
  source 1..1913: mol_type = unassigned DNA
attaaatggtagggagcgctgtggagacagcatcctccccagtccgggaagagaggcctaggatgcctggggcccagcggcctcttccctcctggcgtccccggctgccctcgctcccaggccccgcagtctcatttgccgcttccgacgcgtgaccccggcgcgctagcgtccgggaccggtgacaggcgcggggtgcgccaagcagtcccatgtgtcccctccctctcgcagccgccgcagtcgctgcgccccgagcccctctccggctcctcaacagagggctcgccgccgccatgtctaccgcccagtcactcaaatccgtggactacgaggtgttcggaagagtgcagggtgtttgcttcagaatgtatacagaagatgaagctaggaaaataggagtggttggctgggtgaagaataccagcaaaggcaccgtgacaggccaagtgcaggggccagaagacaaagtcaattccatgctggagtgcagtggtctgatctagactcactgcagccttgaccttctgggctcaagtgatcttcccacgtcaacctcctgagtgcacatgctggctaatttgtgtgtgtgtgtgtgtgtgtgtgtgtgtatattttgttgttgttgttgttgttgttgttgttgttgctttgtagagatagtgtctcactatgttgctcaggctggtataggactcttggcttcaaatgactttcctgcctcagcctcccaaagtgctgggattacaaaaataaactttatttttgagaacagttttatatttacagaaaaattgtgaagatagtacagagactttccatatactccccacacagttttcctcctattaacattttacattaatatgatacgtatgttaacaattaatggaccaatatggatacattagtattaactaaaatccctatttatttagatttcaatttttacctaatgtccattttatgtcttaggatcccattattgtatttgctttttaattgggcattctcttgaaattaagagaagtgacattttggctgggtgcagtggctcatgcctgtaatcccagcacttcgggaggctgaggcgggcggatcacttgaggtcaggagttcaagaccagcctgtccaacacagcgagatcgtgtctctacaaaaaatacaaaaactagctggggttggtggcacacgcctgttgtcccagctacttgggaggctgaggcaagagaatcgcttgagtctgggaggcagaggttgcaatgagatgagattgcaccaccgcactccagtctgggcaatgggagtagcctgtcccaaaaaaaataaaataaaataaaaataaagacagaagtgacatttttatgatattaaatcttcccatttaagaacacacagatgttgttccatttgcttagattttaaaatttatccttcagtatgattttatggttttctttatataggtttttgtacttttcttgctaagttatttctaagtatcttaatgactttttcactattgcatatggatttctttcccatttatgcttctagttgttcatgcttaaatatggaatatctaatgacttttgtgtattaattagatatcatagtattaccttatcagatattcttattaattctatcagttttttaaaaaactatagtctattgggtttttaaaaaatacagttatgcaattagtaaaaatggtgtatctttgtttcagtgacttcatttgtcagacctgccatgacaatgttgaataataatagccatagcaggcatgcctgtttggtttctgactttatttaaaatagttttattgtttcacctagtaaaaagatgtttgctgttggttttaggtaaatatactttatcacaataaattttacttttgcattccttg

SEQ ID NO: 930 - DNA, 5034 bp, Homo sapiens
  source 1..5034: mol_type = unassigned DNA
gcggcggcaggcctagcagcacgggaaccgtcccccgcgcgcatgcgcgcgcccctgaagcgcctgggggacgggtaggggcgggaggtaggggcgcggctccgcgtgccagttgggtgcccgcgcgtcacgtggtgaggaaggaggcggaggtctgagtttcgaaggagggggggagagaagagggaacgagcaagggaaggaaagcggggaaaggaggaaggaaacgaacgagggggagggaggtccctgttttggaggagctaggagcgttgccggcccctgaagtggagcgagagggaggtgcttcgccgtttctcctgccaggggaggtcccggcttcccgtggaggctccggaccaagccccttcagcttctccctccggatcgatgtgctgctgttaacccgtgaggaggcggcggcggcggcagcggcagcggaagatggtgttgctgagagtgttaattctgctcctctcctgggcggcggggatgggaggtcagtatgggaatcctttaaataaatatatcagacattatgaaggattatcttacaatgtggattcattacaccaaaaacaccagcgtgccaaaagagcagtctcacatgaagaccaatttttacgtctagatttccatgcccatggaagacatttcaacctacgaatgaagagggacacttcccttttcagtgatgaatttaaagtagaaacatcaaataaagtacttgattatgatacctctcatatttacactggacatatttatggtgaagaaggaagttttagccatgggtctgttattgatggaagatttgaaggattcatccagactcgtggtggcacattttatgttgagccagcagagagatatattaaagaccgaactctgccatttcactctgtcatttatcatgaagatgatattaactatccccataaatacggtcctcaggggggctgtgcagatcattcagtatttgaaagaatgaggaaataccagatgactggtgtagaggaagtaacacagatacctcaagaagaacatgctgctaatggtccagaacttctgaggaaaaaacgtacaacttcagctgaaaaaaatacttgtcagctttatattcagactgatcatttgttctttaaatattacggaacacgagaagctgtgattgcccagatatccagtcatgttaaagcgattgatacaatttaccagaccacagacttctccggaatccgtaacatcagtttcatggtgaaacgcataagaatcaatacaactgctgatgagaaggaccctacaaatcctttccgtttcccaaatattggtgtggagaagtttctggaattgaattctgagcagaatcatgatgactactgtttggcctatgtcttcacagaccgagattttgatgatggcgtacttggtctggcttgggttggagcaccttcaggaagctctggaggaatatgtgaaaaaagtaaactctattcagatggtaagaagaagtccttaaacactggaattattactgttcagaactatgggtctcatgtacctcccaaagtctctcacattacttttgctcacgaagttggacataactttggatccccacatgattctggaacagagtgcacaccaggagaatctaagaatttgggtcaaaaagaaaatggcaattacatcatgtatgcaagagcaacatctggggacaaacttaacaacaataaattctcactctgtagtattagaaatataagccaagttcttgagaagaagagaaacaactgttttgttgaatctggccaacctatttgtggaaatggaatggtagaacaaggtgaagaatgtgattgtggctatagtgaccagtgtaaagatgaatgctgcttcgatgcaaatcaaccagagggaagaaaatgcaaactgaaacctgggaaacagtgcagtccaagtcaaggtccttgttgtacagcacagtgtgcattcaagtcaaagtctgagaagtgtcgggatgattcagactgtgcaagggaaggaatatgtaatggcttcacagctctctgcccagcatctgaccctaaaccaaacttcacagactgtaataggcatacacaagtgtgcattaatgggcaatgtgcaggttctatctgtgagaaatatggcttagaggagtgtacgtgtgccagttctgatggcaaagatgataaagaattatgccatgtatgctgtatgaagaaaatggacccatcaacttgtgccagtacagggtctgtgcagtggagtaggcacttcagtggtcgaaccatcaccctgcaacctggatccccttgcaacgattttagaggttactgtgatgttttcatgcggtgcagattagtagatgctgatggtcctctagctaggcttaaaaaagcaatttttagtccagagctctatgaaaacattgctgaatggattgtggctcattggtgggcagtattacttatgggaattgctctgatcatgctaatggctggatttattaagatatgcagtgttcatactccaagtagtaatccaaagttgcctcctcctaaaccacttccaggcactttaaagaggaggagacctccacagcccattcagcaaccccagcgtcagcggccccgagagagttatcaaatgggacacatgagacgctaactgcagcttttgccttggttcttcctagtgcctacaatgggaaaacttcactccaaagagaaacctattaagtcatcatctccaaactaaaccctcacaagtaacagttgaagaaaaaatggcaagagatcatatcctcagaccaggtggaattacttaaattttaaagcctgaaaattccaatttgggggtgggaggtggaaaaggaacccaattttcttatgaacagatatttttaacttaatggcacaaagtcttagaatattattatgtgccccgtgttccctgttcttcgttgctgcattttcttcacttgcaggcaaacttggctctcaataaacttttaccacaaattgaaataaatatatttttttcaactgccaatcaaggctaggaggctcgaccacctcaacattggagacatcacttgccaatgtacataccttgttatatgcagacatgtatttcttacgtacactgtacttctgtgtgcaattgtaaacagaaattgcaatatggatgtttctttgtattataaaatttttccgctcttaattaaaaattactgtttaattgacatactcaggataacagagaatggtggtattcagtggtccaggattctgtaatgctttacacaggcagttttgaaatgaaaatcaatttacctttctgttacgatggagttggttttgatactcattttttctttatcacatggctgctacgggcacaagtgactatactgaagaacacagttaagtgttgtgcaaactggacatagcagcacatactacttcagagttcatgatgtagatgtctggtttctgcttacgtcttttaaactttctaattcaattccatttttcaattaataggtgaaattttattcatgctttgatagaaattatgtcaatgaaatgattctttttatttgtagcctacttatttgtgtttttcatatatctgaaatatgctaattatgttttctgtctgatatggaaaagaaaagctgtgtctttatcaaaatatttaaacggttttttcagcatatcatcactgatcattggtaaccactaaagatgagtaatttgcttaagtagtagttaaaattgtagataggccttctgacattttttttcctaaaatttttaacagcattgaaggtgaaacagcacaatgtcccattccaaatttatttttgaaacagatgtaaataattggcattttaaagagaaagcaaaaacatttaatgtattaacaggcttattgctatgcaggaaatagaaggggcattacaaaaattgaagcttgtgacatatttattgcttctgttttccaactacatcacttcaactagaagtaaagctatgattttcctgacttcacataggaggcaaatttagagaaagttgtaaagatttctatgttttgggtttttttttttcctttttttttttaagagtataaggtttacacaatcattctcataatgtgacgcaagccagcaaggccaaaaatgctagagaaaataacgggatctcttccttgtaaacttgtacagtatgtggtgactttttcaaaatacagctttttgtacatgatttagagacaaattttgtacatgaaaccccagatagactataaataattctaaacaaacaagtaggtagatatgtatgtaattgcttttaaatcatttaaatgcctttgtttttggactgtgcaaaggttggaagtgggtttgcatttctaaaatggtgacttttattctgcaagagttcttagtaacttcttgagtgtggtagactttggaacatgtaaattttttgcttgtaatgttatcctgtggtaggattttggcaggtacacacactgccctattttattttgagtctaagttaaatgttttctgaaaagagatacatgcactgaactctttccactgcgaatcaagatgtggtaatataaaaggatcaagacaaatgagatctaatactactgtcagttttaatgtccactgtgttttatacagtatctttttttgttcactttggaaatttttactaaaaattgcaaaaaataaagtattgtgcaaagatgtaaggttttttgaaacttgaaatgcattaataaatagacgattaaatcaacttgaaggttctatactctttgaactctgagaactatcacaagaagcttcccacaaggcagtgttttcttacagttgtctcttcctacaaaagtatagattatctttattcttaatactttggaatccatgtagaaaatttccagttagatactctgcgtacacacaataaacctttttaaaacacccaa

SEQ ID NO: 931 - DNA, 1523 bp, Homo sapiens
  source 1..1523: mol_type = unassigned DNA
gaggctccggaccaagccccttcagcttctccctccggatcgatgtgctgctgttaacccgtgaggaggcggcggcggcggcagcggcagcggaagatggtgttgctgagagtgttaattctgctcctctcctgggcggcggggatgggagaccgagattttgatgatggcgtacttggtctggcttgggttggagcaccttcaggaagctctggaggaatatgtgaaaaaagtaaactctattcagatggtaagaagaagtccttaaacactggaattattactgttcagaactatgggtctcatgtacctcccaaagtctctcacattacttttgctcacgaagttggacataactttggatccccacatgattctggaacagagtgcacaccaggagaatctaagaatttgggtcaaaaagaaaatggcaattacatcatgtatgcaagagcaacatctggggacaaacttaacaacaataaattctcactctgtagtattagaaatataagccaagttcttgagaagaagagaaacaactgttttgttgaatctggccaacctatttgtggaaatggaatggtagaacaaggtgaagaatgtgattgtggctatagtgaccagtgtaaagatgaatgctgcttcgatgcaaatcaaccagagggaagaaaatgcaaactgaaacctgggaaacagtgcagtccaagtcaaggtccttgttgtacagcacagtgtgcattcaagtcaaagtctgagaagtgtcgggatgattcagactgtgcaagggaaggaatatgtaatggcttcacagctctctgcccagcatctgaccctaaaccaaacttcacagactgtaataggcatacacaagtgtgcattaatgggcaatgtgcaggttctatctgtgagaaatatggcttagaggagtgtacgtgtgccagttctgatggcaaagatgataaagaattatgccatgtatgctgtatgaagaaaatggacccatcaacttgtgccagtacagggtctgtgcagtggagtaggcacttcagtggtcgaaccatcaccctgcaacctggatccccttgcaacgattttagaggttactgtgatgttttcatgcggtgcagattagtagatgctgatggtcctctagctaggcttaaaaaagcaatttttagtccagagctctatgaaaacattgctgaatggattgtggctcattggtgggcagtattacttatgggaattgctctgatcatgctaatggctggatttattaagatatgcagtgttcatactccaagtagtaatccaaagttgcctcctcctaaaccacttccaggcactttaaagaggaggagacctccacagcccattcagcaaccccagcgtcagcggccccgagagagttatcaaatgggacacatgagacgctaactgcagcttttgccttggttcttcctagtgcctacaatgggaaaacttcactccaaagagaaacctattaagtcatcatctcc

SEQ ID NO: 932 - DNA, 4402 bp, Homo sapiens
  source 1..4402: mol_type = unassigned DNA
atgaggctgctgcggcgctgggcgttcgcggctctgctgctgtcgctgctccccacgcccggtcttgggacccaaggtcctgctggagctctgcgatgggggggcttaccccagctgggaggcccaggagcccctgaggtcacggaacccagccgtctggttagggagagctccgggggagaggtccgaaagcagcagctggacacaagggtccgccaggagccaccagggggcccgcctgtccatctggcccaggtgagtttcgtcatcccagccttcaactcaaacttcaccctggacctggagctgaaccaccacctcctctcctcgcaatacgtggagcgccacttcagccgggaggggacaacccagcacagcaccggggctggagaccactgctactaccaggggaagctccgggggaacccgcactccttcgccgccctctccacctgccaggggctgcatggggtcttctctgatgggaacttgacttacatcgtggagccccaagaggtggctggaccttggggagcccctcagggaccccttccccacctcatttaccggacccctctcctcccagatcccctcggatgcagggaaccaggctgcctgtttgctgtgcctgcccagtcggctcctccaaaccggccgaggctgagaaggaaaaggcaggtccgccggggccaccctacagtgcacagtgaaaccaagtatgtggagctaattgtgatcaacgaccaccagctgttcgagcagatgcgacagtcggtggtcctcaccagcaactttgccaagtccgtggtgaacctggccgatgtgatatacaaggagcagctcaacactcgcatcgtcctggttgccatggaaacatgggcagatggggacaagatccaggtgcaggatgacctcctggagaccctggcccggctcatggtctaccgacgggagggtctgcctgagcccagtgatgccacccacctcttctcgggcaggaccttccagagcacgagcagcggggcagcctacgtggggggcatatgctccctgtcccacggcgggggtgtgaacgagtacggcaacatgggggcgatggccgtgacccttgcccagacgctgggacagaacctgggcatgatgtggaacaaacaccggagctcggcaggggactgcaagtgtccagacatctggctgggctgcatcatggaggacactgggttctacctgccccgcaagttctcgcgctgtagcatcgacgagtacaaccagtttctgcaggagggtggtggcagctgcctcttcaacaagcccctcaagctcctggaccccccagagtgcgggaacggcttcgtggaggcaggggaggagtgcgactgcggctcggtgcaggagtgcagccgcgcaggtggcaactgctgcaagaaatgcaccctgactcacgacgccatgtgcagcgacgggctctgctgtcgccgctgcaagtacgaaccacggggtgtgtcctgccgagaggccgtgaacgagtgcgacatcgcggagacctgcaccggggactctagccagtgcccgcctaacctgcacaagctggacggttactactgtgaccatgagcagggccgctgctacggaggtcgctgcaaaacccgggaccggcagtgccaggttctttggggccatgcggctgctgatcgcttctgctacgagaagctgaatgtggaggggacggagcgtgggagctgtgggcgcaagggatctggctgggtccagtgcagtaagcaggacgtgctgtgtggcttcctcctctgtgtcaacatctctggagctcctcggctaggggacctggtgggagacatcagtagtgtcaccttctaccaccagggcaaggagctggactgcaggggaggccacgtgcagctggcggacggctctgacctgagctatgtggaggatggcacagcctgcgggcctaacatgttgtgcctggaccatcgctgcctgccagcttctgccttcaacttcagcacctgccccggcagtggggagcgccggatttgctcccaccacggggtctgcagcaatgaagggaagtgcatctgtcagccagactggacaggcaaagactgcagtatccataaccccctgcccacgtccccacccacgggggagacggagagatataaaggtcccagcggcaccaacatcatcattggctccattgctggggctgtcctggttgcagccatcgtcctgggcggcacgggctggggatttaaaaacattcgccgaggaaggtccggaggggcctaagtgccaccctcctccctccaagcctggcacccaccgtctcggccctgaaccacgaggctgcccccatccagccacggagggaggcaccatgcaaatgtcttccaggtccaaacccttcaactcctggctccgcaggggtttgggtgggggctgtggccctgcccttggcaccaccagggtggaccaggcctggagggcacttcctccacagtcccccacccacctcctgcggctcagccttgcacacccactgccccgtgtgaatgtagcttccacctcatggattgccacagctcaactcgggggcgcctggagggatgcccccaggcagccaccagtggacctagcctggatggcccctccttgcaaccaggcagctgagaccagggtcttacctctctgggacctagggggacggggctgacatctacattttttaaaactgaatcttaatcgatgaatgtaaactcgggggtgctggggccagggcagatgtggggatgttttgacatttacaggagggcccggagaaactgaggtatggccatgccctagaccctccccaaggatgaccacacccgaagtcctgtcactgagcacagtcaggggctgggcatcccagcttgcccccgcttagccccgctgagcttggaggaagtatgagtgctgattcaaaccaaagctgcctgtgccatgcccaaggcctaggttatgggtacggcaaccacatgtcccagatcgtctccaattcgaaaacaaccgtcctgctgtccctgtcaggacacatggattttggcagggcggggggggttctagaaaatatagttcctataataaaatggcaccttccccctttcaagaagggtgattctggggccgactcagggtttaggtgccccctggtgtggcctagatgtccccacctgggccatctttctggggaggactctcccaggtagggaaggccagaggtggcccagtgcctggagggttagggtctctgcctgggatatgcaagaggaagtaggaaagggaggtctcatggatgatcctaggctgctagaagtccttaaggccccatctagtccattccactccctacccccattccagagccgagtagtaagtttacagatgtttcccccattacgtacccccacccatccctgctgcagcgagcctgagagccaggtagagccaggcacagctcctcagtcttctcacacagtcctgccggtggccttccctcatgacccttgcttgggagggtggagcactggctccttgaccctaaaaggtagctggcaggggcaagatgggggccagctacctaatggatgaaagccacaagtgaatacagttcttgtcaccagggttgccctgccctcactcggcagggagttctgacaccccagggcccgtgagctacctgcttgagcccctgtttctggggcaccttcgaggaggcgttgtggagggcatcgccccctgtttattcacaacaccctcaggggcaaacaggcctgggacccgctgacaccattttgggtagctggatgcacccgacagcagtggggtccacacactgagctccagctggcactgcccactcaagggctgagtggaggggcccctccggccagctctgctccaccagccctgcaagctgatgcagggcgggggaagggctgggtgttgcactattgctgcgctgccttaaggcatctgtcctctggtggtgcacccgtgcacacaggtacagtgcatctgggcacagcttttggatccacacctctgcacaagtgtgaatacctctgcacatatgggcgtatctgtgtgtgctcgtgtatatggggtggggaacatgagacttcctgtgaccagtccaccctggctcccagctgtctgtatcctcctgccccgccctggcgagtgcctaccctggcagaacccagggaggagtggaggctgcctctgcctgggcctccacacagcatcctgtacatacgccacctgggctgggggtggggaggcagggccaggagcatcgattaaagatcacatcctggggcttccagggagctcacaccaa

SEQ ID NO: 933 - DNA, 2876 bp, Homo sapiens
  source 1..2876: mol_type = unassigned DNA
tgctgggggtctggccacctcctctcctcgcaatacgtggagcgccacttcagccgggaggggacaacccagcacagcaccggggctggagaccactgctactaccaggggaagctccgggggaacccgcactccttcgccgccctctccacctgccaggggctgcatggggtcttctctgatgggaacttgacttacatcgtggagccccaagaggtggctggaccttggggagcccctcagggaccccttccccacctcatttaccggacccctctcctcccagatcccctcggatgcagggaaccaggctgcctgtttgctgtgcctgcccagtcggctcctccaaaccggccgaggctgagaaggaaaaggcaggtccgccggggccaccctacagtgcacagtgaaaccaagtatgtggagctaattgtgatcaacgaccaccagctgttcgagcagatgcgacagtcggtggtcctcaccagcaactttgccaagtccgtggtgaacctggccgatgtgatatacaaggagcagctcaacactcgcatcgtcctggttgccatggaaacatgggcagatggggacaagatccaggtgcaggatgacctcctggagaccctggcccggctcatggtctaccgacgggagggtctgcctgagcccagtgatgccacccacctcttctcgggcaggaccttccagagcacgagcagcggggcagcctacgtggggggcatatgctccctgtcccacggcgggggtgtgaacgagtacggcaacatgggggcgatggccgtgacccttgcccagacgctgggacagaacctgggcatgatgtggaacaaacaccggagctcggcaggggactgcaagtgtccagacatctggctgggctgcatcatggaggacactgggttctacctgccccgcaagttctcgcgctgtagcatcgacgagtacaaccagtttctgcaggagggtggtggcagctgcctcttcaacaagcccctcaagctcctggaccccccagagtgcgggaacggcttcgtggaggcaggggaggagtgcgactgcggctcggtgcaggagtgcagccgcgcaggtggcaactgctgcaagaaatgcaccctgactcacgacgccatgtgcagcgacgggctctgctgtcgccgctgcaagtacgaaccacggggtgtgtcctgccgagaggccgtgaacgagtgcgacatcgcggagacctgcaccggggactctagccagtgcccgcctaacctgcacaagctggacggttactactgtgaccatgagcagggccgctgctacggaggtcgctgcaaaacccgggaccggcagtgccaggttctttggggccatgcggctgctgatcgcttctgctacgagaagctgaatgtggaggggacggagcgtgggagctgtgggcgcaagggatctggctgggtccagtgcagtaagcagccccaacagggacgtgctgtgtggcttcctcctctgtgtcaacatctctggagctcctcggctaggggacctggtgggagacatcagtagtgtcaccttctaccaccagggcaaggagctggactgcaggggaggccacgtgcagctggcggacggctctgacctgagctatgtggaggatggcacagcctgcgggcctaacatgttgtgcctggaccatcgctgcctgccagcttctgccttcaacttcagcacctgccccggcagtggggagcgccggatttgctcccaccacggggtctgcagcaatgaagggaagtgcatctgtcagccagactggacaggcaaagactgcagtatccataaccccctgcccacgtccccacccacgggggagacggagagatataaaggtcccagcggcaccaacatcatcattggctccattgctggggctgtcctggttgcagccatcgtcctgggcggcacgggctggggatttaaaaacattcgccgaggaaggtccggaggggcctaagtgccaccctcctccctccaagcctggcacccaccgtctcggccctgaaccacgaggctgcccccatccagccacggagggaggcaccatgcaaatgtcttccaggtccaaacccttcaactcctggctccgcaggggtttgggtgggggctgtggccctgcccttggcaccaccagggtggaccaggcctggagggcacttcctccacagtcccccacccacctcctgcggctcagccttgcacacccactgccccgtgtgaatgtagcttccacctcatggattgccacagctcaactcgggggcgcctggagggatgcccccaggcagccaccagtggacctagcctggatggcccctccttgcaaccaggcagctgagaccagggtcttacctctctgggacctagggggacggggctgacatctacattttttaaaactgaatcttaatcgatgaatgtaaactcgggggtgctggggccagggcagatgtggggatgttttgacatttacaggagggcccggagaaactgaggtatggccatgccctagaccctccccaaggatgaccacacccgaagtcctgtcactgagcacagtcaggggctgggcatcccagcttgcccccgcttagccccgctgagcttggaggaagtatgagtgctgattcaaaccaaagctgcctgtgccatgcccaaggcctaggttatgggtacggcaaccacatgtcccagatcgtctccaattcgaaaacaaccgtcctgctgtccctgtcaggacacatggattttggcagggcggggggggttctagaaaatatagttcctataataaaatggcaccttcccccttt

SEQ ID NO: 934 - DNA, 2529 bp, Homo sapiens
  source 1..2529: mol_type = unassigned DNA
gctgctgcagccaccttttcctgcagtgctcggggtgacagccggtccggagcgcgggagggtaggggagcgggagaggagggaaggtgcgtccacccacctgtccccagctggccgggcccaccgcgtccctgcccctgccgccgaccggccagctctgcaggtcttgggacccaaggtcctgctggagctctgcgatgggggggcttaccccagctgggaggcccaggagcccctgaggtcacggaacccagccgtctggttagggagagctccgggggagaggtccgaaagcagcagctggacacaagggtccgccaggagccaccagggggcccgcctgtccatctggcccaggtgagtttcgtcatcccagccttcaactcaaacttcaccctggacctggagctgaaccaccacctcctctcctcgcaatacgtggagcgccacttcagccgggaggggacaacccagcacagcaccggggctggagaccactgctactaccaggggaagctccgggggaacccgcactccttcgccgccctctccacctgccaggggctgcatggggtcttctctgatgggaacttgacttacatcgtggagccccaagaggtggctggaccttggggagcccctcagggaccccttccccacctcatttaccggacccctctcctcccagatcccctcggatgcagggaaccaggctgcctgtttgctgtgcctgcccagtcggctcctccaaaccggccgaggctgagaaggaaaaggtccgccggggccaccctacagtgcacagtgaaaccaagtatgtggagctaattgtgatcaacgaccaccagctgttcgagcagatgcgacagtcggtggtcctcaccagcaactttgccaagtccgtggtgaacctggccgatgtgatatacaaggagcagctcaacactcgcatcgtcctggttgccatggaaacatgggcagatggggacaagatccaggtgcaggatgacctcctggagaccctggcccggctcatggtctaccgacgggagggtctgcctgagcccagtgatgccacccacctcttctcgggcaggaccttccagagcacgagcagcggggcagcctacgtggggggcatatgctccctgtcccacggcgggggtgtgaacgagtacggcaacatgggggcgatggccgtgacccttgcccagacgctgggacagaacctgggcatgatgtggaacaaacaccggagctcggcaggggactgcaagtgtccagacatctggctgggctgcatcatggaggacactgggttctacctgccccgcaagttctcgcgctgtagcatcgacgagtacaaccagtttctgcaggagggtggtggcagctgcctcttcaacaagcccctcaagctcctggaccccccagagtgcgggaacggcttcgtggaggcaggggaggagtgcgactgcggctcggtgcaggagtgcagccgcgcaggtggcaactgctgcaagaaatgcaccctgactcacgacgccatgtgcagcgacgggctctgctgtcgccgctgcaagtacgaaccacggggtgtgtcctgccgagaggccgtgaacgagtgcgacatcgcggagacctgcaccggggactctagccagtgcccgcctaacctgcacaagctggacggttactactgtgaccatgagcagggccgctgctacggaggtcgctgcaaaacccgggaccggcagtgccaggttctttggggccatgcggctgctgatcgcttctgctacgagaagctgaatgtggaggggacggagcgtgggagctgtgggcgcaagggatctggctgggtccagtgcagtaagcaggacgtgctgtgtggcttcctcctctgtgtcaacatctctggagctcctcggctaggggacctggtgggagacatcagtagtgtcaccttctaccaccagggcaaggagctggactgcaggggaggccacgtgcagctggcggacggctctgacctgagctatgtggaggatggcacagcctgcgggcctaacatgttgtgcctggaccatcgctgcctgccagcttctgccttcaacttcagcacctgccccggcagtggggagcgccggatttgctcccaccacggggtctgcagcaatgaagggaagtgcatctgtcagccagactggacaggcaaagactgcagtatccataaccccctgcccacgtccccacccacgggggagacggagagatataaaggtcccagcggcaccaacatcatcattggctccattgctggggctgtcctggttgcagccatcgtcctgggcggcacgggctggggatttaaaaacattcgccgaggaaggtccggaggggcctaagtgccaccctcctccctccaagcctggcacccaccgtctcggccctgaaccacgaggctgcccccatccagccacggagggaggcaccatgcaaatgtcttccaggtccaaacccttcaac

SEQ ID NO: 935 - DNA, 3313 bp, Homo sapiens
  source 1..3313: mol_type = unassigned DNA
cactaacgctcttcctagtccccgggccaactcggacagtttgctcatttattgcaacggtcaaggctggcttgtgccagaacggcgcgcgcgcgcgcacgcacgcacacacacggggggaaacttttttaaaaatgaaaggctagaagagctcagcggcggcgcgggcgctgcgcgagggctccggagctgactcgccgaggcaggaaatccctccggtcgcgacgcccggccccggctcggcgcccgcgtgggatggtgcagcgctcgccgccgggcccgagagctgctgcactgaaggccggcgacgatggcagcgcgcccgctgcccgtgtcccccgcccgcgccctcctgctcgccctggccggtgctctgctcgcgccctgcgaggcccgaggggtgagcttatggaaccaaggaagagctgatgaagttgtcagtgcctctgttgggagtggggacctctggatcccagtgaagagcttcgactccaagaatcatccagaagtgctgaatattcgactacaacgggaaagcaaagaactgatcataaatctggaaagaaatgaaggtctcattgccagcagtttcacggaaacccactatctgcaagacggtactgatgtctccctcgctcgaaattacacggtaattctgggtcactgttactaccatggacatgtacggggatattctgattcagcagtcagtctcagcacgtgttctggtctcaggggacttattgtgtttgaaaatgaaagctatgtcttagaaccaatgaaaagtgcaaccaacagatacaaactcttcccagcgaagaagctgaaaagcgtccggggatcatgtggatcacatcacaacacaccaaacctcgctgcaaagaatgtgtttccaccaccctctcagacatgggcaagaaggcataaaagagagaccctcaaggcaactaagtatgtggagctggtgatcgtggcagacaaccgagagtttcagaggcaaggaaaagatctggaaaaagttaagcagcgattaatagagattgctaatcacgttgacaagttttacagaccactgaacattcggatcgtgttggtaggcgtggaagtgtggaatgacatggacaaatgctctgtaagtcaggacccattcaccagcctccatgaatttctggactggaggaagatgaagcttctacctcgcaaatcccatgacaatgcgcagcttgtcagtggggtttatttccaagggaccaccatcggcatggccccaatcatgagcatgtgcacggcagaccagtctgggggaattgtcatggaccattcagacaatccccttggtgcagccgtgaccctggcacatgagctgggccacaatttcgggatgaatcatgacacactggacaggggctgtagctgtcaaatggcggttgagaaaggaggctgcatcatgaacgcttccaccgggtacccatttcccatggtgttcagcagttgcagcaggaaggacttggagaccagcctggagaaaggaatgggggtgtgcctgtttaacctgccggaagtcagggagtctttcgggggccagaagtgtgggaacagatttgtggaagaaggagaggagtgtgactgtggggagccagaggaatgtatgaatcgctgctgcaatgccaccacctgtaccctgaagccggacgctgtgtgcgcacatgggctgtgctgtgaagactgccagctgaagcctgcaggaacagcgtgcagggactccagcaactcctgtgacctcccagagttctgcacaggggccagccctcactgcccagccaacgtgtacctgcacgatgggcactcatgtcaggatgtggacggctactgctacaatggcatctgccagactcacgagcagcagtgtgtcacgctctggggaccaggtgctaaacctgcccctgggatctgctttgagagagtcaattctgcaggtgatccttatggcaactgtggcaaagtctcgaagagttcctttgccaaatgcgagatgagagatgctaaatgtggaaaaatccagtgtcaaggaggtgccagccggccagtcattggtaccaatgccgtttccatagaaacaaacatccccctgcagcaaggaggccggattctgtgccgggggacccacgtgtacttgggcgatgacatgccggacccagggcttgtgcttgcaggcacaaagtgtgcagatggaaaaatctgcctgaatcgtcaatgtcaaaatattagtgtctttggggttcacgagtgtgcaatgcagtgccacggcagaggggtgtgcaacaacaggaagaactgccactgcgaggcccactgggcacctcccttctgtgacaagtttggctttggaggaagcacagacagcggccccatccggcaagcagaagcaaggcaggaagctgcagagtccaacagggagcgcggccagggccaggagcccgtgggatcgcaggagcatgcgtctactgcctcactgacactcatctgagccctcccatgacatggagaccgtgaccagtgctgctgcagaggaggtcacgcgtccccaaggcctcctgtgactggcagcattgactctgtggctttgccatcgtttccatgacaacagacacaacacagttctcggggctcaggaggggaagtccagcctaccaggcacgtctgcagaaacagtgcaaggaagggcagcgacttcctggttgagcttctgctaaaacatggacatgcttcagtgctgctcctgagagagtagcaggttaccactctggcaggccccagccctgcagcaaggaggaagaggactcaaaagtctggcctttcactgagcctccacagcagtgggggagaagcaagggttgggcccagtgtcccctttccccagtgacacctcagccttggcagccctgatgactggtctctggctgcaacttaatgctctgatatggcttttagcatttattatatgaaaatagcagggttttagtttttaatttatcagagaccctgccacccattccatctccatccaagcaaactgaatggcaatgaaacaaactggagaagaaggtaggagaaagggcggtgaactctggctctttgctgtggacatgcgtgaccagcagtactcaggtttgagggtttgcagaaagccagggaacccacagagtcaccaacccttcatttaacaagtaagaatgttaaaaagtgaaaacaatgtaagagcctaactccatcccccgtggccattactgcataaaatagagtgcatttgaaa

SEQ ID NO: 936 - DNA, 7938 bp, Homo sapiens
  source 1..7938: mol_type = unassigned DNA
cactaacgctcttcctagtccccgggccaactcggacagtttgctcatttattgcaacggtcaaggctggcttgtgccagaacggcgcgcgcgcgcgcacgcacgcacacacacggggggaaacttttttaaaaatgaaaggctagaagagctcagcggcggcgcgggcgctgcgcgagggctccggagctgactcgccgaggcaggaaatccctccggtcgcgacgcccggccccggctcggcgcccgcgtgggatggtgcagcgctcgccgccgggcccgagagctgctgcactgaaggccggcgacgatggcagcgcgcccgctgcccgtgtcccccgcccgcgccctcctgctcgccctggccggtgctctgctcgcgccctgcgaggcccgaggggtgagcttatggaaccaaggaagagctgatgaagttgtcagtgcctctgttgggagtggggacctctggatcccagtgaagagcttcgactccaagaatcatccagaagtgctgaatattcgactacaacgggaaagcaaagaactgatcataaatctggaaagaaatgaaggtctcattgccagcagtttcacggaaacccactatctgcaagacggtactgatgtctccctcgctcgaaattacacggtaattctgggtcactgttactaccatggacatgtacggggatattctgattcagcagtcagtctcagcacgtgttctggtctcaggggacttattgtgtttgaaaatgaaagctatgtcttagaaccaatgaaaagtgcaaccaacagatacaaactcttcccagcgaagaagctgaaaagcgtccggggatcatgtggatcacatcacaacacaccaaacctcgctgcaaagaatgtgtttccaccaccctctcagacatgggcaagaaggcataaaagagagaccctcaaggcaactaagtatgtggagctggtgatcgtggcagacaaccgagagtttcagaggcaaggaaaagatctggaaaaagttaagcagcgattaatagagattgctaatcacgttgacaagttttacagaccactgaacattcggatcgtgttggtaggcgtggaagtgtggaatgacatggacaaatgctctgtaagtcaggacccattcaccagcctccatgaatttctggactggaggaagatgaagcttctacctcgcaaatcccatgacaatgcgcagcttgtcagtggggtttatttccaagggaccaccatcggcatggccccaatcatgagcatgtgcacggcagaccagtctgggggaattgtcatggaccattcagacaatccccttggtgcagccgtgaccctggcacatgagctgggccacaatttcgggatgaatcatgacacactggacaggggctgtagctgtcaaatggcggttgagaaaggaggctgcatcatgaacgcttccaccgggtacccatttcccatggtgttcagcagttgcagcaggaaggacttggagaccagcctggagaaaggaatgggggtgtgcctgtttaacctgccggaagtcagggagtctttcgggggccagaagtgtgggaacagatttgtggaagaaggagaggagtgtgactgtggggagccagaggaatgtatgaatcgctgctgcaatgccaccacctgtaccctgaagccggacgctgtgtgcgcacatgggctgtgctgtgaagactgccagctgaagcctgcaggaacagcgtgcagggactccagcaactcctgtgacctcccagagttctgcacaggggccagccctcactgcccagccaacgtgtacctgcacgatgggcactcatgtcaggatgtggacggctactgctacaatggcatctgccagactcacgagcagcagtgtgtcacgctctggggaccaggtgctaaacctgcccctgggatctgctttgagagagtcaattctgcaggtgatccttatggcaactgtggcaaagtctcgaagagttcctttgccaaatgcgagatgagagatgctaaatgtggaaaaatccagtgtcaaggaggtgccagccggccagtcattggtaccaatgccgtttccatagaaacaaacatccccctgcagcaaggaggccggattctgtgccgggggacccacgtgtacttgggcgatgacatgccggacccagggcttgtgcttgcaggcacaaagtgtgcagatggaaaaatctgcctgaatcgtcaatgtcaaaatattagtgtctttggggttcacgagtgtgcaatgcagtgccacggcagaggggtgtgcaacaacaggaagaactgccactgcgaggcccactgggcacctcccttctgtgacaagtttggctttggaggaagcacagacagcggccccatccggcaagcagataaccaaggtttaaccataggaattctggtgaccatcctgtgtcttcttgctgccggatttgtggtttatctcaaaaggaagaccttgatacgactgctgtttacaaataagaagaccaccattgaaaaactaaggtgtgtgcgcccttcccggccaccccgtggcttccaaccctgtcaggctcacctcggccaccttggaaaaggcctgatgaggaagccgccagattcctacccaccgaaggacaatcccaggagattgctgcagtgtcagaatgttgacatcagcagacccctcaacggcctgaatgtccctcagccccagtcaactcagcgagtgcttcctcccctccaccgggctccacgtgcacctagcgtccctgccagacccctgccagccaagcctgcacttaggcaggcccaggggacctgtaagccaaacccccctcagaagcctctgcctgcagatcctctggccagaacaactcggctcactcatgccttggccaggaccccaggacaatgggagactgggctccgcctggcacccctcagacctgctccacaatatccacaccaagtgcccagatccacccacaccgcctatattaagtgagaagccgacaccttttttcaacagtgaagacagaagtttgcactatctttcagctccagttggagttttttgtaccaacttttaggattttttttaatgtttaaaacatcattactataagaactttgagctactgccgtcagtgctgtgctgtgctatggtgctctgtctacttgctcaggtacttgtaaattattaatttatgcagaatgttgattacagtgcagtgcgctgtagtaggcatttttaccatcactgagttttccatggcaggaaggcttgttgtgcttttagtattttagtgaacttgaaatatcctgcttgatgggattctggacaggatgtgtttgctttctgatcaaggccttattggaaagcagtcccccaactacccccagctgtgcttatggtaccagatgcagctcaagagatcccaagtagaatctcagttgattttctggattccccatctcaggccagagccaaggggcttcaggtccaggctgtgtttggctttcagggaggccctgtgccccttgacaactggcaggcaggctcccagggacacctgggagaaatctggcttctggccaggaagctttggtgagaacctgggttgcagacaggaatcttaaggtgtagccacaccaggatagagactggaacactagacaagccagaacttgaccctgagctgaccagccgtgagcatgtttggaaggggtctgtagtgtcactcaaggcggtgcttgatagaaatgccaagcacttctttttctcgctgtcctttctagagcactgccaccagtaggttatttagcttgggaaaggtggtgtttctgtaagaaacctactgcccaggcactgcaaaccgccacctccctatactgcttggagctgagcaaatcaccacaaactgtaatacaatgatcctgtattcagacagatgaggctttccatgggaccacaactattttcagatgtgaaccattaaccagatctagtcaatcaagtctgtttactgcaaggttcaacttattaacaattaggcagactctttatgcttgcaaaaactacaaccaatggaatgtgatgttcatgggtatagttcatgtctgctatcattattcgtagatattggacaaagaaccttctctatggggcatcctctttttccaacttggctgcaggaatctttaaaagatgcttttaacagagtctgaacctatttcttaaacacttgcaacctacctgttgagcatcacagaatgtgataaggaaatcaacttgcttatcaacttcctaaatattatgagatgctggcttgggcagcatccccttgaactcttcactcttcaaatgcctgactagggagccatgtttcacaaggtctttaaagtgactaatggcatgagaaatacaaaaatactcagataaggtaaaatgccatgatgcctctgtcttctggactggttttcacattagaagacaattgacaacagttacataattcactctgagtgttttatgagaaagccttcttttgggggtcaacagttttcctatgctttgaaacagaaaaatatgtaccaagaatcttggtttgccttccagaaaacaaaactgcatttcactttcccggtgttccccactgtatctaggcaacatagtattcatgactatggataaactaaacacgtgacacaaacacacacaaaagggaacccagctctaatacattccaactcgtatagcatgcatctgtttattctatagttattaagttctttaaaatgtaaagccatgctggaaaataatactgctgagatacatacagaattactgtaactgattacacttggtaattgtactaaagccaaacatatatatactattaaaaaggtttacagaattttatggtgcattacgtgggcattgtctttttagatgcccaaatccttagatctggcatgttagcccttcctccaattataagaggatatgaactgagtttttcttttgttgtttgttcttagctgtaattcctatgcttctatttcagagagccaggagagtttgatattaaaggaggttaaaactgtgatcttatgccatgtcatcaatggccacttaggggccatggctgatgacacattcttatctctacagtactaatgtgttattatagagccatgcattttatttctgaataagaacatatttaaactaatattcccttacaatatggacagtattaatccttccaagatgcagtatttatcaagtgaagcatatttagcagcaaattccattttaacataacttaggaaccaataaccagggtgttttgtggttgggggaggcacggggtggagtattcttttttatatcctcaaaacaaaaaaaatcaatacttatatttcaatggcaatctagtatttttttaaaagactgtataggcatgaataatagaggtggtttgagttttgtagggccatcacctggaaagtcaatgtgactagacacaaagtagcccagaggctacttttcttcctacagcttattatagttgtaggttctatgacctcacttcatgggttccaggcaattccgctgaaaggtttgtctcctgaaattttttaagtttgttttcctgacacatgtaatcagatgtgtagcaaccgagggaaacgaagcctaacattctccattgtggaaatacacacaggaggttacatttcacagcgtggatttttccagcttacacatgtgggatgacatcacagaaaccacaaaagcagcaaattaaactgtaggagagtcaatactcctgacgagtctcggggggggggcatttttatgccttcttaactttatgagaattctcaggctgaactataggccattgttcccaggcaaatcaatacatcaatgcatcctcaaaaaaaaaaaaaaaaaaaaaaaaccggctaaaactgtgtcaaaatgttcttaaggagcctatggtctccacggtgctaaaaagagcctggtgctgggccgactggcagggctgagcatcctcctgccccctcgccactgatgtttactaagcactctgagccaatgagacccccagcagcagaaagggcacaaggtggcgccagggcagcagggccagatctttctcatgcacctcgacctcttgcagactttcttcgtgagatgtactactcatttcaaaactgctttgcagggctcccctatgtattcggggggcccacggcacactcaggctggagatccttcctcactgcgctcaagatggcctcagccagacaccagttacccagctgaaagtcacaatccctcccagaagtctcccaacactagtgctgaccagaggtggggctctcaggctaggagtttcacacacaatgacaggctgctgggggacattgcaggaccccttttcctctcctctccatgctagaagccagccctaggcagctgcagttactccctgtgactcagcagcaggctgattcaacacagctgcccacacaaagccagtggctaatacatctgtttacctttccctatcacccagacacaagcccctttcccaggtcaaaccacaggccgatgcatctccagtttgacagtcaaatcactacttccattgctactttagatcagccaaagtggtgactgctgcagtgtgtggctatccctacaaggcccacccaagggatgcccaaagcccaaccttctccagggctgcagcccagagcaaccccaccagcctaagtccagcagaggacctcccacccaatgtcttgttctaattagaaggggaagttagccacagaaaatcaacttatctataattacaaaattctcttgactcaccttaaagttcctattgacatctactgcttttaaacctatttgaaaactctgatactaaaacaaatgacactctaagaaagtttgggagccccatgctgagaaccatttctgtgcagtgaggatgtttccagaagctacttacctacatgtgaatgtgccattttctttccttttgtagagaaaatcccctttactttttggaacagtaatggcagcttctagtacagccattacagtttcatatgagaaaaattaagaataactataaaattgttaaaatatccaataatggataatgatggccagaagatttaacatacaaagtaattctcaatgtaaagctattcagctcttccaggttgaatgccctgtaacccaccctgaccttccacatcatcttcaaaaagcagtttctctgttccccatgattctcctataaggtaactctttagtcctccatttagcacattttaaatcctccaaagaataagtatcatgtgattattttagctttacaaaaaaaaagttgaatggcgttttattttcatggcctataagcaggtaccttagtagggcagatataggaaaaacaaattagagcaaaacaaatcctctacaaatccaaggcaggaaaagtggtggcagagtgactcattctcctgtccctcccatcaggtcaaatcaggaggctgcagtgaatgcctgttctttgaatgtgtagcagttgttcctgtaactctttaaaacttggctataggctgtttagcacagtacagattaaagatacagttacgtaaacagcaaagtaattttatagtgcttcatccatttatcatgctttggtttgctaattttttcacatacctttttctatcacagtctgttgcttttgtacacatttctcatattggggttcgacaggtaaacacaaactgctatttcagtagaaaaagttattgttatgaatattaaacccaataaattgtataaaggtaaatatcaatgtg

SEQ ID NO: 937 - DNA, 1145 bp, Homo sapiens
  source 1..1145: mol_type = unassigned DNA
cactaacgctcttcctagtccccgggccaactcggacagtttgctcatttattgcaacggtcaaggctggcttgtgccagaacggcgcgcgcgcgcgcacgcacgcacacacacggggggaaacttttttaaaaatgaaaggctagaagagctcagcggcggcgcgggcgctgcgcgagggctccggagctgactcgccgaggcaggaaatccctccggtcgcgacgcccggccccggctcggcgcccgcgtgggatggtgcagcgctcgccgccgggcccgagagctgctgcactgaaggccggcgacgatggcagcgcgcccgctgcccgtgtcccccgcccgcgccctcctgctcgccctggccggtgctctgctcgcgccctgcgaggcccgaggggtgagcttatggaaccaaggaagagctgatgaagttgtcagtgcctctgttgggagtggggacctctggatcccagtgaagagcttcgactccaagaatcatccagaagtgctgaatattcgactacaacgggaaagcaaagaactgatcataaatctggaaagaaatgaaggtctcattgccagcagtttcacggaaacccactatctgcaagacggtactgatgtctccctcgctcgaaattacacgggtcactgttactaccatggacatgtacggggatattctgattcagcagtcagtctcagcacgtgttctggtctcaggggacttattgtgtttgaaaatgaaagctatgtcttagaaccaatgaaaagtgcaaccaacagatacaaactcttcccagcgaagaagctgaaaagcgtccggggatcatgtggatcacatcacaacacaccaaacctcgctgcaaagaatgtgtttccaccaccctctcagacatgggcaagaaggcataaaagagagaccctcaaggcaactaagtatgtggagctggtgatcgtggcagacaaccgagagtttcagaggcaaggaaaagatctggaaaaagttaagcagcgattaatagagattgctaatcacgttgacaagttttacagaccactgaacattcggatcgtgttggtaggcgtggaagtgtggaatgacatggacaaatgctctgtaagtcaggacccattcacca

SEQ ID NO: 938 - DNA, 2799 bp, Homo sapiens
  source 1..2799: mol_type = unassigned DNA
ccgaggcgacctggccgccggccgctcctccgcgcgctgttccgcacttgctgccctcgcccggcccggagcgccgctgccatgcggctggcgctgctctgggccctggggctcctgggcgcgggcagccctctgccttcctggccgctcccaaatataggtggcactgaggagcagcaggcagagtcagagaaggccccgagggagcccttggagccccaggtccttcaggacgatctcccaattagcctcaaaaaggtgcttcagaccagtctgcctgagcccctgaggatcaagttggagctggacggtgacagtcatatcctggagctgctacagaatagggagttggtcccaggccgcccaaccctggtgtggtaccagcccgatggcactcgggtggtcagtgagggacacactttggagaactgctgctaccagggaagagtgcggggatatgcaggctcctgggtgtccatctgcacctgctctgggctcagaggcttggtggtcctgaccccagagagaagctataccctggagcaggggcctggggaccttcagggtcctcccattatttcgcgaatccaagatctccacctgccaggccacacctgtgccctgagctggcgggaatctgtacacactcagaagccaccagagcaccccctgggacagcgccacattcgccggaggcgggatgtggtaacagagaccaagactgtggagttggtgattgtggctgatcactcggaggcccagaaataccgggacttccagcacctgctaaaccgcacactggaagtggccctcttgctggacacattcttccggcccctgaatgtacgagtggcactagtgggcctggaggcctggacccagcgtgacctggtggagatcagcccaaacccagctgtcaccctcgaaaacttcctccactggcgcagggcacatttgctgcctcgattgccccatgacagtgcccagctggtgactggtacttcattctctgggcctacggtgggcatggccattcagaactccatctgttctcctgacttctcaggaggtgtgaacatggaccactccaccagcatcctgggagtcgcctcctccatagcccatgagttgggccacagcctgggcctggaccatgatttgcctgggaatagctgcccctgtccaggtccagccccagccaagacctgcatcatggaggcctccacagacttcctaccaggcctgaacttcagcaactgcagccgacgggccctggagaaagccctcctggatggaatgggcagctgcctcttcgaacggctgcctagcctaccccctatggctgctttctgcggaaatatgtttgtggagccgggcgagcagtgtgactgtggcttcctggatgactgcgtcgatccctgctgtgattctttgacctgccagctgaggccaggtgcacagtgtgcatctgacggaccctgttgtcaaaattgccagctgcgcccgtctggctggcagtgtcgtcctaccagaggggattgtgacttgcctgaattctgcccaggagacagctcccagtgtccccctgatgtcagcctaggggatggcgagccctgcgctggcgggcaagctgtgtgcatgcacgggcgttgtgcctcctatgcccagcagtgccagtcactttggggacctggagcccagcccgctgcgccactttgcctccagacagctaatactcggggaaatgcttttgggagctgtgggcgcaaccccagtggcagttatgtgtcctgcacccctagagatgccatttgtgggcagctccagtgccagacaggtaggacccagcctctgctgggctccatccgggatctactctgggagacaatagatgtgaatgggactgagctgaactgcagctgggtgcacctggacctgggcagtgatgtggcccagcccctcctgactctgcctggcacagcctgtggccctggcctggtgtgtatagaccatcgatgccagcgtgtggatctcctgggggcacaggaatgtcgaagcaaatgccatggacatggggtctgtgacagcaacaggcactgctactgtgaggagggctgggcaccccctgactgcaccactcagctcaaagcaaccagctccctgaccacagggctgctcctcagcctcctggtcttattggtcctggtgatgcttggtgccagctactggtaccgtgcccgcctgcaccagcgactctgccagctcaagggacccacctgccagtacagggcagcccaatctggtccctctgaacggccaggacctccgcagagggccctgctggcacgaggcactaagtctcaggggccagccaagcccccacccccaaggaagccactgcctgccgacccccagggccggtgcccatcgggtgacctgcccggcccaggggctggaatcccgcccctagtggtaccctccagaccagcgccaccgcctccgacagtgtcctcgctctacctctgacctctccggaggttccgctgcctccaagccggacttagggcttcaagaggcgggcgtgccctctggagtcccctaccatgactgaaggcgccagagactggcggtgtcttaagactccgggcaccgccacgcgctgtcaagcaacactctgcggacctgccggcgtagttgcagcgggggcttggggaggggctgggggttggacgggattgaggaaggtccgcacagcctgtctctgctcagttgcaataaacgtgacatcttgggagcgtt

SEQ ID NO: 939 - DNA, 2877 bp, Homo sapiens
  source 1..2877: mol_type = unassigned DNA
gcgcggcgctgctgggttctccgaggcgacctggccgccggccgctcctccgcgcgctgttccgcacttgctgccctcgcccggcccggagcgccgctgccatgcggctggcgctgctctgggccctggggctcctgggcgcgggcagccctctgccttcctggccgctcccaaatataggtggcactgaggagcagcaggcagagtcagagaaggccccgagggagcccttggagccccaggtccttcaggacgatctcccaattagcctcaaaaaggtgcttcagaccagtctgcctgagcccctgaggatcaagttggagctggacggtgacagtcatatcctggagctgctacagaatagggagttggtcccaggccgcccaaccctggtgtggtaccagcccgatggcactcgggtggtcagtgagggacacactttggagaactgctgctaccagggaagagtgcggggatatgcaggctcctgggtgtccatctgcacctgctctgggctcagaggcttggtggtcctgaccccagagagaagctataccctggagcaggggcctggggaccttcagggtcctcccattatttcgcgaatccaagatctccacctgccaggccacacctgtgccctgagctggcgggaatctgtacacactcagaagccaccagagcaccccctgggacagcgccacattcgccggaggcgggatgtggtaacagagaccaagactgtggagttggtgattgtggctgatcactcggaggcccagaaataccgggacttccagcacctgctaaaccgcacactggaagtggccctcttgctggacacattcttccggcccctgaatgtacgagtggcactagtgggcctggaggcctggacccagcgtgacctggtggagatcagcccaaacccagctgtcaccctcgaaaacttcctccactggcgcagggcacatttgctgcctcgattgccccatgacagtgcccagctggtgactggtacttcattctctgggcctacggtgggcatggccattcagaactccatctgttctcctgacttctcaggaggtgtgaacatggaccactccaccagcatcctgggagtcgcctcctccatagcccatgagttgggccacagcctgggcctggaccatgatttgcctgggaatagctgcccctgtccaggtccagccccagccaagacctgcatcatggaggcctccacagacttcctaccaggcctgaacttcagcaactgcagccgacgggccctggagaaagccctcctggatggaatgggcagctgcctcttcgaacggctgcctagcctaccccctatggctgctttctgcggaaatatgtttgtggagccgggcgagcagtgtgactgtggcttcctggatgactgcgtcgatccctgctgtgattctttgacctgccagctgaggccaggtgcacagtgtgcatctgacggaccctgttgtcaaaattgccagctgcgcccgtctggctggcagtgtcgtcctaccagaggggattgtgacttgcctgaattctgcccaggagacagctcccagtgtccccctgatgtcagcctaggggatggcgagccctgcgctggcgggcaagctgtgtgcatgcacgggcgttgtgcctcctatgcccagcagtgccagtcactttggggacctggagcccagcccgctgcgccactttgcctccagacagctaatactcggggaaatgcttttgggagctgtgggcgcaaccccagtggcagttatgtgtcctgcacccctagagatgccatttgtgggcagctccagtgccagacaggtaggacccagcctctgctgggctccatccgggatctactctgggagacaatagatgtgaatgggactgagctgaactgcagctgggtgcacctggacctgggcagtgatgtggcccagcccctcctgactctgcctggcacagcctgtggccctggcctggtgtgtatagaccatcgatgccagcgtgtggatctcctgggggcacaggaatgtcgaagcaaatgccatggacatggggtctgtgacagcaacaggcactgctactgtgaggagggctgggcaccccctgactgcaccactcagctcaaagcaaccagctccctgaccacagggctgctcctcagcctcctggtcttattggtcctggtgatgcttggtgccagctactggtaccgtgcccgcctgcaccagcgactctgccagctcaagggacccacctgccagtacagggcagcccaatctggtccctctgaacggccaggacctccgcagagggccctgctggcacgaggcactaagcaggctagtgctctcagcttcccggcccccccttccaggccgctgccgcctgaccctgtgtccaagagactccagtctcaggggccagccaagcccccacccccaaggaagccactgcctgccgacccccagggccggtgcccatcgggtgacctgcccggcccaggggctggaatcccgcccctagtggtaccctccagaccagcgccaccgcctccgacagtgtcctcgctctacctctgacctctccggaggttccgctgcctccaagccggacttagggcttcaagaggcgggcgtgccctctggagtcccctaccatgactgaaggcgccagagactggcggtgtcttaagactccgggcaccgccacgcgctgtcaagcaacactctgcggacctgccggcgtagttgcagcgggggcttggggaggggctgggggttggacgggattgaggaaggtccgcacagcctgtctctgctcagttgcaataaacgt

SEQ ID NO: 940 - DNA, 2949 bp, Homo sapiens
  source 1..2949: mol_type = unassigned DNA
gcgcggcgctgctgggttctccgaggcgacctggccgccggccgctcctccgcgcgctgttccgcacttgctgccctcgcccggcccggagcgccgctgccatgcggctggcgctgctctgggccctggggctcctgggcgcgggcagccctctgccttcctggccgctcccaaatataggtggcactgaggagcagcaggcagagtcagagaaggccccgagggagcccttggagccccaggtccttcaggacgatctcccaattagcctcaaaaaggtgcttcagaccagtctgcctgagcccctgaggatcaagttggagctggacggtgacagtcatatcctggagctgctacagaatagggagttggtcccaggccgcccaaccctggtgtggtaccagcccgatggcactcgggtggtcagtgagggacacactttggagaactgctgctaccagggaagagtgcggggatatgcaggctcctgggtgtccatctgcacctgctctgggctcagaggcttggtggtcctgaccccagagagaagctataccctggagcaggggcctggggaccttcagggtcctcccattatttcgcgaatccaagatctccacctgccaggccacacctgtgccctgagctggcgggaatctgtacacactcagaagccaccagagcaccccctgggacagcgccacattcgccggaggcgggatgtggtaacagagaccaagactgtggagttggtgattgtggctgatcactcggaggcccagaaataccgggacttccagcacctgctaaaccgcacactggaagtggccctcttgctggacacattcttccggcccctgaatgtacgagtggcactagtgggcctggaggcctggacccagcgtgacctggtggagatcagcccaaacccagctgtcaccctcgaaaacttcctccactggcgcagggcacatttgctgcctcgattgccccatgacagtgcccagctggtgactggtacttcattctctgggcctacggtgggcatggccattcagaactccatctgttctcctgacttctcaggaggtgtgaacatggaccactccaccagcatcctgggagtcgcctcctccatagcccatgagttgggccacagcctgggcctggaccatgatttgcctgggaatagctgcccctgtccaggtccagccccagccaagacctgcatcatggaggcctccacagacttcctaccaggcctgaacttcagcaactgcagccgacgggccctggagaaagccctcctggatggaatgggcagctgcctcttcgaacggctgcctagcctaccccctatggctgctttctgcggaaatatgtttgtggagccgggcgagcagtgtgactgtggcttcctggatgactgcgtcgatccctgctgtgattctttgacctgccagctgaggccaggtgcacagtgtgcatctgacggaccctgttgtcaaaattgccagctgcgcccgtctggctggcagtgtcgtcctaccagaggggattgtgacttgcctgaattctgcccaggagacagctcccagtgtccccctgatgtcagcctaggggatggcgagccctgcgctggcgggcaagctgtgtgcatgcacgggcgttgtgcctcctatgcccagcagtgccagtcactttggggacctggagcccagcccgctgcgccactttgcctccagacagctaatactcggggaaatgcttttgggagctgtgggcgcaaccccagtggcagttatgtgtcctgcacccctagagatgccatttgtgggcagctccagtgccagacaggtaggacccagcctctgctgggctccatccgggatctactctgggagacaatagatgtgaatgggactgagctgaactgcagctgggtgcacctggacctgggcagtgatgtggcccagcccctcctgactctgcctggcacagcctgtggccctggcctggtgtgtatagaccatcgatgccagcgtgtggatctcctgggggcacaggaatgtcgaagcaaatgccatggacatggggtctgtgacagcaacaggcactgctactgtgaggagggctgggcaccccctgactgcaccactcagctcaaagcaaccagctccctgaccacagggctgctcctcagcctcctggtcttattggtcctggtgatgcttggtgccagctactggtaccgtgcccgcctgcaccagcgactctgccagctcaagggacccacctgccagtacagggcagcccaatctggtccctctgaacggccaggacctccgcagagggccctgctggcacgaggcactaagcaggctagtgctctcagcttcccggcccccccttccaggccgctgccgcctgaccctgtgtccaagagactccaggctgagctggctgaccgacccaatccccctacccgccctctgcccgctgacccggtggtgagaagcccgaagtctcaggggccagccaagcccccacccccaaggaagccactgcctgccgacccccagggccggtgcccatcgggtgacctgcccggcccaggggctggaatcccgcccctagtggtaccctccagaccagcgccaccgcctccgacagtgtcctcgctctacctctgacctctccggaggttccgctgcctccaagccggacttagggcttcaagaggcgggcgtgccctctggagtcccctaccatgactgaaggcgccagagactggcggtgtcttaagactccgggcaccgccacgcgctgtcaagcaacactctgcggacctgccggcgtagttgcagcgggggcttggggaggggctgggggttggacgggattgaggaaggtccgcacagcctgtctctgctcagttgcaataaacgt

SEQ ID NO: 941 - DNA, 2874 bp, Homo sapiens
  source 1..2874: mol_type = unassigned DNA
gcgcggcgctgctgggttctccgaggcgacctggccgccggccgctcctccgcgcgctgttccgcacttgctgccctcgcccggcccggagcgccgctgccatgcggctggcgctgctctgggccctggggctcctgggcgcgggcagccctctgccttcctggccgctcccaaatataggtggcactgaggagcagcaggcagagtcagagaaggccccgagggagcccttggagccccaggtccttcaggacgatctcccaattagcctcaaaaaggtgcttcagaccagtctgcctgagcccctgaggatcaagttggagctggacggtgacagtcatatcctggagctgctacagaatagggagttggtcccaggccgcccaaccctggtgtggtaccagcccgatggcactcgggtggtcagtgagggacacactttggagaactgctgctaccagggaagagtgcggggatatgcaggctcctgggtgtccatctgcacctgctctgggctcagaggcttggtggtcctgaccccagagagaagctataccctggagcaggggcctggggaccttcagggtcctcccattatttcgcgaatccaagatctccacctgccaggccacacctgtgccctgagctggcgggaatctgtacacactcagaagccaccagagcaccccctgggacagcgccacattcgccggaggcgggatgtggtaacagagaccaagactgtggagttggtgattgtggctgatcactcggaggcccagaaataccgggacttccagcacctgctaaaccgcacactggaagtggccctcttgctggacacattcttccggcccctgaatgtacgagtggcactagtgggcctggaggcctggacccagcgtgacctggtggagatcagcccaaacccagctgtcaccctcgaaaacttcctccactggcgcagggcacatttgctgcctcgattgccccatgacagtgcccagctggtgactggtacttcattctctgggcctacggtgggcatggccattcagaactccatctgttctcctgacttctcaggaggtgtgaacatggaccactccaccagcatcctgggagtcgcctcctccatagcccatgagttgggccacagcctgggcctggaccatgatttgcctgggaatagctgcccctgtccaggtccagccccagccaagacctgcatcatggaggcctccacagacttcctaccaggcctgaacttcagcaactgcagccgacgggccctggagaaagccctcctggatggaatgggcagctgcctcttcgaacggctgcctagcctaccccctatggctgctttctgcggaaatatgtttgtggagccgggcgagcagtgtgactgtggcttcctggatgactgcgtcgatccctgctgtgattctttgacctgccagctgaggccaggtgcacagtgtgcatctgacggaccctgttgtcaaaattgccagctgcgcccgtctggctggcagtgtcgtcctaccagaggggattgtgacttgcctgaattctgcccaggagacagctcccagtgtccccctgatgtcagcctaggggatggcgagccctgcgctggcgggcaagctgtgtgcatgcacgggcgttgtgcctcctatgcccagcagtgccagtcactttggggacctggagcccagcccgctgcgccactttgcctccagacagctaatactcggggaaatgcttttgggagctgtgggcgcaaccccagtggcagttatgtgtcctgcacccctagagatgccatttgtgggcagctccagtgccagacaggtaggacccagcctctgctgggctccatccgggatctactctgggagacaatagatgtgaatgggactgagctgaactgcagctgggtgcacctggacctgggcagtgatgtggcccagcccctcctgactctgcctggcacagcctgtggccctggcctggtgtgtatagaccatcgatgccagcgtgtggatctcctgggggcacaggaatgtcgaagcaaatgccatggacatggggtctgtgacagcaacaggcactgctactgtgaggagggctgggcaccccctgactgcaccactcagctcaaagcaaccagctccctgaccacagggctgctcctcagcctcctggtcttattggtcctggtgatgcttggtgccagctactggtaccgtgcccgcctgcaccagcgactctgccagctcaagggacccacctgccagtacagggcagcccaatctggtccctctgaacggccaggacctccgcagagggccctgctggcacgaggcactaaggctgagctggctgaccgacccaatccccctacccgccctctgcccgctgacccggtggtgagaagcccgaagtctcaggggccagccaagcccccacccccaaggaagccactgcctgccgacccccagggccggtgcccatcgggtgacctgcccggcccaggggctggaatcccgcccctagtggtaccctccagaccagcgccaccgcctccgacagtgtcctcgctctacctctgacctctccggaggttccgctgcctccaagccggacttagggcttcaagaggcgggcgtgccctctggagtcccctaccatgactgaaggcgccagagactggcggtgtcttaagactccgggcaccgccacgcgctgtcaagcaacactctgcggacctgccggcgtagttgcagcgggggcttggggaggggctgggggttggacgggattgaggaaggtccgcacagcctgtctctgctcagttgcaataaacgt

SEQ ID NO: 942 - DNA, 2732 bp, Homo sapiens
  source 1..2732: mol_type = unassigned DNA
gcgcggcgctgctgggttctccgaggcgacctggccgccggccgctcctccgcgcgctgttccgcacttgctgccctcgcccggcccggagcgccgctgccatgcggctggcgctgctctgggccctggggctcctgggcgcgggcagccctctgccttcctggccgctcccaaatataggtggcactgaggagcagcaggcagagtcagagaaggccccgagggagcccttggagccccaggtccttcaggacgatctcccaattagcctcaaaaaggtgcttcagaccagtctgcctgagcccctgaggatcaagttggagctggacggtgacagtcatatcctggagctgctacagaatagggagttggtcccaggccgcccaaccctggtgtggtaccagcccgatggcactcgggtggtcagtgagggacacactttggagaactgctgctaccagggaagagtgcggggatatgcaggctcctgggtgtccatctgcacctgctctgggctcagaggcttggtggtcctgaccccagagagaagctataccctggagcaggggcctggggaccttcagggtcctcccattatttcgcgaatccaagatctccacctgccaggccacacctgtgccctgagctggcgggaatctgtacacactcagaagccaccagagcaccccctgggacagcgccacattcgccggaggcgggatgtggtaacagagaccaagactgtggagttggtgattgtggctgatcactcggaggcccagaaataccgggacttccagcacctgctaaaccgcacactggaagtggccctcttgctggacacattcttccggcccctgaatgtacgagtggcactagtgggcctggaggcctggacccagcgtgacctggtggagatcagcccaaacccagctgtcaccctcgaaaacttcctccactggcgcagggcacatttgctgcctcgattgccccatgacagtgcccagctggtgactggtacttcattctctgggcctacggtgggcatggccattcagaactccatctgttctcctgacttctcaggaggtgtgaacatggaccactccaccagcatcctgggagtcgcctcctccatagcccatgagttgggccacagcctgggcctggaccatgatttgcctgggaatagctgcccctgtccaggtccagccccagccaagacctgcatcatggaggcctccacagacttcctaccaggcctgaacttcagcaactgcagccgacgggccctggagaaagccctcctggatggaatgggcagctgcctcttcgaacggctgcctagcctaccccctatggctgctttctgcggaaatatgtttgtggagccgggcgagcagtgtgactgtggcttcctggatgactgcgtcgatccctgctgtgattctttgacctgccagctgaggccaggtgcacagtgtgcatctgacggaccctgttgtcaaaattgccagctgcgcccgtctggctggcagtgtcgtcctaccagaggggattgtgacttgcctgaattctgcccaggagacagctcccagtgtccccctgatgtcagcctaggggatggcgagccctgcgctggcgggcaagctgtgtgcatgcacgggcgttgtgcctcctatgcccagcagtgccagtcactttggggacctggagcccagcccgctgcgccactttgcctccagacagctaatactcggggaaatgcttttgggagctgtgggcgcaaccccagtggcagttatgtgtcctgcacccctagagatgccatttgtgggcagctccagtgccagacaggtaggacccagcctctgctgggctccatccgggatctactctgggagacaatagatgtgaatgggactgagctgaactgcagctgggtgcacctggacctgggcagtgatgtggcccagcccctcctgactctgcctggcacagcctgtggccctggcctggtgtgtatagaccatcgatgccagcgtgtggatctcctgggggcacaggaatgtcgaagcaaatgccatggacatggggtctgtgacagcaacaggcactgctactgtgaggagggctgggcaccccctgactgcaccactcagctcaaagcaaccagctccctgaccacagggctgctcctcagcctcctggtcttattggtcctggtgatgcttggtgccagctactggtaccgtgcccgcctgcaccagcgactctgccagctcaagggacccacctgccagtacagtctcaggggccagccaagcccccacccccaaggaagccactgcctgccgacccccagggccggtgcccatcgggtgacctgcccggcccaggggctggaatcccgcccctagtggtaccctccagaccagcgccaccgcctccgacagtgtcctcgctctacctctgacctctccggaggttccgctgcctccaagccggacttagggcttcaagaggcgggcgtgccctctggagtcccctaccatgactgaaggcgccagagactggcggtgtcttaagactccgggcaccgccacgcgctgtcaagcaacactctgcggacctgccggcgtagttgcagcgggggcttggggaggggctgggggttggacgggattgaggaaggtccgcacagcctgtctctgctcagttgcaataaacgt

SEQ ID NO: 943 - DNA, 1938 bp, Homo sapiens
  source 1..1938: mol_type = unassigned DNA
gcgcggcgctgctgggttctccgaggcgacctggccgccggccgctcctccgcgcgctgttccgcacttgctgccctcgcccggcccggagcgccgctgccatgcggctggcgctgctctgggccctggggctcctgggcgcgggcagccctctgccttcctggccgctcccaaatataggtggcactgaggagcagcaggcagagtcagagaaggccccgagggagcccttggagccccaggtccttcaggacgatctcccaattagcctcaaaaaggtgcttcagaccagtctgcctgagcccctgaggatcaagttggagctggacggtgacagtcatatcctggagctgctacagaataggagcttcctaccaggcctgaacttcagcaactgcagccgacgggccctggagaaagccctcctggatggaatgggcagctgcctcttcgaacggctgcctagcctaccccctatggctgctttctgcggaaatatgtttgtggagccgggcgagcagtgtgactgtggcttcctggatgactgcgtcgatccctgctgtgattctttgacctgccagctgaggccaggtgcacagtgtgcatctgacggaccctgttgtcaaaattgccagctgcgcccgtctggctggcagtgtcgtcctaccagaggggattgtgacttgcctgaattctgcccaggagacagctcccagtgtccccctgatgtcagcctaggggatggcgagccctgcgctggcgggcaagctgtgtgcatgcacgggcgttgtgcctcctatgcccagcagtgccagtcactttggggacctggagcccagcccgctgcgccactttgcctccagacagctaatactcggggaaatgcttttgggagctgtgggcgcaaccccagtggcagttatgtgtcctgcacccctagagatgccatttgtgggcagctccagtgccagacaggtaggacccagcctctgctgggctccatccgggatctactctgggagacaatagatgtgaatgggactgagctgaactgcagctgggtgcacctggacctgggcagtgatgtggcccagcccctcctgactctgcctggcacagcctgtggccctggcctggtgtgtatagaccatcgatgccagcgtgtggatctcctgggggcacaggaatgtcgaagcaaatgccatggacatggggtctgtgacagcaacaggcactgctactgtgaggagggctgggcaccccctgactgcaccactcagctcaaagcaaccagctccctgaccacagggctgctcctcagcctcctggtcttattggtcctggtgatgcttggtgccagctactggtaccgtgcccgcctgcaccagcgactctgccagctcaagggacccacctgccagtacagggcagcccaatctggtccctctgaacggccaggacctccgcagagggccctgctggcacgaggcactaagtctcaggggccagccaagcccccacccccaaggaagccactgcctgccgacccccagggccggtgcccatcgggtgacctgcccggcccaggggctggaatcccgcccctagtggtaccctccagaccagcgccaccgcctccgacagtgtcctcgctctacctctgacctctccggaggttccgctgcctccaagccggacttagggcttcaagaggcgggcgtgccctctggagtcccctaccatgactgaaggcgccagagactggcggtgtcttaagactccgggcaccgccacgcgctgtcaagcaacactctgcggacctgccggcgtagttgcagcgggggcttggggaggggctgggggttggacgggattgaggaaggtccgcacagcctgtctctgctcagttgcaataaacgtgacatcttgggagcgttc

SEQ ID NO: 944 - DNA, 2946 bp, Homo sapiens
  source 1..2946: mol_type = unassigned DNA
gcgcggcgctgctgggttctccgaggcgacctggccgccggccgctcctccgcgcgctgttccgcacttgctgccctcgcccggcccggagcgccgctgccatgcggctggcgctgctctgggccctggggctcctgggcgcgggcagccctctgccttcctggccgctcccaaatataggtggcactgaggagcagcaggcagagtcagagaaggccccgagggagcccttggagccccaggtccttcaggacgatctcccaattagcctcaaaaaggtgcttcagaccagtctgcctgagcccctgaggatcaagttggagctggacggtgacagtcatatcctggagctgctacagaatagggagttggtcccaggccgcccaaccctggtgtggtaccagcccgatggcactcgggtggtcagtgagggacacactttggagaactgctgctaccagggaagagtgcggggatatgcaggctcctgggtgtccatctgcacctgctctgggctcagaggcttggtggtcctgaccccagagagaagctataccctggagcaggggcctggggaccttcagggtcctcccattatttcgcgaatccaagatctccacctgccaggccacacctgtgccctgagctggcgggaatctgtacacactcagaagccaccagagcaccccctgggacagcgccacattcgccggaggcgggatgtggtaacagagaccaagactgtggagttggtgattgtggctgatcactcggaggcccagaaataccgggacttccagcacctgctaaaccgcacactggaagtggccctcttgctggacacattcttccggcccctgaatgtacgagtggcactagtgggcctggaggcctggacccagcgtgacctggtggagatcagcccaaacccagctgtcaccctcgaaaacttcctccactggcgcagggcacatttgctgcctcgattgccccatgacagtgcccagctggtgactggtacttcattctctgggcctacggtgggcatggccattcagaactccatctgttctcctgacttctcaggaggtgtgaacatggaccactccaccagcatcctgggagtcgcctcctccatagcccatgagttgggccacagcctgggcctggaccatgatttgcctgggaatagctgcccctgtccaggtccagccccagccaagacctgcatcatggaggcctccacagacttcctaccaggcctgaacttcagcaactgcagccgacgggccctggagaaagccctcctggatggaatgggcagctgcctcttcgaacggctgcctagcctaccccctatggctgctttctgcggaaatatgtttgtggagccgggcgagcagtgtgactgtggcttcctggatgactgcgtcgatccctgctgtgattctttgacctgccagctgaggccaggtgcacagtgtgcatctgacggaccctgttgtcaaaattgccagctgcgcccgtctggctggcagtgtcgtcctaccagaggggattgtgacttgcctgaattctgcccaggagacagctcccagtgtccccctgatgtcagcctaggggatggcgagccctgcgctggcgggcaagctgtgtgcatgcacgggcgttgtgcctcctatgcccagcagtgccagtcactttggggacctggagcccagcccgctgcgccactttgcctccagacagctaatactcggggaaatgcttttgggagctgtgggcgcaaccccagtggcagttatgtgtcctgcacccctagagatgccatttgtgggcagctccagtgccagacaggtaggacccagcctctgctgggctccatccgggatctactctgggagacaatagatgtgaatgggactgagctgaactgcagctgggtgcacctggacctgggcagtgatgtggcccagcccctcctgactctgcctggcacagcctgtggccctggcctggtgtgtatagaccatcgatgccagcgtgtggatctcctgggggcacaggaatgtcgaagcaaatgccatggacatggggtctgtgacagcaacaggcactgctactgtgaggagggctgggcaccccctgactgcaccactcagctcaaagcaaccagctccctgaccacagggctgctcctcagcctcctggtcttattggtcctggtgatgcttggtgccagctactggtaccgtgcccgcctgcaccagcgactctgccagctcaagggacccacctgccagtacagggcagcccaatctggtccctctgaacggccaggacctccgcagagggccctgctggcacgaggcactaaggctagtgctctcagcttcccggcccccccttccaggccgctgccgcctgaccctgtgtccaagagactccaggctgagctggctgaccgacccaatccccctacccgccctctgcccgctgacccggtggtgagaagcccgaagtctcaggggccagccaagcccccacccccaaggaagccactgcctgccgacccccagggccggtgcccatcgggtgacctgcccggcccaggggctggaatcccgcccctagtggtaccctccagaccagcgccaccgcctccgacagtgtcctcgctctacctctgacctctccggaggttccgctgcctccaagccggacttagggcttcaagaggcgggcgtgccctctggagtcccctaccatgactgaaggcgccagagactggcggtgtcttaagactccgggcaccgccacgcgctgtcaagcaacactctgcggacctgccggcgtagttgcagcgggggcttggggaggggctgggggttggacgggattgaggaaggtccgcacagcctgtctctgctcagttgcaataaacgt

SEQ ID NO: 945 - DNA, 2804 bp, Homo sapiens
  source 1..2804: mol_type = unassigned DNA
gcgcggcgctgctgggttctccgaggcgacctggccgccggccgctcctccgcgcgctgttccgcacttgctgccctcgcccggcccggagcgccgctgccatgcggctggcgctgctctgggccctggggctcctgggcgcgggcagccctctgccttcctggccgctcccaaatataggtggcactgaggagcagcaggcagagtcagagaaggccccgagggagcccttggagccccaggtccttcaggacgatctcccaattagcctcaaaaaggtgcttcagaccagtctgcctgagcccctgaggatcaagttggagctggacggtgacagtcatatcctggagctgctacagaatagggagttggtcccaggccgcccaaccctggtgtggtaccagcccgatggcactcgggtggtcagtgagggacacactttggagaactgctgctaccagggaagagtgcggggatatgcaggctcctgggtgtccatctgcacctgctctgggctcagaggcttggtggtcctgaccccagagagaagctataccctggagcaggggcctggggaccttcagggtcctcccattatttcgcgaatccaagatctccacctgccaggccacacctgtgccctgagctggcgggaatctgtacacactcagaagccaccagagcaccccctgggacagcgccacattcgccggaggcgggatgtggtaacagagaccaagactgtggagttggtgattgtggctgatcactcggaggcccagaaataccgggacttccagcacctgctaaaccgcacactggaagtggccctcttgctggacacattcttccggcccctgaatgtacgagtggcactagtgggcctggaggcctggacccagcgtgacctggtggagatcagcccaaacccagctgtcaccctcgaaaacttcctccactggcgcagggcacatttgctgcctcgattgccccatgacagtgcccagctggtgactggtacttcattctctgggcctacggtgggcatggccattcagaactccatctgttctcctgacttctcaggaggtgtgaacatggaccactccaccagcatcctgggagtcgcctcctccatagcccatgagttgggccacagcctgggcctggaccatgatttgcctgggaatagctgcccctgtccaggtccagccccagccaagacctgcatcatggaggcctccacagacttcctaccaggcctgaacttcagcaactgcagccgacgggccctggagaaagccctcctggatggaatgggcagctgcctcttcgaacggctgcctagcctaccccctatggctgctttctgcggaaatatgtttgtggagccgggcgagcagtgtgactgtggcttcctggatgactgcgtcgatccctgctgtgattctttgacctgccagctgaggccaggtgcacagtgtgcatctgacggaccctgttgtcaaaattgccagctgcgcccgtctggctggcagtgtcgtcctaccagaggggattgtgacttgcctgaattctgcccaggagacagctcccagtgtccccctgatgtcagcctaggggatggcgagccctgcgctggcgggcaagctgtgtgcatgcacgggcgttgtgcctcctatgcccagcagtgccagtcactttggggacctggagcccagcccgctgcgccactttgcctccagacagctaatactcggggaaatgcttttgggagctgtgggcgcaaccccagtggcagttatgtgtcctgcacccctagagatgccatttgtgggcagctccagtgccagacaggtaggacccagcctctgctgggctccatccgggatctactctgggagacaatagatgtgaatgggactgagctgaactgcagctgggtgcacctggacctgggcagtgatgtggcccagcccctcctgactctgcctggcacagcctgtggccctggcctggtgtgtatagaccatcgatgccagcgtgtggatctcctgggggcacaggaatgtcgaagcaaatgccatggacatggggtctgtgacagcaacaggcactgctactgtgaggagggctgggcaccccctgactgcaccactcagctcaaagcaaccagctccctgaccacagggctgctcctcagcctcctggtcttattggtcctggtgatgcttggtgccagctactggtaccgtgcccgcctgcaccagcgactctgccagctcaagggacccacctgccagtacaggctagtgctctcagcttcccggcccccccttccaggccgctgccgcctgaccctgtgtccaagagactccagtctcaggggccagccaagcccccacccccaaggaagccactgcctgccgacccccagggccggtgcccatcgggtgacctgcccggcccaggggctggaatcccgcccctagtggtaccctccagaccagcgccaccgcctccgacagtgtcctcgctctacctctgacctctccggaggttccgctgcctccaagccggacttagggcttcaagaggcgggcgtgccctctggagtcccctaccatgactgaaggcgccagagactggcggtgtcttaagactccgggcaccgccacgcgctgtcaagcaacactctgcggacctgccggcgtagttgcagcgggggcttggggaggggctgggggttggacgggattgaggaaggtccgcacagcctgtctctgctcagttgcaataaacgt

SEQ ID NO: 946 - DNA, 2678 bp, Homo sapiens
  source 1..2678: mol_type = unassigned DNA
acttgctgccctcgcccggcccggagcgccgctgccatgcggctggcgctgctctgggccctggggctcctgggcgcgggcagccctctgccttcctggccgctcccaaatatagtactgtcttggggtgtcctgggacctgcaggtggcactgaggagcagcaggcagagtcagagaaggccccgagggagcccttggagccccaggtccttcaggacgatctcccaattagcctcaaaaaggtgcttcagaccagtctgcctgagcccctgaggatcaagttggagctggacggtgacagtcatatcctggagctgctacagaatagggagttggtcccaggccgcccaaccctggtgtggtaccagcccgatggcactcgggtggtcagtgagggacacactttggagaactgctgctaccagggaagagtgcggggatatgcaggctcctgggtgtccatctgcacctgctctgggctcagaggcttggtggtcctgaccccagagagaagctataccctggagcaggggcctggggaccttcagggtcctcccattatttcgcgaatccaagatctccacctgccaggccacacctgtgccctgagctggcgggaatctgtacacactcagaagccaccagagcaccccctgggacagcgccacattcgccggaggcgggatgtggtaacagagaccaagactgtggagttggtgattgtggctgatcactcggaggcccagaaataccgggacttccagcacctgctaaaccgcacactggaagtggccctcttgctggacacattcttccggcccctgaatgtacgagtggcactagtgggcctggaggcctggacccagcgtgacctggtggagatcagcccaaacccagctgtcaccctcgaaaacttcctccactggcgcagggcacatttgctgcctcgattgccccatgacagtgcccagctggtgactggtacttcattctctgggcctacggtgggcatggccattcagaactccatctgttctcctgacttctcaggaggtgtgaacatggaccactccaccagcatcctgggagtcgcctcctccatagcccatgagttgggccacagcctgggcctggaccatgatttgcctgggaatagctgcccctgtccaggtccagccccagccaagacctgcatcatggaggcctccacagacttcctaccaggcctgaacttcagcaactgcagccgacgggccctggagaaagccctcctggatggaatgggcagctgcctcttcgaacggctgcctagcctaccccctatggctgctttctgcggaaatatgtttgtggagccgggcgagcagtgtgactgtggcttcctggatgactgcgtcgatccctgctgtgattctttgacctgccagctgaggccaggtgcacagtgtgcatctgacggaccctgttgtcaaaattgccagctgcgcccgtctggctggcagtgtcgtcctaccagaggggattgtgacttgcctgaattctgcccaggagacagctcccagtgtccccctgatgtcagcctaggggatggcgagccctgcgctggcgggcaagctgtgtgcatgcacgggcgttgtgcctcctatgcccagcagtgccagtcactttggggacctggagcccagcccgctgcgccactttgcctccagacagctaatactcggggaaatgcttttgggagctgtgggcgcaaccccagtggcagttatgtgtcctgcacccctagagatgccatttgtgggcagctccagtgccagacaggtaggacccagcctctgctgggctccatccgggatctactctgggagacaatagatgtgaatgggactgagctgaactgcagctgggtgcacctggacctgggcagtgatgtggcccagcccctcctgactctgcctggcacagcctgtggccctggcctggtgtgtatagaccatcgatgccagcgtgtggatctcctgggggcacaggaatgtcgaagcaaatgccatggacatggggtctgtgacagcaacaggcactgctactgtgaggagggctgggcaccccctgactgcaccactcagctcaaagcaaccagctccctgaccacagggctgctcctcagcctcctggtcttattggtcctggtgatgcttggtgccagctactggtaccgtgcccgcctgcaccagcgactctgccagctcaagggacccacctgccagtacagggcagcccaatctggtccctctgaacggccaggacctccgcagagggccctgctggcacgaggcactaagtctcaggggccagccaagcccccacccccaaggaagccactgcctgccgacccccagggccggtgcccatcgggtgacctgcccggcccaggggctggaatcccgcccctagtggtaccctccagaccagcgccaccgcctccgacagtgtcctcgctctacctctgacctctccggaggttccgctgcctccaagccggacttagggcttcaagaggcgggcgtgccctctggagtcccctaccatgactgaaggcgccagagactggcggtgtcttaagactccgggcaccgccacgcgctgtcaagcaacactctgcggacctgccggcgta

SEQ ID NO: 947 - DNA, 6481 bp, Homo sapiens
  source 1..6481: mol_type = unassigned DNA
agacgcgcctccaccgccgggcagtgggcaggtatggctgagggcgtgtgagcgccgagcgctaagggccgccgccaccatgccagggggcgcaggcgccgcccggctctgcttgctggcgtttgccctgcagcccctccggccgcgggcggcgcgggagcctggatggacaagaggaagtgaggaaggcagccccaagctgcagcatgaacttatcatacctcagtggaagacttcagaaagccccgtgagagaaaagcatccactcaaagctgagctcagggtaatggctgaggggcgagaactgatcctggacctggagaagaatgagcaactttttgctccttcctacacagaaacccattatacttcaagtggtaaccctcaaaccaccacacggaaattggaggatcactgcttttaccacggcacggtgagggagacagaactgtccagcgtcacgctcagcacttgccgaggaattagaggactgattacggtgagcagcaacctcagctacgtcatcgagcccctccctgacagcaagggccaacaccttatttacagatctgaacatctcaagccgcccccgggaaactgtgggttcgagcactccaagcccaccaccagggactgggctcttcagtttacacaacagaccaagaagcgacctcgcaggatgaaaagggaagatttaaactccatgaagtatgtggagctttacctcgtggctgattatttagagtttcagaagaatcgacgagaccaggacgccaccaaacacaagctcatagagatcgccaactatgttgataagttttaccgatccttgaacatccggattgctctcgtgggcttggaagtgtggacccacgggaacatgtgtgaagtttcagagaatccatattctaccctctggtcctttctcagttggaggcgcaagctgcttgcccagaagtaccatgacaacgcccaattaatcacgggcatgtccttccacggcaccaccatcggcctggcccccctcatggccatgtgctctgtgtaccagtctggaggagtcaacatggaccactccgagaatgccattggcgtggctgccaccatggcccacgagatgggccacaactttggcatgacccatgattctgcagattgctgctcggccagtgcggctgatggtgggtgcatcatggcagctgccactgggcacccctttcccaaagtgttcaatggatgcaacaggagggagctggacaggtatctgcagtcaggtggtggaatgtgtctctccaacatgccagacaccaggatgttgtatggaggccggaggtgtgggaacgggtatctggaagatggggaagagtgtgactgtggagaagaagaggaatgtaacaacccctgctgcaatgcctctaattgtaccctgaggccgggggcggagtgtgctcacggctcctgctgccaccagtgtaagctgttggctcctgggaccctgtgccgcgagcaggccaggcagtgtgacctcccggagttctgtacgggcaagtctccccactgccctaccaacttctaccagatggatggtaccccctgtgagggcggccaggcctactgctacaacggcatgtgcctcacctaccaggagcagtgccagcagctgtggggacccggagcccgacctgcccctgacctctgcttcgagaaggtgaatgtggcaggagacacctttggaaactgtggaaaggacatgaatggtgaacacaggaagtgcaacatgagagatgcgaagtgtgggaagatccagtgtcagagctctgaggcccggcccctggagtccaacgcggtgcccattgacaccactatcatcatgaatgggaggcagatccagtgccggggcacccacgtctaccgaggtcctgaggaggagggtgacatgctggacccagggctggtgatgactggaaccaagtgtggctacaaccatatttgctttgaggggcagtgcaggaacacctccttctttgaaactgaaggctgtgggaagaagtgcaatggccatggggtctgtaacaacaaccagaactgccactgcctgccgggctgggccccgcccttctgcaacacaccgggccacgggggcagtatcgacagtgggcctatgccccctgagagtgtgggtcctgtggtagctggagtgttggtggccatcttggtgctggcggtcctcatgctgatgtactactgctgcagacagaacaacaaactaggccaactcaagccctcagctctcccttccaagctgaggcaacagttcagttgtcccttcagggtttctcagaacagcgggactggtcatgccaacccaactttcaagctgcagacgccccagggcaagcgaaaggtgatcaacactccggaaatcctgcggaagccctcccagcctcctccccggccccctccagattatctgcgtggtgggtccccacctgcaccactgccagctcacctgagcagggctgctaggaactccccagggcccgggtctcaaatagagaggacggagtcgtccaggaggcctcctccaagccggccaattccccccgcaccaaattgcatcgtttcccaggacttctccaggcctcggccgccccagaaggcactcccggcaaacccagtgccaggccgcaggagcctccccaggccaggaggtgcatccccactgcggccccctggtgctggccctcagcagtcccggcctctggcagcacttgccccaaagtttccagaatacagatcacagagggctggagggatgattagctcgaaaatctagacctgtccaaggggcttctccctttccttgagctctctggacactgcagaggacccatggccatggaaccctgaagaagcatgtctggccgcctctgagctcctcccaccctcctccaggaacctccacatctccaaaaatctccctgttgactcagtgcctcctcggcttccttggaagcccagagggactatgatctgatggcctctaggtgttgttttgtgcaatatacagccccaggtagggaggggagagtatgaggagggtgactggcagcttctcctccagactcctagccccgaggtgctgatggagatgctcaaggccagcaagcccctcaggccagcacttcgcttgcagaagccatccattcactcctggggtgcagggcacgcaagagagcttcccattgcttctgctctcctcagaggtcccgggctggatggaggctggtacttacccaccccttttagcttttagggattaaggaagggtcaagccagccactgctgtggccctgcccagggcttggttgagggaacggcttctggctgtatggctgcatgtgacaagccacgtcccctcccacctctccccaaacccctgcatccctgtattcacacgggtcactctgactcagacaggtactattcgtaggcagtgtagacagcaggaggagcaccgggcttgggcttcctctgagccgtgatgccaaaggttgcgactcctgactctggataatttttagttgctctttgttttctctgccgcactttcctggtgccccacgcttttctctcttccttcccctctcattctccctctaatgtgtggtgctttggtgagcaaaccctcagcagtcctgaccttcgggtgaccaggtgcttgtgacctacaagtcagagtcctctctcacagtcggccactggatttccctcactggctctcaggagtgtgaccagagtagacttggggcatggccattggggtcatatgtttatttttcattgtgttttgtgacctcagcagggtgggggtcttcctccttactctaagctaaatctaggtgaggtttccccttagggagcccagctatttacaaagtacacacgagggagcaggctggtcattgacttcgggctggaccgttgccctctgagcagagaacagacccatttctgggagctgcccgagatcactggagaaggcagccagcagcagctgcactggaacagtcagagcagggagcctcttcctcaacccagctttttgtcattcacttccttttgttctctctctggtcactgcccttacctgaccctcacagaaagagagctctgagcaggtgagggggtctgcggtggctcctgtcttccctgcagcagggaaggagggccgtgtggtgctttgctagataggacggtttttgcaaagcacctggagatgtttgctgggagatagactcccactccacaaaggtgctgggtggctctccggacaggagctggcctgactctcactcctctgaggctttcctggggcctcctcccatcctgccatgagcaattgtttgctcttgaaaacctcactgcaaggctgaggctgagcttctgattcaccaccccagggcctccttatagttctctgcacacaataggtgcttcttggatgttcttgggtttggaaataagtggaaaatacgggatgtacccctgggggaaaagcctgggttgggtttagaaagatctcaggaaaatgagtttctcttccctcagggtggctgtgatacaggttccccatgtccttgccgtgggtcatccttgctgtgggtcatccttgctgtggagatccattccccacctttcctgtggcccaaccttttatttaaatgtgctaccctctgcctcaaggcttggttcctggaaagtaaaggtgaaaacatcccctttcacccctctgcaaaacaaacaagcaacatcctcaaaacccaaccccatgcctcacagagcttcctgtggcttctccagcctttctccctcacatcaggaggtagatagctctgaaatgacagcgccacagccatagtgactgcatgagccatctgaacctgcagtccaccctccctggaaccacaccagaaagagacctgggttgtcgttttcttgctttttgttttgttttgttttattattttcatatcacctccatcccataaagttgtactgtgaactggaagatggtggaatgttttggaatttgatagactttcggcaaccagttctactaatgcttcactcctggctctgttcagggaggctgcccaggaggaagactggccattatgcatccccttttctttccagtgcccagtatgctgttttgaggtgtcaaatacaaataaatctgggcttagggaaggagagaccttattccaaagcacgattgcagaaggggaaagggaatattgcaaaagggagaggaaggggccttatgggaatagtgaaaaggctcagaccgaccgatggcaagatctgcaagcgtctcaaagcccaggcagaaaaggacttttcttttattggaagaagtaaacatggctagaaagaaccacgttcagggaatgacgttgtgcccagcctttttttttttttttttttttttgtctccaggggaggggctgtttgctggctcaggctgaggatggcccaaagtccagggtctggtggggaggagggaagcttaactcaagtttgggttagtgagttagcaagctctttgtgcagatggggatgtaggtaaatctttttaaaagtgaaattaacctcctgccaattttacaacccaagaatttttttttaagggccttggagccatctctaaaacaaacctcaagggatttagtgccctgtctccctgtctctagaagccttagcctgggcacctggctcaatcttgtaactgcctgctagccatagattcctttcagccttgctgacttctccctataaaagtaaagcctttttctgccccagctctgagacacttgcagatcttaaggtctgagacttgctgattttctggttggagtgtttttttgtattgccatagtcccttccccctgaagcaatagcccctccccacctcctgcaatacgcctttccaatctttattggaagtctctccctgcctacttcctaatttattcttatttgacagagggtatggaagacttgcaatttgaaaactggggaccagttccaaagtcagtaattgtgttaaccacgtgtataacagctctgctggacacccaagaaagccatgggaacgccaactggaaaggtccccttccccaggggagcctgcgaaggagaggttctgtagaatccaagcccacatttccaaagtcacccccaacgcgtcctctcacaccgtccactgtgcgtttgtatgtgtctgggatccagggcaatgtgaattttctttttatttgggagattgttcacggaaaacagatcttcttctctcttgtccacctattaattgtttacaatatttgtacatctatgcaaaatacttgaatgggccatggtgccttttttccttgttagtatttaattaaaaatgaattgtttgtcatttgcaatgtta

SEQ ID NO: 948 - DNA, 6472 bp, Homo sapiens
  source 1..6472: mol_type = unassigned DNA
gccgggcagtgggcaggtatggctgagggcgtgtgagcgccgagcgctaagggccgccgccaccatgccagggggcgcaggcgccgcccggctctgcttgctggcgtttgccctgcagcccctccggccgcgggcggcgcgggagcctggatggacaatctctagaggaagtgaggaaggcagccccaagctgcagcatgaacttatcatacctcagtggaagacttcagaaagccccgtgagagaaaagcatccactcaaagctgagctcagggtaatggctgaggggcgagaactgatcctggacctggagaagaatgagcaactttttgctccttcctacacagaaacccattatacttcaagtggtaaccctcaaaccaccacacggaaattggaggatcactgcttttaccacggcacggtgagggagacagaactgtccagcgtcacgctcagcacttgccgaggaattagaggactgattacggtgagcagcaacctcagctacgtcatcgagcccctccctgacagcaagggccaacaccttatttacagatctgaacatctcaagccgcccccgggaaactgtgggttcgagcactccaagcccaccaccagggactgggctcttcagtttacacaacagaccaagaagcgacctcgcaggatgaaaagggaagatttaaactccatgaagtatgtggagctttacctcgtggctgattatttagagtttcagaagaatcgacgagaccaggacgccaccaaacacaagctcatagagatcgccaactatgttgataagttttaccgatccttgaacatccggattgctctcgtgggcttggaagtgtggacccacgggaacatgtgtgaagtttcagagaatccatattctaccctctggtcctttctcagttggaggcgcaagctgcttgcccagaagtaccatgacaacgcccaattaatcacgggcatgtccttccacggcaccaccatcggcctggcccccctcatggccatgtgctctgtgtaccagtctggaggagtcaacatggaccactccgagaatgccattggcgtggctgccaccatggcccacgagatgggccacaactttggcatgacccatgattctgcagattgctgctcggccagtgcggctgatggtgggtgcatcatggcagctgccactgggcacccctttcccaaagtgttcaatggatgcaacaggagggagctggacaggtatctgcagtcaggtggtggaatgtgtctctccaacatgccagacaccaggatgttgtatggaggccggaggtgtgggaacgggtatctggaagatggggaagagtgtgactgtggagaagaagaggaatgtaacaacccctgctgcaatgcctctaattgtaccctgaggccgggggcggagtgtgctcacggctcctgctgccaccagtgtaagctgttggctcctgggaccctgtgccgcgagcaggccaggcagtgtgacctcccggagttctgtacgggcaagtctccccactgccctaccaacttctaccagatggatggtaccccctgtgagggcggccaggcctactgctacaacggcatgtgcctcacctaccaggagcagtgccagcagctgtggggacccggagcccgacctgcccctgacctctgcttcgagaaggtgaatgtggcaggagacacctttggaaactgtggaaaggacatgaatggtgaacacaggaagtgcaacatgagagatgcgaagtgtgggaagatccagtgtcagagctctgaggcccggcccctggagtccaacgcggtgcccattgacaccactatcatcatgaatgggaggcagatccagtgccggggcacccacgtctaccgaggtcctgaggaggagggtgacatgctggacccagggctggtgatgactggaaccaagtgtggctacaaccatatttgctttgaggggcagtgcaggaacacctccttctttgaaactgaaggctgtgggaagaagtgcaatggccatggggtctgtaacaacaaccagaactgccactgcctgccgggctgggccccgcccttctgcaacacaccgggccacgggggcagtatcgacagtgggcctatgccccctgagagtgtgggtcctgtggtagctggagtgttggtggccatcttggtgctggcggtcctcatgctgatgtactactgctgcagacagaacaacaaactaggccaactcaagccctcagctctcccttccaagctgaggcaacagttcagttgtcccttcagggtttctcagaacagcgggactggtcatgccaacccaactttcaagctgcagacgccccagggcaagcgaaaggtgatcaacactccggaaatcctgcggaagccctcccagcctcctccccggccccctccagattatctgcgtggtgggtccccacctgcaccactgccagctcacctgagcagggctgctaggaactccccagggcccgggtctcaaatagagaggacggagtcgtccaggaggcctcctccaagccggccaattccccccgcaccaaattgcatcgtttcccaggacttctccaggcctcggccgccccagaaggcactcccggcaaacccagtgccaggccgcaggagcctccccaggccaggaggtgcatccccactgcggccccctggtgctggccctcagcagtcccggcctctggcagcacttgccccaaagtttccagaatacagatcacagagggctggagggatgattagctcgaaaatctagacctgtccaaggggcttctccctttccttgagctctctggacactgcagaggacccatggccatggaaccctgaagaagcatgtctggccgcctctgagctcctcccaccctcctccaggaacctccacatctccaaaaatctccctgttgactcagtgcctcctcggcttccttggaagcccagagggactatgatctgatggcctctaggtgttgttttgtgcaatatacagccccaggtagggaggggagagtatgaggagggtgactggcagcttctcctccagactcctagccccgaggtgctgatggagatgctcaaggccagcaagcccctcaggccagcacttcgcttgcagaagccatccattcactcctggggtgcagggcacgcaagagagcttcccattgcttctgctctcctcagaggtcccgggctggatggaggctggtacttacccaccccttttagcttttagggattaaggaagggtcaagccagccactgctgtggccctgcccagggcttggttgagggaacggcttctggctgtatggctgcatgtgacaagccacgtcccctcccacctctccccaaacccctgcatccctgtattcacacgggtcactctgactcagacaggtactattcgtaggcagtgtagacagcaggaggagcaccgggcttgggcttcctctgagccgtgatgccaaaggttgcgactcctgactctggataatttttagttgctctttgttttctctgccgcactttcctggtgccccacgcttttctctcttccttcccctctcattctccctctaatgtgtggtgctttggtgagcaaaccctcagcagtcctgaccttcgggtgaccaggtgcttgtgacctacaagtcagagtcctctctcacagtcggccactggatttccctcactggctctcaggagtgtgaccagagtagacttggggcatggccattggggtcatatgtttatttttcattgtgttttgtgacctcagcagggtgggggtcttcctccttactctaagctaaatctaggtgaggtttccccttagggagcccagctatttacaaagtacacacgagggagcaggctggtcattgacttcgggctggaccgttgccctctgagcagagaacagacccatttctgggagctgcccgagatcactggagaaggcagccagcagcagctgcactggaacagtcagagcagggagcctcttcctcaacccagctttttgtcattcacttccttttgttctctctctggtcactgcccttacctgaccctcacagaaagagagctctgagcaggtgagggggtctgcggtggctcctgtcttccctgcagcagggaaggagggccgtgtggtgctttgctagataggacggtttttgcaaagcacctggagatgtttgctgggagatagactcccactccacaaaggtgctgggtggctctccggacaggagctggcctgactctcactcctctgaggctttcctggggcctcctcccatcctgccatgagcaattgtttgctcttgaaaacctcactgcaaggctgaggctgagcttctgattcaccaccccagggcctccttatagttctctgcacacaataggtgcttcttggatgttcttgggtttggaaataagtggaaaatacgggatgtacccctgggggaaaagcctgggttgggtttagaaagatctcaggaaaatgagtttctcttccctcagggtggctgtgatacaggttccccatgtccttgccgtgggtcatccttgctgtgggtcatccttgctgtggagatccattccccacctttcctgtggcccaaccttttatttaaatgtgctaccctctgcctcaaggcttggttcctggaaagtaaaggtgaaaacatcccctttcacccctctgcaaaacaaacaagcaacatcctcaaaacccaaccccatgcctcacagagcttcctgtggcttctccagcctttctccctcacatcaggaggtagatagctctgaaatgacagcgccacagccatagtgactgcatgagccatctgaacctgcagtccaccctccctggaaccacaccagaaagagacctgggttgtcgttttcttgctttttgttttgttttgttttattattttcatatcacctccatcccataaagttgtactgtgaactggaagatggtggaatgttttggaatttgatagactttcggcaaccagttctactaatgcttcactcctggctctgttcagggaggctgcccaggaggaagactggccattatgcatccccttttctttccagtgcccagtatgctgttttgaggtgtcaaatacaaataaatctgggcttagggaaggagagaccttattccaaagcacgattgcagaaggggaaagggaatattgcaaaagggagaggaaggggccttatgggaatagtgaaaaggctcagaccgaccgatggcaagatctgcaagcgtctcaaagcccaggcagaaaaggacttttcttttattggaagaagtaaacatggctagaaagaaccacgttcagggaatgacgttgtgcccagcctttttttttttttttttttttttgtctccaggggaggggctgtttgctggctcaggctgaggatggcccaaagtccagggtctggtggggaggagggaagcttaactcaagtttgggttagtgagttagcaagctctttgtgcagatggggatgtaggtaaatctttttaaaagtgaaattaacctcctgccaattttacaacccaagaatttttttttaagggccttggagccatctctaaaacaaacctcaagggatttagtgccctgtctccctgtctctagaagccttagcctgggcacctggctcaatcttgtaactgcctgctagccatagattcctttcagccttgctgacttctccctataaaagtaaagcctttttctgccccagctctgagacacttgcagatcttaaggtctgagacttgctgattttctggttggagtgtttttttgtattgccatagtcccttccccctgaagcaatagcccctccccacctcctgcaatacgcctttccaatctttattggaagtctctccctgcctacttcctaatttattcttatttgacagagggtatggaagacttgcaatttgaaaactggggaccagttccaaagtcagtaattgtgttaaccacgtgtataacagctctgctggacacccaagaaagccatgggaacgccaactggaaaggtccccttccccaggggagcctgcgaaggagaggttctgtagaatccaagcccacatttccaaagtcacccccaacgcgtcctctcacaccgtccactgtgcgtttgtatgtgtctgggatccagggcaatgtgaattttctttttatttgggagattgttcacggaaaacagatcttcttctctcttgtccacctattaattgtttacaatatttgtacatctatgcaaaatacttgaatgggccatggtgccttttttccttgttagtatttaattaaaaatgaattgtttgtcatttgcaatgtta

SEQ ID NO: 949 - DNA, 2782 bp, Homo sapiens
  source 1..2782: mol_type = unassigned DNA
gccgggcagtgggcaggtatggctgagggcgtgtgagcgccgagcgctaagggccgccgccaccatgccagggggcgcaggcgccgcccggctctgcttgctggcgtttgccctgcagcccctccggccgcgggcggcgcgggagcctggatggacaagaggaagtgaggaaggcagccccaagctgcagcatgaacttatcatacctcagtggaagacttcagaaagccccgtgagagaaaagcatccactcaaagctgagctcagggtaatggctgaggggcgagaactgatcctggacctggagaagaatgagcaactttttgctccttcctacacagaaacccattatacttcaagtggtaaccctcaaaccaccacacggaaattggaggatcactgcttttaccacggcacggtgagggagacagaactgtccagcgtcacgctcagcacttgccgaggaattagaggactgattacggtgagcagcaacctcagctacgtcatcgagcccctccctgacagcaagggccaacaccttatttacagatctgaacatctcaagccgcccccgggaaactgtgggttcgagcactccaagcccaccaccagggactgggctcttcagtttacacaacagaccaagaagcgacctcgcaggatgaaaagggaagatttaaactccatgaagtatgtggagctttacctcgtggctgattatttagagtttcagaagaatcgacgagaccaggacgccaccaaacacaagctcatagagatcgccaactatgttgataagttttaccgatccttgaacatccggattgctctcgtgggcttggaagtgtggacccacgggaacatgtgtgaagtttcagagaatccatattctaccctctggtcctttctcagttggaggcgcaagctgcttgcccagaagtaccatgacaacgcccaattaatcacgggcatgtccttccacggcaccaccatcggcctggcccccctcatggccatgtgctctgtgtaccagtctggaggagtcaacatggaccactccgagaatgccattggcgtggctgccaccatggcccacgagatgggccacaactttggcatgacccatgattctgcagattgctgctcggccagtgcggctgatggtgggtgcatcatggcagctgccactgggcacccctttcccaaagtgttcaatggatgcaacaggagggagctggacaggtatctgcagtcaggtggtggaatgtgtctctccaacatgccagacaccaggatgttgtatggaggccggaggtgtgggaacgggtatctggaagatggggaagagtgtgactgtggagaagaagaggaatgtaacaacccctgctgcaatgcctctaattgtaccctgaggccgggggcggagtgtgctcacggctcctgctgccaccagtgtaagctgttggctcctgggaccctgtgccgcgagcaggccaggcagtgtgacctcccggagttctgtacgggcaagtctccccactgccctaccaacttctaccagatggatggtaccccctgtgagggcggccaggcctactgctacaacggcatgtgcctcacctaccaggagcagtgccagcagctgtggggacccggagcccgacctgcccctgacctctgcttcgagaaggtgaatgtggcaggagacacctttggaaactgtggaaaggacatgaatggtgaacacaggaagtgcaacatgagagatgcgaagtgtgggaagatccagtgtcagagctctgaggcccggcccctggagtccaacgcggtgcccattgacaccactatcatcatgaatgggaggcagatccagtgccggggcacccacgtctaccgaggtcctgaggaggagggtgacatgctggacccagggctggtgatgactggaaccaagtgtggctacaaccatatttgctttgaggggcagtgcaggaacacctccttctttgaaactgaaggctgtgggaagaagtgcaatggccatggggtctgtaacaacaaccagaactgccactgcctgccgggctgggccccgcccttctgcaacacaccgggccacgggggcagtatcgacagtgggcctatgccccctgagagtgtgggtcctgtggtagctggagtgttggtggccatcttggtgctggcggtcctcatgctgatgtactactgctgcagacagaacaacaaactaggccaactcaagccctcagctctcccttccaagctgaggcaacagttcagttgtcccttcagggtttctcagaacagcgggactggtcatgccaacccaactttcaagctgcagacgccccagggcaagcgaaaggtgatcaacactccggaaatcctgcggaagccctcccagcctcctccccggccccctccagattatctgcgtggtgggtccccacctgcaccactgccagctcacctgagcagggctgctaggaactccccagggcccgggtctcaaatagagaggacggagtcgtccaggaggcctcctccaagccggccaattccccccgcaccaaattgcatcgtttcccagaagtgccttttgcctcctgccatgattctgagggctccccagccaagtggaactgttgtttgcttagtaattagttttaatatggccttctacaggtcaatgaggattagaatagaaccaggaatcaagaccaagttgctggttttactagtttggaagcagttttaa

SEQ ID NO: 950 - DNA, 3312 bp, Homo sapiens
  source 1..3312: mol_type = unassigned DNA
tggctgagggcgtgtgagcgccgagcgctaagggccgccgccaccatgccagggggcgcaggcgccgcccggctctgcttgctggcgtttgccctgcagcccctccggccgcgggcggcgcgggagcctggatggacaagaggaagtgaggaaggcagccccaagctgcagcatgaacttatcatacctcagtggaagacttcagaaagccccgtgagagaaaagcatccactcaaagctgagctcagggtaatggctgaggggcgagaactgatcctggacctggagaagaatgagcaactttttgctccttcctacacagaaacccattatacttcaagtggtaaccctcaaaccaccacacggaaattggaggatcactgcttttaccacggcacggtgagggagacagaactgtccagcgtcacgctcagcacttgccgaggaattagaggactgattacggtgagcagcaacctcagctacgtcatcgagcccctccctgacagcaagggccaacaccttatttacagatctgaacatctcaagccgcccccgggaaactgtgggttcgagcactccaagcccaccaccagggactgggctcttcagtttacacaacagaccaagaagcgacctcgcaggatgaaaagggaagatttaaactccatgaagtatgtggagctttacctcgtggctgattatttagagtttcagaagaatcgacgagaccaggacgccaccaaacacaagctcatagagatcgccaactatgttgataagttttaccgatccttgaacatccggattgctctcgtgggcttggaagtgtggacccacgggaacatgtgtgaagtttcagagaatccatattctaccctctggtcctttctcagttggaggcgcaagctgcttgcccagaagtaccatgacaacgcccaattaatcacgggcatgtccttccacggcaccaccatcggcctggcccccctcatggccatgtgctctgtgtaccagtctggaggagtcaacatggaccactccgagaatgccattggcgtggctgccaccatggcccacgagatgggccacaactttggcatgacccatgattctgcagattgctgctcggccagtgcggctgatggtgggtgcatcatggcagctgccactgggcacccctttcccaaagtgttcaatggatgcaacaggagggagctggacaggtatctgcagtcaggtggtggaatgtgtctctccaacatgccagacaccaggatgttgtatggaggccggaggtgtgggaacgggtatctggaagatggggaagagtgtgactgtggagaagaagaggaatgtaacaacccctgctgcaatgcctctaattgtaccctgaggccgggggcggagtgtgctcacggctcctgctgccaccagtgtaagctgttggctcctgggaccctgtgccgcgagcaggccaggcagtgtgacctcccggagttctgtacgggcaagtctccccactgccctaccaacttctaccagatggatggtaccccctgtgagggcggccaggcctactgctacaacggcatgtgcctcacctaccaggagcagtgccagcagctgtggggacccggagcccgacctgcccctgacctctgcttcgagaaggtgaatgtggcaggagacacctttggaaactgtggaaaggacatgaatggtgaacacaggaagtgcaacatgagagatgcgaagtgtgggaagatccagtgtcagagctctgaggcccggcccctggagtccaacgcggtgcccattgacaccactatcatcatgaatgggaggcagatccagtgccggggcacccacgtctaccgaggtcctgaggaggagggtgacatgctggacccagggctggtgatgactggaaccaagtgtggctacaaccatatttgctttgaggggcagtgcaggaacacctccttctttgaaactgaaggctgtgggaagaagtgcaatggccatggggtctgtaacaacaaccagaactgccactgcctgccgggctgggccccgcccttctgcaacacaccgggccacgggggcagtatcgacagtgggcctatgccccctgagagtgtgggtcctgtggtagctggagtgttggtggccatcttggtgctggcggtcctcatgctgatgtactactgctgcagacagaacaacaaactaggccaactcaagccctcagctctcccttccaagctgaggcaacagttcagttgtcccttcagggtttctcagaacagcgggactggtcatgccaacccaactttcaagctgcagacgccccagggcaagcgaaaggtgatcaacactccggaaatcctgcggaagccctcccagcctcctccccggccccctccagattatctgcgtggtgggtccccacctgcaccactgccagctcacctgagcagggctgctaggaactccccagggcccgggtctcaaatagagaggacggagtcgtccaggaggcctcctccaagccggccaattccccccgcaccaaattgcatcgtttcccaggacttctccaggcctcggccgccccagaaggcactcccggcaaacccagtgccaggccgcaggagcctccccaggccaggaggtgcatccccactgcggccccctggtgctggccctcagcagtcccggcctctggcagcacttgccccaaaggtgagtccacgggaagccctcaaggtgaaagctggtaccagagggctccaggggggcaggtgtagagttgagaaaacaaagcaattcatgcttcttgtggtctggactgaacttccagaacaaaagccaagggcaaaacattcatgtttcttggtgcccgcttgactgtggagttttggcttcatgtgaaaggtgattcttagaatcctgagctgtggtggcttcagtcctgcccctgcacctgacctggggagggaccctgagcaagtccctcttgagtctgtttcctcatttgtacagaggctatgatgagcagtagtaccagccccatcaggttgttgtgaagagcaaggaagtgcattagtagaagccacctggcctgcgggaggctgtgtacacttggcccctcctcgtacttcttctgtgtggctgacagtctcagtttgccagtcttggcagtcaggtcagaaagggatgaggtgaagaagctggctgaccatgctgtattcccacgaggcattgagaaaactatggactgtgctgctgccttagcagggaagggaa

SEQ ID NO: 951 - DNA, 2672 bp, Homo sapiens
  source 1..2672: mol_type = unassigned DNA
gcctacctcttccaggctgcgtggccggggcgtcatctcgcgcttccaactgccctgtaaccaccaactgccattattccggctgggacccaggacttcaagccatgtggcgcgtcttgtttctgctcagcgggctcggcgggctgcggatggacagtaattttgatagtttacctgtgcaaattacagttccggagaaaatacggtcaataataaaggaaggaattgaatcgcaggcatcctacaaaattgtaattgaagggaaaccatatactgtgaatttaatgcaaaaaaactttttaccccataattttagagtttacagttatagtggcacaggaattatgaaaccacttgaccaagattttcagaatttctgccactaccaagggtatattgaaggttatccaaaatctgtggtgatggttagcacatgtactggactcaggggcgtactacagtttgaaaatgttagttatggaatagaacccctggagtcttcagttggctttgaacatgtaatttaccaagtaaaacataagaaagcagatgtttccttatataatgagaaggatattgaatcaagagatctgtcctttaaattacaaagcgtagagccacagcaagattttgcaaagtatatagaaatgcatgttatagttgaaaaacaattgtataatcatatggggtctgatacaactgttgtcgctcaaaaagttttccagttgattggattgacgaatgctatttttgtttcatttaatattacaattattctgtcttcattggagctttggatagatgaaaataaaattgcaaccactggagaagctaatgagttattacacacatttttaagatggaaaacatcttatcttgttttacgtcctcatgatgtggcatttttacttgtttacagagaaaagtcaaattatgttggtgcaacctttcaagggaagatgtgtgatgcaaactatgcaggaggtgttgttctgcaccccagaaccataagtctggaatcacttgcagttattttagctcaattattgagccttagtatggggatcacttatgatgacattaacaaatgccagtgctcaggagctgtctgcattatgaatccagaagcaattcatttcagtggtgtgaagatctttagtaactgcagcttcgaagactttgcacattttatttcaaagcagaagtcccagtgtcttcacaatcagcctcgcttagatccttttttcaaacagcaagcagtgtgtggtaatgcaaagctggaagcaggagaggagtgtgactgtgggactgaacaggattgtgcccttattggagaaacatgctgtgatattgccacatgtagatttaaagccggttcaaactgtgctgaaggaccatgctgcgaaaactgtctatttatgtcaaaagaaagaatgtgtaggccttcctttgaagaatgcgacctccctgaatattgcaatggatcatctgcatcatgcccagaaaaccactatgttcagactgggcatccgtgtggactgaatcaatggatctgtatagatggagtttgtatgagtggggataaacaatgtacagacacatttggcaaagaagtagagtttggcccttcagaatgttattctcaccttaattcaaagactgatgtatctggaaactgtggtataagtgattcaggatacacacagtgtgaagctgacaatctgcagtgcggaaaattaatatgtaaatatgtaggtaaatttttattacaaattccaagagccactattatttatgccaacataagtggacatctctgcattgctgtggaatttgccagtgatcatgcagacagccaaaagatgtggataaaagatggaacttcttgtggttcaaataaggtttgcaggaatcaaagatgtgtgagttcttcatacttgggttatgattgtactactgacaaatgcaatgatagaggtgtatgcaataacaaaaagcactgtcactgtagtgcttcatatttacctccagattgctcagttcaatcagatctatggcctggtgggagtattgacagtggcaattttccacctgtagctataccagccagactccctgaaaggcgctacattgagaacatttaccattccaaaccaatgagatggccatttttcttattcattcctttctttattattttctgtgtactgattgctataatggtgaaagttaatttccaaaggaaaaaatggagaactgaggactattcaagcgatgagcaacctgaaagtgagagtgaacctaaagggtagtctggacaacagagatgccatgatatcacttcttctagagtaattatctgtgatggatggacacaaaaaaatggaaagaaaagaatgtacattacctggtttcctgggattcaaacctgcatattgtgattttaatttgaccagaaaatatgatatatatgtataatttcacagataatttacttatttaaaaatgcatgataatgagttttacattacaaatttctgtttttttaaagttatcttacgctatttctgttggttagtagacactaattctgtcagtaggggcatggtataaggaaatatcataatgtaatgaggtggtactatgattaaaagccactgttacatttcaaa

SEQ ID NO: 952 - DNA, 2535 bp, Homo sapiens
  source 1..2535: mol_type = unassigned DNA
ggctgggacccaggacttcaagccatgtggcgcgtcttgtttctgctcagcgggctcggcgggctgcggatggacagtaattttgatagtttacctgtgcaaattacagttccggagaaaatacggtcaataataaaggaaggaattgaatcgcaggcatcctacaaaattgtaattgaagggaaaccatatactgtgaatttaatgcaaaaaaactttttaccccataattttagagtttacagttatagtggcacaggaattatgaaaccacttgaccaagattttcagaatttctgccactaccaagggtatattgaaggttatccaaaatctgtggtgatggttagcacatgtactggactcaggggcgtactacagtttgaaaatgttagttatggaatagaacccctggagtcttcagttggctttgaacatgtaatttaccaagtaaaacataagaaagcagatgtttccttatataatgagaaggatattgaatcaagagatctgtcctttaaattacaaagcgtagagtataatcatatggggtctgatacaactgttgtcgctcaaaaagttttccagttgattggattgacgaatgctatttttgtttcatttaatattacaattattctgtcttcattggagctttggatagatgaaaataaaattgcaaccactggagaagctaatgagttattacacacatttttaagatggaaaacatcttatcttgttttacgtcctcatgatgtggcatttttacttgtttacagagaaaagtcaaattatgttggtgcaacctttcaagggaagatgtgtgatgcaaactatgcaggaggtgttgttctgcaccccagaaccataagtctggaatcacttgcagttattttagctcaattattgagccttagtatggggatcacttatgatgacattaacaaatgccagtgctcaggagctgtctgcattatgaatccagaagcaattcatttcagtggtgtgaagatctttagtaactgcagcttcgaagactttgcacattttatttcaaagcagaagtcccagtgtcttcacaatcagcctcgcttagatccttttttcaaacagcaagcagtgtgtggtaatgcaaagctggaagcaggagaggagtgtgactgtgggactgaacaggattgtgcccttattggagaaacatgctgtgatattgccacatgtagatttaaagccggttcaaactgtgctgaaggaccatgctgcgaaaactgtctatttatgtcaaaagaaagaatgtgtaggccttcctttgaagaatgcgacctccctgaatattgcaatggatcatctgcatcatgcccagaaaaccactatgttcagactgggcatccgtgtggactgaatcaatggatctgtatagatggagtttgtatgagtggggataaacaatgtacagacacatttggcaaagaagtagagtttggcccttcagaatgttattctcaccttaattcaaagactgatgtatctggaaactgtggtataagtgattcaggatacacacagtgtgaagctgacaatctgcagtgcggaaaattaatatgtaaatatgtaggtaaatttttattacaaattccaagagccactattatttatgccaacataagtggacatctctgcattgctgtggaatttgccagtgatcatgcagacagccaaaagatgtggataaaagatggaacttcttgtggttcaaataaggtttgcaggaatcaaagatgtgtgagttcttcatacttgggttatgattgtactactgacaaatgcaatgatagaggtgtatgcaataacaaaaagcactgtcactgtagtgcttcatatttacctccagattgctcagttcaatcagatctatggcctggtgggagtattgacagtggcaattttccacctgtagctataccagccagactccctgaaaggcgctacattgagaacatttaccattccaaaccaatgagatggccatttttcttattcattcctttctttattattttctgtgtactgattgctataatggtgaaagttaatttccaaaggaaaaaatggagaactgaggactattcaagcgatgagcaacctgaaagtgagagtgaacctaaagggtagtctggacaacagagatgccatgatatcacttcttctagagtaattatctgtgatggatggacacaaaaaaatggaaagaaaagaatgtacattacctggtttcctgggattcaaacctgcatattgtgattttaatttgaccagaaaatatgatatatatgtataatttcacagataatttacttatttaaaaatgcatgataatgagttttacattacaaatttctgtttttttaaagttatcttacgctatttctgttggttagtagacactaattctgtcagtaggggcatggtataaggaaatatcataatgtaatgaggtggtactatgattaaaagccactgttacatttcaaa

SEQ ID NO: 953 - DNA, 2792 bp, Homo sapiens
  source 1..2792: mol_type = unassigned DNA
gggagttcagcagtgtgtttaagactagggtcatgcccacatcaatctcagattcccattttatctttcttttttggtatcactcctagtaccaagtcttgtgtctgtcaatatcctgtccaaaaaagaaaaacacaccaaggaaaattaatataggaaaaatttaaaaagttattagaggactgaaaatataaaaatggaacactgaaagacacagagtttttattttcagcactgcagctctgatggtccagctccaccaggacacagatccccagatccctaaaggtcagccatgcaccctgaacagctcagagggaggagccagaccagcagtgcctcacaccttgttctcttctgctctagacagatggctccataatgacagcttcataatggcagtgggtgagcccctggtgcacatcagggtcactcttctgctgctctggtttgggatgtttttgtctatttctggccactctcaggccaggccctcccagtatttcacttctccagaagtggtgatccctttgaaggtgatcagcaggggcagaggtgcaaaggctcctggatggctctcctatagcctgcggtttgggggacagagatacattgtccacatgagggtaaataagctgttgtttgctgcacaccttcctgtgttcacctacacagagcagcatgccctgctccaggatcagcccttcatccaggatgactgctactaccatggttatgtggagggggtccctgagtccttggttgcccttagtacctgttctgggggctttcttggaatgctacagataaatgaccttgtttatgaaatcaagccaattagtgtttctgccacatttgaacacctagtatataagatagacagtgatgatacacagtttccacctatgagatgtgggttaacagaagagaaaatagcacaccagatggagttgcaattgtcatataatttcactctgaagcaaagttcttttgtgggctggtggacccatcagcggtttgttgagctggtagtggtcgtggataatattagatatcttttctctcaaagtaatgcaacaacagtgcagcatgaagtatttaacgttgtcaatatagtggattccttctatcatcctttggaggttgatgtaattttgactggaattgatatatggactgcatcaaatccacttcctaccagtggagacctagataatgttttagaggacttttctatttggaagaattataaccttaataatcgactacaacatgatgttgcacatcttttcataaaagacacacaaggcatgaagcttggtgttgcctatgttaaaggaatatgccagaatccttttaatactggagttgatgtttttgaagacaacaggttggtcgtttttgcaattactttgggccacgagcttggtcataatttgggtatgcaacatgacacccagtggtgtgtgtgcgagctacagtggtgcataatgcatgcctatagaaaggtgacaactaaatttagcaactgcagttatgcccaatattgggacagtactatcagtagtggattatgtattcaaccgcctccatatccagggaatatatttagactgaagtactgtgggaatctagtggttgaagaaggggaggaatgtgactgtggaaccatacggcagtgtgcaaaagatccctgttgtctgttaaactgtactctacatcctggggctgcttgtgcttttggaatatgttgcaaagactgcaaatttctgccatcaggaactttatgtagacaacaagttggtgaatgtgaccttccagagtggtgcaatgggacatcccatcaatgcccagatgatgtgtatgtgcaggacgggatctcctgtaatgtgaatgccttctgctatgaaaagacgtgtaataaccatgatatacaatgtaaagagatttttggccaagatgcaaggagtgcatctcagagttgctaccaagaaatcaacacccaaggaaaccgtttcggtcactgtggtattgtaggcacaacatatgtaaaatgttggacccctgatatcatgtgtgggagggttcagtgtgaaaatgtgggagtaattcccaatctgatagagcattctacagtgcagcagtttcacctcaatgacaccacttgctggggcactgattatcatttagggatggctatacctgatattggtgaggtgaaagatggcacagtatgtggtccagaaaagatctgcatccgtaagaagtgtgccagtatggttcatctgtcacaagcctgtcagcctaagacctgcaacatgaggggaatctgcaacaacaaacaacactgtcactgcaaccatgaatgggcacccccatactgcaaggacaaaggctatggaggtagtgctgatagtggcccacctcctaagaacaacatggaaggattaaatgtgatgggaaagttgcgttacctgtcactattgtgccttcttcctttggttgcttttttattattttgcttacatgtgctttttaagaaacgcacaaaaagtaaagaagatgaagaaggataagagaaatgggaaaaagaaggagactaaactttatacttcatttttaatatccaattttttaatagaaaaatatgaagccatgtctcactgtttaaataaaacttcatggacatttcatgtcaggattgcaagcattagctatcacagcaaaggattcctagcctattcttacttactctacagtgtcttaagcaatattaaaggttccttttccca

SEQ ID NO: 954 - DNA, 2406 bp, Homo sapiens
  source 1..2406: mol_type = unassigned DNA
atggcagtggatgggaccctcgtgtacatcagagtcactcttctgctgctctggcttggggtatttttgtctatttccggctactgtcaggctgggccctcccagcatttcacttccccggaagtggtgatccccttgaaggtgatcagcaggggcagaagtgcaaaggctcctggatggctctcctatagtctgcggtttgggggccagaaacacgttgttcatatgagggtcaagaagctcttagtttctagacacctcccagtgttcacctacacagatgaccgtgcactcctggaggatcagctcttcatcccagatgactgttactatcatggttacgtggaggcagcccctgagtctctggttgtgttcagtgcttgttttgggggctttcgaggagtattaaaaataagtggcctcacttatgaaattgaacccatcaggcactctgccacatttgaacacctggtttataagataaacagtaatgagacacaattcccagctatgagatgtggcttaacagagaaggaagtagcacgccaacagttggaatttgaagaggctgagaactcagctctggaaccaaaatctgctggtgactggtggactcatgcatggtttctggagctagttgttgtggtgaaccatgatttcttcatttactctcaaagcaacatctcaaaggtgcaagaggatgtatttcttgttgtcaacatagtggattccatgtataagcagttaggtacttacataattttgattggaattgaaatttggaatcaaggaaatgttttcccaatgacaagcatagaacaggtcctgaacgatttctctcaatggaaacaaatcagtctttcccagctacagcatgatgctgcacatatgttcataaaaaattcacttataagtatacttggcctagcctatgttgcaggaatatgtcgtccacctattgattgtggagttgataattttcaaggagatacctggtctctttttgccaacactgtggcccatgagttaggtcatacgttaggtatgcagcatgatgaagaattctgtttttgtggggaaagaggttgcatcatgaatacttttagagtgccagcagagaaattcaccaattgcagttacgctgattttatgaagaccaccttaaaccagggatcatgtctgcataatcctccaagattgggggaaatctttatgctaaagcgctgtgggaatggtgtggttgaaagagaagagcagtgtgactgtggatccgtacagcagtgtgaacaagacgcctgttgtctgttgaactgcactctaaggcctggggctgcctgtgcttttgggctttgttgcaaagactgcaagttcatgccatcaggggaactctgtagacaagaggtcaatgaatgtgaccttccagaatggtgcaatggaacatctcatcagtgtccagaagatagatatgtgcaggacgggatcccctgtagtgacagtgcctactgctatcaaaagaggtgtaataaccatgaccagcattgcagggagatttttggtaaagatgcaaaaagtgcatctcagaattgctataaagaaatcaattctcagggaaaccgttttggtcactgtggtataaatggcacaacatacctaaaatgtcatatctctgatgtcttttgtgggagagttcaatgtgagaatgtgagagacattcctcttctccaagatcattttactttgcagcacactcatatcaatggtgtcacctgctggggtattgactatcatttaaggatgaacatatctgacattggtgaagtgaaagatggtactgtgtgtggcccaggaaagatctgcatccataagaagtgtgtcagtctgtctgtcttgtcacatgtctgccttcctgagacctgcaatatgaaggggatctgcaataacaaacatcactgccactgtggctatgggtggtccccaccctactgccagcacagaggctatgggggcagtattgacagtggcccagcatctgcaaagagaggagtttttttgccgctgattgtgattccttctttgtctgttttgactttcctgtttactgtcgggcttcttatgtatctacgacaatgttctggtcccaaagaaactaaggctcattcatcaggttaagaaaatgtctctaacttaatattccatgcattagtacactttagtctcttggcagtagaaacattagtacatccctgaaactgagcacatttctgaccatttccagaaagctgcaaagatcttcccttacattagtaccacaaacattgtcattaagttcaagttattcttaacatgtttctatctattgtttattgttttaagcagcaaataaagctacatccttccctcccttta

SEQ ID NO: 955 - DNA, 2891 bp, Homo sapiens
  source 1..2891: mol_type = unassigned DNA
gcggagcgagggaaacggactcggcggcgccggcatgaggagctgagcgtctcgggcgaggcgggctgacggcagcaccatgcaggcggcagtggctgtgtccgtgcccttcttgctgctctgtgtcctggggacctgccctccggcgcgctgcggccaggcaggagacgcctcattgatggagctagagaagaggaaggaaaaccgcttcgtggagcgccagagcatcgtgccactgcgcctcatctaccgctcgggcggcgaagacgaaagtcggcacgacgcgctcgacacgcgggtgcggggcgacctcggtggcccgcagttgactcatgttgaccaagcaagcttccaggttgatgcctttggaacgtcattcattctcgatgtcgtgctaaatcatgatttgctgtcctctgaatacatagagagacacattgaacatggaggcaagactgtggaagttaaaggaggagagcactgttactaccagggccatatccgaggaaaccctgactcatttgttgcattgtcaacatgccacggacttcatgggatgttctatgacgggaaccacacatatctcattgagccagaagaaaatgacactactcaagaggatttccattttcattcagtttacaaatccagactgtttgaattttccttggatgatcttccatctgaatttcagcaagtaaacattactccatcaaaatttattttgaagccaagaccaaaaaggagtaaacggcagcttcgtcgatatcctcgtaatgtagaagaagaaaccaaatacattgaactgatgattgtgaatgatcaccttatgtttaaaaaacatcggctttccgttgtacataccaatacctatgcgaaatctgtggtgaacatggcagatttaatatataaagaccaacttaagaccaggatagtattggttgctatggaaacctgggcgactgacaacaagtttgccatatctgaaaatccattgatcaccctacgtgagtttatgaaatacaggagggattttatcaaagagaaaagtgatgcagttcaccttttttcgggaagtcaatttgagagtagccggagcggggcagcttatattggtgggatttgctcgttgctgaaaggaggaggcgtgaatgaatttgggaaaactgatttaatggctgttacacttgcccagtcattagcccataatattggtattatctcagacaaaagaaagttagcaagtggtgaatgtaaatgcgaggacacgtggtccgggtgcataatgggagacactggctattatcttcctaaaaagttcacccagtgtaatattgaagagtatcatgacttcctgaatagtggaggtggtgcctgccttttcaacaaaccttctaagcttcttgatcctcctgagtgtggcaatggcttcattgaaactggagaggagtgtgattgtggaaccccggccgaatgtgtccttgaaggagcagagtgttgtaagaaatgcaccttgactcaagactctcaatgcagtgacggtctttgctgtaaaaagtgcaagtttcagcctatgggcactgtgtgccgagaagcagtaaatgattgtgatattcgtgaaacgtgctcaggaaattcaagccagtgtgcccctaatattcataaaatggatggatattcatgtgatggtgttcagggaatttgctttggaggaagatgcaaaaccagagatagacaatgcaaatacatttgggggcaaaaggtgacagcatcagacaaatattgctatgagaaactgaatattgaagggacggagaagggtaactgtgggaaagacaaagacacatggatacagtgcaacaaacgggatgtgctttgtggttaccttttgtgtaccaatattggcaatatcccaaggcttggagaactcgatggtgaaatcacatctactttagttgtgcagcaaggaagaacattaaactgcagtggtgggcatgttaagcttgaagaagatgtagatcttggctatgtggaagatgggacaccttgtggtccccaaatgatgtgcttagaacacaggtgtcttcctgtggcttctttcaactttagtacttgcttgagcagtaaagaaggcactatttgctcaggaaatggagtttgcagtaatgagctgaagtgtgtgtgtaacagacactggataggttctgattgcaacacttacttccctcacaatgatgatgcaaagactggtatcactctgtctggcaatggtgttgctggcaccaatatcataataggcataattgctggcaccattttagtgctggccctcatattaggaataactgcgtggggttataaaaactatcgagaacagagacagttaccccagggagattatgtaaaaaagcctggagatggtgactctttttatagcgacattcctcccggagtcagcacaaactcagcatctagttctaagaagaggtcaaatgggctctctcattcttggagtgaaaggattccagacacaaaacatatttcagacatctgtgaaaatgggcgacctcgaagtaactcttggcaaggtaacctgggaggcaacaaaaagaaaatcagaggcaaaagatttagacctcggtctaattcaactgagactttatctcctgccaagtctccttcttcatcaactgggtctattgcctccagcagaaaatacccttacccaatgcctccacttcctgatgaggacaagaaagtgaaccgacaaagtgccaggctatgggagacatccatttaagatcaactgtttacatgtgatacatcgaaaactgtttacttcaacttttatagaaacccaggctcatggaatcactgcaaatctatctgct

SEQ ID NO: 956 - DNA, 3420 bp, Homo sapiens
  source 1..3420: mol_type = unassigned DNA
gcggagcgagggaaacggactcggcggcgccggcatgaggagctgagcgtctcgggcgaggcgggctgacggcagcaccatgcaggcggcagtggctgtgtccgtgcccttcttgctgctctgtgtcctggggacctgccctccggcgcgctgcggccaggcaggagacgcctcattgatggagctagagaagaggaaggaaaaccgcttcgtggagcgccagagcatcgtgccactgcgcctcatctaccgctcgggcggcgaagacgaaagtcggcacgacgcgctcgacacgcgggtgcggggcgacctcggtggcccgcagttgactcatgttgaccaagcaagcttccaggttgatgcctttggaacgtcattcattctcgatgtcgtgctaaatcatgatttgctgtcctctgaatacatagagagacacattgaacatggaggcaagactgtggaagttaaaggaggagagcactgttactaccagggccatatccgaggaaaccctgactcatttgttgcattgtcaacatgccacggacttcatgggatgttctatgacgggaaccacacatatctcattgagccagaagaaaatgacactactcaagaggatttccattttcattcagtttacaaatccagactgtttgaattttccttggatgatcttccatctgaatttcagcaagtaaacattactccatcaaaatttattttgaagccaagaccaaaaaggagtaaacggcagcttcgtcgatatcctcgtaatgtagaagaagaaaccaaatacattgaactgatgattgtgaatgatcaccttatgtttaaaaaacatcggctttccgttgtacataccaatacctatgcgaaatctgtggtgaacatggcagatttaatatataaagaccaacttaagaccaggatagtattggttgctatggaaacctgggcgactgacaacaagtttgccatatctgaaaatccattgatcaccctacgtgagtttatgaaatacaggagggattttatcaaagagaaaagtgatgcagttcaccttttttcgggaagtcaatttgagagtagccggagcggggcagcttatattggtgggatttgctcgttgctgaaaggaggaggcgtgaatgaatttgggaaaactgatttaatggctgttacacttgcccagtcattagcccataatattggtattatctcagacaaaagaaagttagcaagtggtgaatgtaaatgcgaggacacgtggtccgggtgcataatgggagacactggctattatcttcctaaaaagttcacccagtgtaatattgaagagtatcatgacttcctgaatagtggaggtggtgcctgccttttcaacaaaccttctaagcttcttgatcctcctgagtgtggcaatggcttcattgaaactggagaggagtgtgattgtggaaccccggccgaatgtgtccttgaaggagcagagtgttgtaagaaatgcaccttgactcaagactctcaatgcagtgacggtctttgctgtaaaaagtgcaagtttcagcctatgggcactgtgtgccgagaagcagtaaatgattgtgatattcgtgaaacgtgctcaggaaattcaagccagtgtgcccctaatattcataaaatggatggatattcatgtgatggtgttcagggaatttgctttggaggaagatgcaaaaccagagatagacaatgcaaatacatttgggggcaaaaggtgacagcatcagacaaatattgctatgagaaactgaatattgaagggacggagaagggtaactgtgggaaagacaaagacacatggatacagtgcaacaaacgggatgtgctttgtggttaccttttgtgtaccaatattggcaatatcccaaggcttggagaactcgatggtgaaatcacatctactttagttgtgcagcaaggaagaacattaaactgcagtggtgggcatgttaagcttgaagaagatgtagatcttggctatgtggaagatgggacaccttgtggtccccaaatgatgtgcttagaacacaggtgtcttcctgtggcttctttcaactttagtacttgcttgagcagtaaagaaggcactatttgctcaggaaatggagtttgcagtaatgagctgaagtgtgtgtgtaacagacactggataggttctgattgcaacacttacttccctcacaatgatgatgcaaagactggtatcactctgtctggcaatggtgttgctggcaccaatatcataataggcataattgctggcaccattttagtgctggccctcatattaggaataactgcgtggggttataacaatattttcaatttcaggtcaaatgggctctctcattcttggagtgaaaggattccagacacaaaacatatttcagacatctgtgaaaatgggcgacctcgaagtaactcttggcaaggtaacctgggaggcaacaaaaagaaaatcagaggcaaaagatttagacctcggtctaattcaactgagtatttaaacccatggttcaaaagagactataatgtagctaagtgggtagaagatgtgaataaaaacactgaaggaccatactttaggactttatctcctgccaagtctccttcttcatcaactgggtctattgcctccagcagaaaatacccttacccaatgcctccacttcctgatgaggacaagaaagtgaaccgacaaagtgccaggctatgggagacatccatttaagatcaactgtttacatgtgatacatcgaaaactgtttacttcaacttttatagaaacccaggctcatggaatcactgcaaatctatctgctcttcagacaatacgaagaccctctgagatgctacagaggagaggaagcggagtttcacatctggttaccattttctttttgtcattggcttaggatttaactaaccatgaaaagaactactgaaatattacactataacatggaacaataaaggtactggtatgttaatggataatccgcatgacagataatatgtagaaatattcataaagttaactcacatgacccaaatgtagcaagtttcctaaggtacaatagtggattcagaacttgacgttctgaggcacatcctcactgtaaacagtaatgctatatgcatgaagcttctgtttattgttttccatatttaaggaaacaacatcccataatagaaatgagcatgcagggctaaggcatataggatttttctgcaggactttaaagctttgaaaggccaatatcccataggctaactttaaacatgtatttttatttttgttttgttttttacttttcatatttatattagcatacaaggacaattgtatatatgtaacatttttaaaatttt

SEQ ID NO: 957 - DNA, 2784 bp, Homo sapiens
  source 1..2784: mol_type = unassigned DNA
gccggggctgggtggaggtggccgcggggaccccgggggcgcggagcgagggaaacggactcggcggcgccggcatgaggagctgagcgtctcgggcgaggcgggctgacggcagcaccatgcaggcggcagtggctgtgtccgtgcccttcttgctgctctgtgtcctggggacctgccctccggcgcgctgcggccaggcaggagacgcctcattgatggagctagagaagaggaaggaaaaccgcttcgtggagcgccagagcatcgtgccactgcgcctcatctaccgctcgggcggcgaagacgaaagtcggcacgacgcgctcgacacgcgggtgcggggcgacctcggtggcccgcagttgactcatgttgaccaagcaagcttccaggttgatgcctttggaacgtcattcattctcgatgtcgtgctaaatcatgatttgctgtcctctgaatacatagagagacacattgaacatggaggcaagactgtggaagttaaaggaggagagcactgttactaccagggccatatccgaggaaaccctgactcatttgttgcattgtcaacatgccacggacttcatgggatgttctatgacgggaaccacacatatctcattgagccagaagaaaatgacactactcaagaggatttccattttcattcagtttacaaatccagactgtttgaattttccttggatgatcttccatctgaatttcagcaagtaaacattactccatcaaaatttattttgaagccaagaccaaaaaggagtaaacggcagcttcgtcgatatcctcgtaatgtagaagaagaaaccaaatacattgaactgatgattgtgaatgatcaccttatgtttaaaaaacatcggctttccgttgtacataccaatacctatgcgaaatctgtggtgaacatggcagatttaatatataaagaccaacttaagaccaggatagtattggttgctatggaaacctgggcgactgacaacaagtttgccatatctgaaaatccattgatcaccctacgtgagtttatgaaatacaggagggattttatcaaagagaaaagtgatgcagttcaccttttttcgggaagtcaatttgagagtagccggagcggggcagcttatattggtgggatttgctcgttgctgaaaggaggaggcgtgaatgaatttgggaaaactgatttaatggctgttacacttgcccagtcattagcccataatattggtattatctcagacaaaagaaagttagcaagtggtgaatgtaaatgcgaggacacgtggtccgggtgcataatgggagacactggctattatcttcctaaaaagttcacccagtgtaatattgaagagtatcatgacttcctgaatagtggaggtggtgcctgccttttcaacaaaccttctaagcttcttgatcctcctgagtgtggcaatggcttcattgaaactggagaggagtgtgattgtggaaccccggccgaatgtgtccttgaaggagcagagtgttgtaagaaatgcaccttgactcaagactctcaatgcagtgacggtctttgctgtaaaaagtgcaagtttcagcctatgggcactgtgtgccgagaagcagtaaatgattgtgatattcgtgaaacgtgctcaggaaattcaagccagtgtgcccctaatattcataaaatggatggatattcatgtgatggtgttcagggaatttgctttggaggaagatgcaaaaccagagatagacaatgcaaatacatttgggggcaaaaggtgacagcatcagacaaatattgctatgagaaactgaatattgaagggacggagaagggtaactgtgggaaagacaaagacacatggatacagtgcaacaaacgggatgtgctttgtggttaccttttgtgtaccaatattggcaatatcccaaggcttggagaactcgatggtgaaatcacatctactttagttgtgcagcaaggaagaacattaaactgcagtggtgggcatgttaagcttgaagaagatgtagatcttggctatgtggaagatgggacaccttgtggtccccaaatgatgtgcttagaacacaggtgtcttcctgtggcttctttcaactttagtacttgcttgagcagtaaagaaggcactatttgctcaggaaatggagtttgcagtaatgagctgaagtgtgtgtgtaacagacactggataggttctgattgcaacacttacttccctcacaatgatgatgcaaagactggtatcactctgtctggcaatggtgttgctggcaccaatatcataataggcataattgctggcaccattttagtgctggccctcatattaggaataactgcgtggggttataaaaactatcgagaacagagacagttaccccagggagattatgtaaaaaagcctggagatggtgactctttttatagcgacattcctcccggagtcagcacaaactcagcatctagttctaagaagaggtcaaatgggctctctcattcttggagtgaaaggattccagacacaaaacatatttcagacatctgtgaaaatgggcgacctcgaagtaactcttggcaaggtaacctgggaggcaacaaaaagaaaatcagaggcaaaagatttagacctcggtctaattcaactgagtaagtctgaacctctaatggaaaaaggcactccaaggtcctgtgcaaatagtgtcaaaagtaaattaagcagatagtcaaagaactgt

SEQ ID NO: 958 - DNA, 9334 bp, Homo sapiens
  source 1..9334: mol_type = unassigned DNA
cgggcgctcgctccctgccgagctcttgtcgcccgcccgagcctttgccaggggatgaggtgggaggcgctagaaaccacttagctacagccaaccgcccaatgcagcactcgctcgctccccccgccagcggaagcgtccgcgaagcacaatgcagcactgagccgcggtggaggttgcagcgccacggccgccgcagcaccggccggggctgggtggaggtggccgcggggaccccgggggcgcggagcgagggaaacggactcggcggcgccggcatgaggagctgagcgtctcgggcgaggcgggctgacggcagcaccatgcaggcggcagtggctgtgtccgtgcccttcttgctgctctgtgtcctggggacctgccctccggcgcgctgcggccaggcaggagacgcctcattgatggagctagagaagaggaaggaaaaccgcttcgtggagcgccagagcatcgtgccactgcgcctcatctaccgctcgggcggcgaagacgaaagtcggcacgacgcgctcgacacgcgggtgcggggcgacctcggtggcccgcagttgactcatgttgaccaagcaagcttccaggttgatgcctttggaacgtcattcattctcgatgtcgtgctaaatcatgatttgctgtcctctgaatacatagagagacacattgaacatggaggcaagactgtggaagttaaaggaggagagcactgttactaccagggccatatccgaggaaaccctgactcatttgttgcattgtcaacatgccacggacttcatgggatgttctatgacgggaaccacacatatctcattgagccagaagaaaatgacactactcaagaggatttccattttcattcagtttacaaatccagactgtttgaattttccttggatgatcttccatctgaatttcagcaagtaaacattactccatcaaaatttattttgaagccaagaccaaaaaggagtaaacggcagcttcgtcgatatcctcgtaatgtagaagaagaaaccaaatacattgaactgatgattgtgaatgatcaccttatgtttaaaaaacatcggctttccgttgtacataccaatacctatgcgaaatctgtggtgaacatggcagatttaatatataaagaccaacttaagaccaggatagtattggttgctatggaaacctgggcgactgacaacaagtttgccatatctgaaaatccattgatcaccctacgtgagtttatgaaatacaggagggattttatcaaagagaaaagtgatgcagttcaccttttttcgggaagtcaatttgagagtagccggagcggggcagcttatattggtgggatttgctcgttgctgaaaggaggaggcgtgaatgaatttgggaaaactgatttaatggctgttacacttgcccagtcattagcccataatattggtattatctcagacaaaagaaagttagcaagtggtgaatgtaaatgcgaggacacgtggtccgggtgcataatgggagacactggctattatcttcctaaaaagttcacccagtgtaatattgaagagtatcatgacttcctgaatagtggaggtggtgcctgccttttcaacaaaccttctaagcttcttgatcctcctgagtgtggcaatggcttcattgaaactggagaggagtgtgattgtggaaccccggccgaatgtgtccttgaaggagcagagtgttgtaagaaatgcaccttgactcaagactctcaatgcagtgacggtctttgctgtaaaaagtgcaagtttcagcctatgggcactgtgtgccgagaagcagtaaatgattgtgatattcgtgaaacgtgctcaggaaattcaagccagtgtgcccctaatattcataaaatggatggatattcatgtgatggtgttcagggaatttgctttggaggaagatgcaaaaccagagatagacaatgcaaatacatttgggggcaaaaggtgacagcatcagacaaatattgctatgagaaactgaatattgaagggacggagaagggtaactgtgggaaagacaaagacacatggatacagtgcaacaaacgggatgtgctttgtggttaccttttgtgtaccaatattggcaatatcccaaggcttggagaactcgatggtgaaatcacatctactttagttgtgcagcaaggaagaacattaaactgcagtggtgggcatgttaagcttgaagaagatgtagatcttggctatgtggaagatgggacaccttgtggtccccaaatgatgtgcttagaacacaggtgtcttcctgtggcttctttcaactttagtacttgcttgagcagtaaagaaggcactatttgctcaggaaatggagtttgcagtaatgagctgaagtgtgtgtgtaacagacactggataggttctgattgcaacacttacttccctcacaatgatgatgcaaagactggtatcactctgtctggcaatggtgttgctggcaccaatatcataataggcataattgctggcaccattttagtgctggccctcatattaggaataactgcgtggggttataaaaactatcgagaacagaggtcaaatgggctctctcattcttggagtgaaaggattccagacacaaaacatatttcagacatctgtgaaaatgggcgacctcgaagtaactcttggcaaggtaacctgggaggcaacaaaaagaaaatcagaggcaaaagatttagacctcggtctaattcaactgagactttatctcctgccaagtctccttcttcatcaactgggtctattgcctccagcagaaaatacccttacccaatgcctccacttcctgatgaggacaagaaagtgaaccgacaaagtgccaggctatgggagacatccatttaagatcaactgtttacatgtgatacatcgaaaactgtttacttcaacttttatagaaacccaggctcatggaatcactgcaaatctatctgctcttcagacaatacgaagaccctctgagatgctacagaggagaggaagcggagtttcacatctggttaccattttctttttgtcattggcttaggatttaactaaccatgaaaagaactactgaaatattacactataacatggaacaataaaggtactggtatgttaatggataatccgcatgacagataatatgtagaaatattcataaagttaactcacatgacccaaatgtagcaagtttcctaaggtacaatagtggattcagaacttgacgttctgaggcacatcctcactgtaaacagtaatgctatatgcatgaagcttctgtttattgttttccatatttaaggaaacaacatcccataatagaaatgagcatgcagggctaaggcatataggatttttctgcaggactttaaagctttgaaaggccaatatcccataggctaactttaaacatgtatttttatttttgttttgttttttacttttcatatttatattagcatacaaggacaattgtatatatgtaacatttttaaaattttaaaaaaatgcagctgttacacacaagtgtattttgccaaatgcctaaaaattccgtcacaatcacatcatcgtcatccatccagtgatcttcaaagactataagcaggtaatgtaaatatagtggtcaatgctgtaaatgtgtctctccataattcgtatttgtccaaaacatgtgatatccctttaacctgtgcacagtctggaggcagttttattgagtgagtagttgagtgagagaacaaaatgcccagcaaaacttctggcctccacagtttgctgatgcaggagcccactctgctgccgatgggctgctccctggaaatcatctatcccatccgtccatcccatctcatcccagtgagccagcccctcagcagtgtgtgctgctgagattaagcaagtgcaccaaagacacatgagacaacgtactgccagtgagctggtagcttctggtttgccaatactctaaccctttgtggcctgaagttttgttccttggcaaaactttgtagtcacccttatctgtgaaatgaatgacttgttttaacaaaaacaactttgacactgttgattaagaatatttgtcatcactgggatgtgaatcccaacaagtcattctgcactgactctgaagcaagatgacggaagattctactgtttgagttgagcagcttcaaccattcataaagggttaagttagatctaaaccacagagatgcagcatctgcgaagttacactaacagctggtgggggaaagaatctgatgctttgaaacatatatttttaatccataggaaaataagattctattttaaaagacccttctttaaaaccaaagtttgatagctgttataatggcagatctgtcattccaaaagaaagctagctaccctagtgaggctggagattgatgggctcaatcacatggtctgctctgaagtatacttctgatttcctcatttgctgtgtgttcttaagaggaatggaatctgcagacaggttttcagatatactctcttaaatttgatcctctcccatagtatccatggacaaaatccatatcatcttcatatgtaatcaatttgattacatatcatgcccaaactgaagggccgagttagaaggcagcattttatactgtgtgtttatgtcttctgtaatggacctctcttttgaaagtctttgaaatgtttggaaagcaatttaatgatccaaaattacataatgtaaaacagcatttttcatgacaggaagggatgtgattgttgatatgaccataaagcgatccatcaggccaaggtttgggtgagtgttgggcagtgttgccacatagctcaagccaagaacagaagggcagacagattgaaagatgtagcaaataaagtgactttttaccaagatcactgtaacgtgcactgaatgtttcctggtactgagtgtacaaaaggctaatgctataaggtttattttgactataaaagagtttatagatttgaatataaggtgcctcatgtaaatatgcttcctagttacaggtacacaaactctaatttgaaagaatccacaaatggctagctgagaagttaacagatctctatcattcgtctgtgtgtctttcttccctcacctatttttacatgaaattattatttcaaatgaaaatcatgatcatgtgccttttgggagacatggtttctctagaggtatatagtttgtaattacccgccttggtaataaccttcctgtggaactgactaaaaatttttgttttatttgtagagattatgatttgaggtatacagtaactttaatgttctattcttggaatctactctatctcccatgtttaaacattcttagagccatttgtgggattcattgacaaatttatagtctcaagggagagtttcaagaagtatctatatgtatactcatggttggggttctagaggcattacatctaaatatttatgacttttcatccaccgaggtaggtagcattaaatatacaagcacagcattatttctctttaaatatctattttggagagaaactttgaggccgtatcacagtttatatcatgcaactaatatttatatttcccaatccactacaaaatcattgctaagcagaagagagcagttatttggcctttatgttccattgtatgcctttttcccctcttccagttttatgcattgataagactacagattggcaccctgctgcctgagaagttccatttatccatagtcattgcagtgcagtaaaccctgatttaaaggaacatttaagtctctccagtaagtgtgaacaggaaggcatgggatagaagagagtccttatggagtggactggccacatgaactgtcctccagccactctttatttagatgggaagtggcatggtcctctgaacgctgcaggctggaaatgatccccagggcacatgcaatctgtggaaaggaatacatcggacagtgcaacatggtgagggctttcaatttgctgtggttgctgtatttttaacaagacacccggagcttcgattaggaataacctatcattagagttgttcctttaaaaaatgttgatgaataaagcaaatgtgggtttaaaatgccaacttatttttcactttgatattggtgctttattaagtgataccatagtttctctctcttttccctgttactttaaaaagaattttaaaattgtgtttgtatataaggtcagtctggcatagaatttctgaaagtaacattaataggatttctaaagaagttgtcagaaagacaaaattggatattctctgcactttcagagaaggactatttatgtttgaatttcataacaggcttacatttcttttctattgattcccttgcatatctacataatttaatcctgtctattgtcccagatctcttgtggctactttacctgttaccttttttgggattttgttctttatgttttacagttaccttcggaccagaagatatatggtatttttattcacttttttcagtgttttaaaataaggtttgttcatttattcattttatccattcatttcctattgtcgtatagttctaaccatatatatagtactttaaatattttcttatgttattatttaacacaataataaattcttatctaaagaaaagattattttactttattttacttaaaggaaagagaatttattggcaggatattgagtagcttgtagagtatatggaaggggagagccaagttaggaactggcaggagcgaggagggacaagacagctgcctgcacagtctgataggacacatctggctgctgccactggatgcccacatgggcagcgtgttgtaaatatcaccctaccagttggtaagttggcatgaattttccatgaaacacttgactgccatttgcagcatcatatctactttttatgcacctaattatatttttcctttcacttttatgtttttttctaaaactgccacctaaatacctttccactccgttaaatgtatggagtcaagataaatttctcattcttgctctacagtttaagatgtataagaagtaaacacttccgtggaatagggcttaatttggggctcaaatgttttgttttcctcctgagatgtttttgaatggataagactactctggttttggatgcagcaacttttctcctggcatggaagaactaaggactttgataaacagtttcccattgatagtataatataatgaggggcccagtctgctcttgtgaaaattggctgagcggcagcagcccatcccagctgtgtgtgagtagccccgctgttaaaagtacacctgctgggaattgttggcacatgctcatagcatatgctctgtgggggaggtgcttttaattccaagaggagcttttctcccacatctgcggatgcagaacaaagatgcagcaggactttagaaaacaggagtgtttctactgacattttattcattgctttgttagtcccgcaaatggagcaacttctggttgtttgtaagcagaaaaacaaaacattcaaaaccaaaaacctaattagtacttttgtcctttatatccctaggatgctctagggagtagaggtggcaggcatctttatcttcacccactggcacattagcagcttatgcaacttaggaagtcactgggagatgagtcctaaaagcctgaatttcaggatggggaggagataagaagcagagaactttgggagaccatggggcatttagtcctggcatagacacagaatggatattcacaggaagattcctgaggccagatatgcaggagagcacacattgtcacaaggggtgtggtgggaagagaggtgctggatgcctaagacagacttctgtgcttggcagattgactgagtgttgactctgaatactttgtggtccagtccataataggccagtcactcctgcctgatgcatccctgttgcactgttcataaaacctgtatcatatggggaagcttcaaggctggcaggcttttcatcaagtaatcatcattccatgttcctacgtatccttgaaatcaaaaccaggcaatatgtgtgtttttggttttgttttacaaaaaggcatacaatgagacgaattcttaagataatgcacatacagaatcatcaataaagtttcaaagagtttatgaagaaaaggtattttcctttcttgtaaaaaatgttatatatatataatattctgatctgcattcaccttagggcttagcctcttattttatgaattttcaggctgtgatttgtgttggatggctaagctctaaaataatgcaaatagccccaatctttaaatatagcggtgctaagttgaacaagtaacacaatacagaaaatgctgatatgaatacttagtaataatacaaaagttcctgctaaattatatatgtgtatcactgcctgactagaaaccccacttttcttttctaatccagcacaaaatcaaactctgattctacaaccagtctttttaaagggcaaaaatgactcaacacctttgttttgtatggaaaacttttttttttacactaactgcaaaactgctttaaaaaaaggcttattcaggatagataagcatgtactccttttttaacttgctggaagacttgcccctccaaactagcacccccaaaagacaacttctttcagaaacggggtgttttacctaaacatagtagcttacatgttagccagcagtaggtcggcactagtgttttccacggttatcacctttgacaggtgatgtgcatctatagatagtggaagccaccccatgaggaggtgttaatagcagcatggtttcacttttggtaatcaggtaatcatgtgtatatacttagattcgcattattttaacatttctctgctactctgcacttcaggttcgttaagctattttaataattactggggttatggcaaacaccaatggaaatgtatatggcaactgctttcctgagcaagtgtgatttgttttatggctgttcaagttataaaattgttcttacattgtaggtaaacaaaatcttgatgtttttaaaggtcactgtaacttaaggttcaaatttctggcacagttttattagtattcacttcggaagctaataagataccatggttttctatgttactcccattgtaacattagtaaagtgactttcaataaaagatttatgttattttga

SEQ ID NO: 959 - DNA, 9144 bp, Homo sapiens
  source 1..9144: mol_type = unassigned DNA
catgaggagctgagcgtctcgggcgaggcgggctgacggcagcaccatgcaggcggcagtggctgtgtccgtgcccttcttgctgctctgtgtcctggggacctgccctccggcgcgctgcggccaggcaggagacgcctcattgatggagctagagaagaggaaggaaaaccgcttcgtggagcgccagagcatcgtgccactgcgcctcatctaccgctcgggcggcgaagacgaaagtcggcacgacgcgctcgacacgcgggtgcggggcgacctcggtggcccgcagttgactcatgttgaccaagcaagcttccaggttgatgcctttggaacgtcattcattctcgatgtcgtgctaaatcatgatttgctgtcctctgaatacatagagagacacattgaacatggaggcaagactgtggaagttaaaggaggagagcactgttactaccagggccatatccgaggaaaccctgactcatttgttgcattgtcaacatgccacggacttcatgggatgttctatgacgggaaccacacatatctcattgagccagaagaaaatgacactactcaagaggatttccattttcattcagtttacaaatccagactgtttgaattttccttggatgatcttccatctgaatttcagcaagtaaacattactccatcaaaatttattttgaagccaagaccaaaaaggagtaaacggcagcttcgtcgatatcctcgtaatgtagaagaagaaaccaaatacattgaactgatgattgtgaatgatcaccttatgtttaaaaaacatcggctttccgttgtacataccaatacctatgcgaaatctgtggtgaacatggcagatttaatatataaagaccaacttaagaccaggatagtattggttgctatggaaacctgggcgactgacaacaagtttgccatatctgaaaatccattgatcaccctacgtgagtttatgaaatacaggagggattttatcaaagagaaaagtgatgcagttcaccttttttcgggaagtcaatttgagagtagccggagcggggcagcttatattggtgggatttgctcgttgctgaaaggaggaggcgtgaatgaatttgggaaaactgatttaatggctgttacacttgcccagtcattagcccataatattggtattatctcagacaaaagaaagttagcaagtggtgaatgtaaatgcgaggacacgtggtccgggtgcataatgggagacactggctattatcttcctaaaaagttcacccagtgtaatattgaagagtatcatgacttcctgaatagtggaggtggtgcctgccttttcaacaaaccttctaagcttcttgatcctcctgagtgtggcaatggcttcattgaaactggagaggagtgtgattgtggaaccccggccgaatgtgtccttgaaggagcagagtgttgtaagaaatgcaccttgactcaagactctcaatgcagtgacggtctttgctgtaaaaagtgcaagtttcagcctatgggcactgtgtgccgagaagcagtaaatgattgtgatattcgtgaaacgtgctcaggaaattcaagccagtgtgcccctaatattcataaaatggatggatattcatgtgatggtgttcagggaatttgctttggaggaagatgcaaaaccagagatagacaatgcaaatacatttgggggcaaaaggtgacagcatcagacaaatattgctatgagaaactgaatattgaagggacggagaagggtaactgtgggaaagacaaagacacatggatacagtgcaacaaacgggatgtgctttgtggttaccttttgtgtaccaatattggcaatatcccaaggcttggagaactcgatggtgaaatcacatctactttagttgtgcagcaaggaagaacattaaactgcagtggtgggcatgttaagcttgaagaagatgtagatcttggctatgtggaagatgggacaccttgtggtccccaaatgatgtgcttagaacacaggtgtcttcctgtggcttctttcaactttagtacttgcttgagcagtaaagaaggcactatttgctcaggaaatggagtttgcagtaatgagctgaagtgtgtgtgtaacagacactggataggttctgattgcaacacttacttccctcacaatgatgatgcaaagactggtatcactctgtctggcaatggtgttgctggcaccaatatcataataggcataattgctggcaccattttagtgctggccctcatattaggaataactgcgtggggttataaaaactatcgagaacagaggtcaaatgggctctctcattcttggagtgaaaggattccagacacaaaacatatttcagacatctgtgaaaatgggcgacctcgaagtaactcttggcaaggtaacctgggaggcaacaaaaagaaaatcagaggcaaaagatttagacctcggtctaattcaactgagtatttaaacccatggttcaaaagagactataatgtagctaagtgggtagaagatgtgaataaaaacactgaaggaccatactttaggactttatctcctgccaagtctccttcttcatcaactgggtctattgcctccagcagaaaatacccttacccaatgcctccacttcctgatgaggacaagaaagtgaaccgacaaagtgccaggctatgggagacatccatttaagatcaactgtttacatgtgatacatcgaaaactgtttacttcaacttttatagaaacccaggctcatggaatcactgcaaatctatctgctcttcagacaatacgaagaccctctgagatgctacagaggagaggaagcggagtttcacatctggttaccattttctttttgtcattggcttaggatttaactaaccatgaaaagaactactgaaatattacactataacatggaacaataaaggtactggtatgttaatggataatccgcatgacagataatatgtagaaatattcataaagttaactcacatgacccaaatgtagcaagtttcctaaggtacaatagtggattcagaacttgacgttctgaggcacatcctcactgtaaacagtaatgctatatgcatgaagcttctgtttattgttttccatatttaaggaaacaacatcccataatagaaatgagcatgcagggctaaggcatataggatttttctgcaggactttaaagctttgaaaggccaatatcccataggctaactttaaacatgtatttttatttttgttttgttttttacttttcatatttatattagcatacaaggacaattgtatatatgtaacatttttaaaattttaaaaaaatgcagctgttacacacaagtgtattttgccaaatgcctaaaaattccgtcacaatcacatcatcgtcatccatccagtgatcttcaaagactataagcaggtaatgtaaatatagtggtcaatgctgtaaatgtgtctctccataattcgtatttgtccaaaacatgtgatatccctttaacctgtgcacagtctggaggcagttttattgagtgagtagttgagtgagagaacaaaatgcccagcaaaacttctggcctccacagtttgctgatgcaggagcccactctgctgccgatgggctgctccctggaaatcatctatcccatccgtccatcccatctcatcccagtgagccagcccctcagcagtgtgtgctgctgagattaagcaagtgcaccaaagacacatgagacaacgtactgccagtgagctggtagcttctggtttgccaatactctaaccctttgtggcctgaagttttgttccttggcaaaactttgtagtcacccttatctgtgaaatgaatgacttgttttaacaaaaacaactttgacactgttgattaagaatatttgtcatcactgggatgtgaatcccaacaagtcattctgcactgactctgaagcaagatgacggaagattctactgtttgagttgagcagcttcaaccattcataaagggttaagttagatctaaaccacagagatgcagcatctgcgaagttacactaacagctggtgggggaaagaatctgatgctttgaaacatatatttttaatccataggaaaataagattctattttaaaagacccttctttaaaaccaaagtttgatagctgttataatggcagatctgtcattccaaaagaaagctagctaccctagtgaggctggagattgatgggctcaatcacatggtctgctctgaagtatacttctgatttcctcatttgctgtgtgttcttaagaggaatggaatctgcagacaggttttcagatatactctcttaaatttgatcctctcccatagtatccatggacaaaatccatatcatcttcatatgtaatcaatttgattacatatcatgcccaaactgaagggccgagttagaaggcagcattttatactgtgtgtttatgtcttctgtaatggacctctcttttgaaagtctttgaaatgtttggaaagcaatttaatgatccaaaattacataatgtaaaacagcatttttcatgacaggaagggatgtgattgttgatatgaccataaagcgatccatcaggccaaggtttgggtgagtgttgggcagtgttgccacatagctcaagccaagaacagaagggcagacagattgaaagatgtagcaaataaagtgactttttaccaagatcactgtaacgtgcactgaatgtttcctggtactgagtgtacaaaaggctaatgctataaggtttattttgactataaaagagtttatagatttgaatataaggtgcctcatgtaaatatgcttcctagttacaggtacacaaactctaatttgaaagaatccacaaatggctagctgagaagttaacagatctctatcattcgtctgtgtgtctttcttccctcacctatttttacatgaaattattatttcaaatgaaaatcatgatcatgtgccttttgggagacatggtttctctagaggtatatagtttgtaattacccgccttggtaataaccttcctgtggaactgactaaaaatttttgttttatttgtagagattatgatttgaggtatacagtaactttaatgttctattcttggaatctactctatctcccatgtttaaacattcttagagccatttgtgggattcattgacaaatttatagtctcaagggagagtttcaagaagtatctatatgtatactcatggttggggttctagaggcattacatctaaatatttatgacttttcatccaccgaggtaggtagcattaaatatacaagcacagcattatttctctttaaatatctattttggagagaaactttgaggccgtatcacagtttatatcatgcaactaatatttatatttcccaatccactacaaaatcattgctaagcagaagagagcagttatttggcctttatgttccattgtatgcctttttcccctcttccagttttatgcattgataagactacagattggcaccctgctgcctgagaagttccatttatccatagtcattgcagtgcagtaaaccctgatttaaaggaacatttaagtctctccagtaagtgtgaacaggaaggcatgggatagaagagagtccttatggagtggactggccacatgaactgtcctccagccactctttatttagatgggaagtggcatggtcctctgaacgctgcaggctggaaatgatccccagggcacatgcaatctgtggaaaggaatacatcggacagtgcaacatggtgagggctttcaatttgctgtggttgctgtatttttaacaagacacccggagcttcgattaggaataacctatcattagagttgttcctttaaaaaatgttgatgaataaagcaaatgtgggtttaaaatgccaacttatttttcactttgatattggtgctttattaagtgataccatagtttctctctcttttccctgttactttaaaaagaattttaaaattgtgtttgtatataaggtcagtctggcatagaatttctgaaagtaacattaataggatttctaaagaagttgtcagaaagacaaaattggatattctctgcactttcagagaaggactatttatgtttgaatttcataacaggcttacatttcttttctattgattcccttgcatatctacataatttaatcctgtctattgtcccagatctcttgtggctactttacctgttaccttttttgggattttgttctttatgttttacagttaccttcggaccagaagatatatggtatttttattcacttttttcagtgttttaaaataaggtttgttcatttattcattttatccattcatttcctattgtcgtatagttctaaccatatatatagtactttaaatattttcttatgttattatttaacacaataataaattcttatctaaagaaaagattattttactttattttacttaaaggaaagagaatttattggcaggatattgagtagcttgtagagtatatggaaggggagagccaagttaggaactggcaggagcgaggagggacaagacagctgcctgcacagtctgataggacacatctggctgctgccactggatgcccacatgggcagcgtgttgtaaatatcaccctaccagttggtaagttggcatgaattttccatgaaacacttgactgccatttgcagcatcatatctactttttatgcacctaattatatttttcctttcacttttatgtttttttctaaaactgccacctaaatacctttccactccgttaaatgtatggagtcaagataaatttctcattcttgctctacagtttaagatgtataagaagtaaacacttccgtggaatagggcttaatttggggctcaaatgttttgttttcctcctgagatgtttttgaatggataagactactctggttttggatgcagcaacttttctcctggcatggaagaactaaggactttgataaacagtttcccattgatagtataatataatgaggggcccagtctgctcttgtgaaaattggctgagcggcagcagcccatcccagctgtgtgtgagtagccccgctgttaaaagtacacctgctgggaattgttggcacatgctcatagcatatgctctgtgggggaggtgcttttaattccaagaggagcttttctcccacatctgcggatgcagaacaaagatgcagcaggactttagaaaacaggagtgtttctactgacattttattcattgctttgttagtcccgcaaatggagcaacttctggttgtttgtaagcagaaaaacaaaacattcaaaaccaaaaacctaattagtacttttgtcctttatatccctaggatgctctagggagtagaggtggcaggcatctttatcttcacccactggcacattagcagcttatgcaacttaggaagtcactgggagatgagtcctaaaagcctgaatttcaggatggggaggagataagaagcagagaactttgggagaccatggggcatttagtcctggcatagacacagaatggatattcacaggaagattcctgaggccagatatgcaggagagcacacattgtcacaaggggtgtggtgggaagagaggtgctggatgcctaagacagacttctgtgcttggcagattgactgagtgttgactctgaatactttgtggtccagtccataataggccagtcactcctgcctgatgcatccctgttgcactgttcataaaacctgtatcatatggggaagcttcaaggctggcaggcttttcatcaagtaatcatcattccatgttcctacgtatccttgaaatcaaaaccaggcaatatgtgtgtttttggttttgttttacaaaaaggcatacaatgagacgaattcttaagataatgcacatacagaatcatcaataaagtttcaaagagtttatgaagaaaaggtattttcctttcttgtaaaaaatgttatatatatataatattctgatctgcattcaccttagggcttagcctcttattttatgaattttcaggctgtgatttgtgttggatggctaagctctaaaataatgcaaatagccccaatctttaaatatagcggtgctaagttgaacaagtaacacaatacagaaaatgctgatatgaatacttagtaataatacaaaagttcctgctaaattatatatgtgtatcactgcctgactagaaaccccacttttcttttctaatccagcacaaaatcaaactctgattctacaaccagtctttttaaagggcaaaaatgactcaacacctttgttttgtatggaaaacttttttttttacactaactgcaaaactgctttaaaaaaaggcttattcaggatagataagcatgtactccttttttaacttgctggaagacttgcccctccaaactagcacccccaaaagacaacttctttcagaaacggggtgttttacctaaacatagtagcttacatgttagccagcagtaggtcggcactagtgttttccacggttatcacctttgacaggtgatgtgcatctatagatagtggaagccaccccatgaggaggtgttaatagcagcatggtttcacttttggtaatcaggtaatcatgtgtatatacttagattcgcattattttaacatttctctgctactctgcacttcaggttcgttaagctattttaataattactggggttatggcaaacaccaatggaaatgtatatggcaactgctttcctgagcaagtgtgatttgttttatggctgttcaagttataaaattgttcttacattgtaggtaaacaaaatcttgatgtttttaaaggtcactgtaacttaaggttcaaatttctggcacagttttattagtattcacttcggaagctaataagataccatggttttctatgttactcccattgtaacattagtaaagtgactttcaataaaagatttatgttattttga

SEQ ID NO: 960 - DNA, 7052 bp, Homo sapiens
  source 1..7052: mol_type = unassigned DNA
gaatgaaccagggagtttcattctgtctcactggagaggaggcagggacagacccagcagcacccacctgagcgagaagagcagacaccgtgctcctggaatcacccagcatgttgcaaggtctcctgccagtcagtctcctcctctctgttgcagtaagtgctataaaagaactccctggggtgaagaagtatgaagtggtttatcctataagacttcatccactgcataaaagagaggccaaagagccagagcaacaggaacaatttgaaactgaattaaagtataaaatgacaattaatggaaaaattgcagtgctttatttgaaaaaaaacaagaacctccttgcaccaggctacacggaaacatattataattccactggaaaggagatcaccacaagcccacaaattatggatgattgttattatcaaggacatattcttaatgaaaaggtttctgacgctagcatcagcacatgtaggggtctaaggggctacttcagtcagggggatcaaagatactttattgaacctttaagccccatacatcgggatggacaggagcatgcactcttcaagtataaccctgatgaaaagaattatgacagcacctgtgggatggatggtgtgttgtgggcccacgatttgcagcagaacattgccctacctgccaccaaactagtaaaattgaaagacaggaaggttcaggaacatgagaaatacatagaatattatttggtcctggataatggtgagtttaaaaggtacaatgagaatcaagatgagatcagaaagagggtatttgagatggctaattatgtcaacatgctttataaaaagctcaatactcatgtggccttagttggtatggaaatctggactgacaaggataagataaagataaccccaaatgcaagcttcaccttggagaatttttctaaatggagggggagtgttctctcaagaagaaagcgtcatgatattgctcagttaatcacagcaacagaacttgctggaacgactgtgggtcttgcatttatgtctacaatgtgttctccttattctgttggcgttgttcaggaccacagcgataatcttcttagagttgcagggacaatggcacatgaaatgggccacaactttggaatgtttcatgacgactattcttgcaagtgtccttctacaatatgtgtgatggacaaagcactgagcttctatatacccacagacttcagttcctgcagccgtctcagctatgacaagttttttgaagataaattatcaaattgcctctttaatgctccattgcctacagatatcatatccactccaatttgtgggaaccagttggtggaaatgggagaggactgtgattgtgggacatctgaggaatgtaccaatatttgctgtgatgctaagacatgtaaaatcaaagcaacttttcaatgtgcattaggagaatgttgtgaaaaatgccaatttaaaaaggctgggatggtgtgcagaccagcaaaagatgagtgcgacctgcctgaaatgtgtaatggtaaatctggtaattgtcctgatgatagattccaagtcaatggcttcccttgccatcacgggaagggccactgcttgatggggacatgccccacactgcaggagcagtgcacagagctgtggggaccaggaactgaggttgcagataagtcatgttacaacaggaatgaaggtgggtcaaagtacgggtactgtcgcagagtggatgacacactcattccctgcaaagcaaatgataccatgtgtgggaagttgttctgtcaaggtgggtcggataatttgccctggaaaggacggatagtgactttcctgacatgtaaaacatttgatcctgaagacacaagtcaagaaataggcatggtggccaatggaactaagtgtggcgataacaaggtttgcattaatgcagaatgtgtggatattgagaaagcctacaaatcaaccaattgctcatctaagtgcaaaggacatgctgtgtgtgaccatgagctccagtgtcaatgtgaggaaggatggatccctcccgactgcgatgactcctcagtggtcttccacttctccattgtggttggggtgctgttcccaatggcggtcatttttgtggtggttgctatggtaatccggcaccagagctccagagaaaagcagaagaaagatcagaggccactatctaccactggcaccaggccacacaaacagaagaggaaaccccagatggtaaaggctgttcaaccccaagagatgagtcagatgaagccccatgtgtatgatctgccagtagaaggcaatgagcccccagcctcttttcataaagacacaaacgcacttccccctactgttttcaaggataatccagtgtctacacctaaggactcaaatccaaaagcatgaagcaacagctaagcaagaactaatggctaaattatcaacttggaaaactggaaaatctggatggcagagaaatatactatctatctcaccagtatttgctctcgactcaagaaggttaacattttctgattcatgttagactttgaagagactaaagaaaattttcaagaggaacatatgcctgagaacctttgcatgaatttaaaatttcaattatccattcttataagaaggaagatgattgtaaagaaatatctccgaagttaaaatctgtaataggaattgattcattctctaatgaaaacaaaacataaaaacatcacactaatcttggaggaataagaaaaattgtacatccattaaatgtacaattgattgcaacatcttgattgttttaaccattaacttgtcaaattacaatcacagttaagaaaatgatgtaaaattctgttttgtggatctctttcctagattagcttctgaaatcattattagctatatcatttgaggttttctacaatttggtataactaagaatttaaaaatgttttatcatatatatttgtataattaattactggcatggttaaagtggttttcactttttaaatggagaaaatttcagttaaattaataggataaaccaggttgcgaactggtgacctgtaggccatgtttgcactgcaaatatatttggtctgaatgatattgatattggacacatagtacttttacatgttttgaatgtattgctaatatttaaaaattgagagatcttgcataaacaatagattcccagctttgtcagatgtaatctaaaagtaatccgatgctttgtcaacaacagacttacattgcccatagcaaccgtcagcttagttgatgggtaatgtagcaaacactattggtttcctaccaaataatcccctttttcctggcttttagaacaataattttgttcacctgcccacttctaggaaagaatatcctatctaatctatctatctcagggataaatccctatccttttaagtaagtcaagtcaattaaaataacctcatttttccttgctagtggtcgacttggagatgattttataatcctccccctccctttttttttttgctagtaagacgacagaggaattatgttacaacacttctggaaaatttttcctcgtctctttttctggatatgggcatctgaatactctagctggtactgctgcgctccacacggtgattatgaaggctgaaaaagatagatagagcagaaagatgaaaagaataaaacctggcctttcaatgatgtcatggaattggtagatcagtgactgctggagttacctcacactttcttggtactccttattatatgagccatacattttccttgttgtttaagccattttgaattggattttctctcactttcaacagagatcatcctaactagtaaagtagctgtttccataatcagggaacatgctttagttcatcatcacagctacagtttttcttgtatttgtctgcttcacccatttctatcaatcacttacctggtccccacaggcctgtcgcttcatgaggaactttatggttcatttacccttgcagtatgaggttctagataagcccactctggcctcaaaagtgaagctcagtcctcaggaaatccagagtccactgatcaaatcactgtcaaggatacaggctttttctccatgtggcatttgcagaagaacaactttaaaagtagagctttatctgccctgtgaggtttcagaagaccctcccctgacccagaaataaatccctatttcctggaaagccattatgtactcgtgaccaacttgtgaacttttctgtgttgttgttgttgttttttaaatatctgtccccagtaatagattcacctaatccttttttatactgatggaatggaaatcttaaatctatgaatcctcaactagccatgtaccataacccaagcaaaaactaaaccatacactctcaaaagcagtggcatgtgaacatgcctgcaagttcctaaatgatgtcactaggtccctgatgcagatgcatcatacgtcctatttgaagagaagaaatgcagtacaatgacaggaaaaccattattttatcatagaactgcgaacccaagtcctacaatgtttccctttcagctcaactgcagaatagtttagaacagactttttgatttcacaatactgtttccacacttacttatatccgtaactttctaactttaagggaattccgcttatttgacatttaactacctcagatatgccaccaaacctgttttcatcattagttatttttaccttgtctactttaaaacagtgaaattattaggttaaattatgtttttatccagttactctaagataccttagtgtttgtctacttattacaactcaccaaattactggttttatatggcctttgggaaggcttttagctttttataaaataatgaagtatgcatgaaaagaaagcaaattttagttggttgcagtcagagaatatggaaagggttattattataattaggattttattattcacattggaaatcactgctatgtgttaaggaattgaaggtggcctctggctagcagccattaagaaaatgagcccctgagttcaacgaccctcaaatgaagtgaagtctaccaataaccactgaataagcttggaattttagattccttcccagctgaatcttgacttcagccttgtgagacaccctgaagtagaggatgcagctaaattttgtccagattacacacccacagaaactgtatgataattaatatgtgttgtttaaagttgttatggtttggagatatttgttatgcagcaatagatagctgatacaaggaagtagagaacaaacattttctattagtctgttttcacatggctataaagaataccacctgagactgggtaatttataaagaaaggaggattaattgactcagatttccacatggcctaggaggcctcaggaaacttacaatcatgatgaaagaggaagcagaaacatctcatatgatggaagatgtgtatgaaggaggaactgtcaaacacttataaaaccatcagatctcttgagagcttactatctcgacaaaagcatgggggaaaccacccccatgatccaatcacctcccacctggtccctccctcaacatgtggagattatagcaattaaaaaaatgagatttggggggatggacacagagccaaaccatataatgttttaaatgctccagataggtttaggtaaaattaactatatttaataggctttcatcactgcaaaactttttttcctttctttgtgtctctagtctcttccatttgttctcccttctttactagcaccgaggatttgcttgaaatctctgatagccagtattctcatttatcatattctttctcactttgtgtttccttggtaattttggataactccttaaatttatcttccaaattactggtttttatattctgtactgtcagtcctcctgttcactaatttcaaaatttatagttgtttctcttgtttacttatatagttgtttctcttgtttacttaataacattctcttctttcctatcagtttaattttataaaggctaaccaattaactgtttttaacttatatttccagatattttaaaaattaaagcaaaatgtgtataaactttattactgcttcccacagtaaatatttttcagaagtacatgctttctcagccacttgactagtatgttccccatcattcaaagacaccattatttcctaagtgttatattgctatttttcagttggtgcatccaatattattatcagctttaatattgtttcatcatatgtcattgttcaaagaatccatctcttgagcgtaagctaaataatttgcatacactagcatctggatgtaatatggaaaaatatggaaatggttggggtgataagcaagtcttgcatattcttttctcctcaattttttttctccaaagtgggccaagccaagagtggcacagctgtgtggagatactgagctccaccttgtcagggaagatcccaactcaggagaaaacacctctaacaaaatctgtagccacgttggcacatctgcccttgaattcactttgtctcttttgctgcttccataaaaaggctttcccttgacaatgttaggcactttttagcaactaggcctgggtggtctgctacaatgcccaacacttaatacagtatcactattactgttagtagtatgctaagcgaatactattgttataaaaaaaatcctaagcatgaaaattacggtatacaatttattgtgaaggcaacttcttgtgaacattaaacggtttatctccttcacctcatattaaagtccatactcttgggatatatctgacatctcaatattaaatgactaagatgactaagtcgtttatgttgctcccacctcacacaaagttaaaactatttgttactttaaatagtttgacaatgttattttaaaatctggacaaatcacaaatataaaatacttatttaatttt

SEQ ID NO: 961 - DNA, 2543 bp, Homo sapiens
  source 1..2543: mol_type = unassigned DNA
actggagaggaggcagggacagacccagcagcacccacctgagcgagaagagcagacaccgtgctcctggaatcacccagcatgttgcaaggtctcctgccagtcagtctcctcctctctgttgcagtaagtgctataaaagaactccctggggtgaagaagtatgaagtggtttatcctataagacttcatccactgcataaaagagaggccaaagagccagagcaacaggaacaatttgaaactgaattaaagtataaaatgacaattaatggaaaaattgcagtgctttatttgaaaaaaaacaagaacctccttgcaccaggctacacggaaacatattataattccactggaaaggagatcaccacaagcccacaaattatggatgattgttattatcaaggacatattcttaatgaaaaggtttctgacgctagcatcagcacatgtaggggtctaaggggctacttcagtcagggggatcaaagatactttattgaacctttaagccccatacatcgggatggacaggagcatgcactcttcaagtataaccctgatgaaaagaattatgacagcacctgtgggatggatggtgtgttgtgggcccacgatttgcagcagaacattgccctacctgccaccaaactagtaaaattgaaagacaggaaggttcaggaacatgagaaatacatagaatattatttggtcctggataatggtgagttttaaacagtttgctgggagatgtcactgggtttttcaatgaacgcacatgaagcatggaagcaaagtcaagacatttgagaccaatgtggctgactggctcccaaaggatgaccacaacttttgctacatagctttataaaaagctcaatactcatgtggccttagttggtatggaaatctggactgacaaggataagataaagataaccccaaatgcaagcttcaccttggagaatttttctaaatggagggggagtgttctctcaagaagaaagcgtcatgatattgctcagttaatcacagcaacagaacttgctggaacgactgtgggtcttgcatttatgtctacaatgtgttctccttattctgttggcgttgttcaggaccacagcgataatcttcttagagttgcagggacaatggcacatgaaatgggccacaactttggaatgtttcatgacgactattcttgcaagtgtccttctacaatatgtgtgatggacaaagcactgagcttctatatacccacagacttcagttcctgcagccgtctcagctatgacaagttttttgaagataaattatcaaattgcctctttaatgctccattgcctacagatatcatatccactccaatttgtgggaaccagttggtggaaatgggagaggactgtgattgtgggacatctgaggaatgtaccaatatttgctgtgatgctaagacatgtaaaatcaaagcaacttttcaatgtgcattaggagaatgttgtgaaaaatgccaatttaaaaaggctgggatggtgtgcagaccagcaaaagatgagtgcgacctgcctgaaatgtgtaatggtaaatctggtaattgtcctgatgatagattccaagtcaatggcttcccttgccatcacgggaagggccactgcttgatggggacatgccccacactgcaggagcagtgcacagagctgtggggaccaggaactgaggttgcagataagtcatgttacaacaggaatgaaggtgggtcaaagtacgggtactgtcgcagagtggatgacacactcattccctgcaaagcaaatgataccatgtgtgggaagttgttctgtcaaggtgggtcggataatttgccctggaaaggacggatagtgactttcctgacatgtaaaacatttgatcctgaagacacaagtcaagaaataggcatggtggccaatggaactaagtgtggcgataacaaggtttgcattaatgcagaatgtgtggatattgagaaagcctacaaatcaaccaattgctcatctaagtgcaaaggacatgctgtgtgtgaccatgagctccagtgtcaatgtgaggaaggatggatccctcccgactgcgatgactcctcagtggtcttccgtagacttctccattgtggttggggtgctgttcccaatggcggtcatttttgtggtggttgctatggtaatccggcaccagagctccagagaaaagcagaagaaagatcagaggccactatctaccactggcaccaggccacacaaacagaagaggaaaccccagatggtaaaggctgttcaaccccaagagatgagtcagatgaagccccatgtgtatgatctgccagtagaaggcaatgagcccccagcctcttttcataaagacacaaacgcacttccccctactgttttcaaggataatccagtgtctacacctaaggactcaaatccaaaagcatgaagcaacagctaagcaagaactaatggctaaattatcaacttggaaaactggaaaatctggatggcaga

SEQ ID NO: 962 - DNA, 2085 bp, Homo sapiens
  source 1..2085: mol_type = unassigned DNA
gcgagaagagcagacaccgtgctcctggaatcacccagcatgttgcaaggtctcctgccagtcagtctcctcctctctgttgcagtaagtgctataaaagaactccctggggtgaagaagtatgaagtggtttatcctataagacttcatccactgcataaaagagaggccaaagagccagagcaacaggaacaatttgaaactgaattaaagtataaaatgacaattaatggaaaaattgcagtgctttatttgaaaaaaaacaagaacctccttgcaccaggctacacggaaacatattataattccactggaaaggagatcaccacaagcccacaaattatggatgattgttattatcaaggacatattcttaatgaaaaggtttctgacgctagcatcagcacatgtaggggtctaaggggctacttcagtcagggggatcaaagatactttattgaacctttaagccccatacatcgggatggacaggagcatgcactcttcaagtataaccctgatgaaaagaattatgacagcacctgtgggatggatggtgtgttgtgggcccacgatttgcagcagaacattgccctacctgccaccaaactagtaaaattgaaagacaggaaggttcaggaacatgagaaatacatagaatattatttggtcctggataatggtgagtttaaaaggtacaatgagaatcaagatgagatcagaaagagggtatttgagatggctaattatgtcaacatgctttataaaaagctcaatactcatgtggccttagttggtatggaaatctggactgacaaggataagataaagataaccccaaatgcaagcttcaccttggagaatttttctaaatggagggggagtgttctctcaagaagaaagcgtcatgatattgctcagttaatcacagcaacagaacttgctggaacgactgtgggtcttgcatttatgtctacaatgtgttctccttattctgttggcgttgttcaggaccacagcgataatcttcttagagttgcagggacaatggcacatgaaatgggccacaactttggaatgtttcatgacgactattcttgcaagtgtccttctacaatatgtgtgatggacaaagcactgagcttctatatacccacagacttcagttcctgcagccgtctcagctatgacaagttttttgaagataaattatcaaattgcctctttaatgctccattgcctacagatatcatatccactccaatttgtgggaaccagttggtggaaatgggagaggactgtgattgtgggacatctgaggaatgtaccaatatttgctgtgatgctaagacatgtaaaatcaaagcaacttttcaatgtgcattaggagaatgttgtgaaaaatgccaatttaaaaaggctgggatggtgtgcagaccagcaaaagatgagtgcgacctgcctgaaatgtgtaatggtaaatctggtaattgtcctgatgatagattccaagtcaatggcttcccttgccatcacgggaagggccactgcttgatggggacatgccccacactgcaggagcagtgcacagagctgtggggaccaggtaggaggacaaatcctttcccctgtgcatgtgcgaaggaaaatcatttcagatgacagtgtttaaccatggtcaaaggaccattctgtcctatccttcttagaagctttgaactcaaaatcatggaaaggttttaagatttgaggttggttttagggttgctagatttagcaagtaaaaataaggatggccccgttaaattttaacttaaaattaacaagttttttgttaattttttgttttttgtctcagcatcagtatatcccatgcaatatttgaggtgtgctcatactaaaattatttgtgtatctgaaattcaaattaaactgggtgtctttttcttttcatctggcaaccctactaagatcataaacccttggaaatctgtgtgtgtgcgggtgtgtgtgtgtgtgtgtgtgcaggggtggcagaagtactgtgggatgggacagaaataagaaaagatggaaaaaagaaaa

SEQ ID NO: 963 - DNA, 1873 bp, Homo sapiens
  source 1..1873: mol_type = unassigned DNA
actggagaggaggcagggacagacccagcagcacccacctgagcgagaagagcagacaccgtgctcctggaatcacccagcatgttgcaaggtctcctgccagtcagtctcctcctctctgttgcagtaagtgctataaaagaactccctggggtgaagaagtatgaagtggtttatcctataagacttcatccactgcataaaagagaggccaaagagccagagcaacaggaacaatttgaaactgaattaaagtataaaatgacaattaatggaaaaattgcagtgctttatttgaaaaaaaacaagaacctccttgcaccaggctacacggaaacatattataattccactggaaaggagatcaccacaagcccacaaattatggatgattgttattatcaaggacatattcttaatgaaaaggtttctgacgctagcatcagcacatgtaggggtctaagaaattgaaagacaggaaggttcaggaacatgagaaatacatagaatattatttggtcctggataatggtgagtttaaaaggtacaatgagaatcaagatgagatcagaaagagggtatttgagatggctaattatgtcaacatgctttataaaaagctcaatactcatgtggccttagttggtatggaaatctggactgacaaggataagataaagataaccccaaatgcaagcttcaccttggagaatttttctaaatggagggggagtgttctctcaagaagaaagcgtcatgatattgctcagttaatcacagcaacagaacttgctggaacgactgtgggtcttgcatttatgtctacaatgtgttctccttattctgttggcgttgttcaggaccacagcgataatcttcttagagttgcagggacaatggcacatgaaatgggccacaactttggaatgtttcatgacgactattcttgcaagtgtccttctacaatatgtgtgatggacaaagcactgagcttctatatacccacagacttcagttcctgcagccgtctcagctatgacaagttttttgaagataaattatcaaattgcctctttaatgctccattgcctacagatatcatatccactccaatttgtgggaaccagttggtggaaatgggagaggactgtgattgtgggacatctgaggaatgtaccaatatttgctgtgatgctaagacatgtaaaatcaaagcaacttttcaatgtgcattaggagaatgttgtgaaaaatgccaatttaaaaaggctgggatggtgtgcagaccagcaaaagatgagtgcgacctgcctgaaatgtgtaatggtaaatctggtaattgtcctgatgatagattccaagtcaatggcttcccttgccatcacgggaagggccactgcttgatggggacatgccccacactgcaggagcagtgcacagagctgtggggaccaggtaggaggacaaatcctttcccctgtgcatgtgcgaaggaaaatcatttcagatgacagtgtttaaccatggtcaaaggaccattctgtcctatccttcttagaagctttgaactcaaaatcatggaaaggttttaagatttgaggttggttttagggttgctagatttagcaagtaaaaataaggatggccccgttaaattttaacttaaaattaacaagttttttgttaattttttgttttttgtctcagcatcagtatatcccatgcaatatttgaggtgtgctcatactaaaattatttgtgtatctgaaattcaaattaaactgggtgtctttttcttttcatctggcaaccctactaagatcataaacccttggaaatctgtgtgtgtgcgggtgtgtgtgtgtgtgtgtgt

SEQ ID NO: 964 - DNA, 3325 bp, Homo sapiens
  source 1..3325: mol_type = unassigned DNA
gtgacatcacatccactaaccaaatggggtggtgtgagtatctcctataaaataaaagctctcctgatggcctgttcctgcacatttcctgaggacgccctcgatcacaagcagcttgctggatgaataaaggaaagaaggtttatatacactaataatagaaatgttttgggatggttcatgatttcgaaaagcttcagagaaaataaagatgcttaatgttagagtacaaaacattctccctgcagtctcacgaactgtgaacaaaaactgaagtgaaaactcatagtgcataactcgtcaatactcctgtgatcgtataaccatcagcaagaaaacaaatttgattgagcccccatccagtcctctttgcgtggaatcagacctcttttgcagtggaaaggagcagagaatgtgactttcctgaacaacaggagcaagaatcaatgccagattctcttctctaaaaataatcaatttgttactacagtgctgcagctctgatggttcaactctgccaaaagatggatctttaatgattagcactacacactgaccaactcagaagaaggagccacaccacctgtgactccagccctgacttctgctctggaccagtgtttccataacagggacttcaaaatcactgtgatttgaagcctttttgaacatgaagatgttactcctgctgcattgccttggggtgtttctgtcctgttctggacacatccaggatgagcacccccaatatcacagccctccggatgtggtgattcctgtgaggataactggcaccaccagaggcatgacacctccaggctggctctcctatatcctgccctttggaggccagaaacacattatccacataaaggtcaagaagcttttgttttccaaacacctccctgtgttcacctacacagaccagggtgctatccttgaggaccagccatttgtccagaataactgctactatcatggttatgtggaaggggacccagaatccctggtttccctcagtacctgttttgggggttttcaaggaatattacagataaatgactttgcttatgaaatcaagcccctagcattttctaccacgtttgaacatctggtatacaagatggacagtgaggagaaacaattttcaaccatgagatccggatttatgcaaaatgaaataacatgccgaatggaatttgaagaaattgataattccactcagaagcaaagttcttatgtgggctggtggatccattttaggattgttgaaattgtagtcgtcattgataattatctgtacattcgttatgaaaggaacgactcaaagttgctggaggatctatatgttattgttaatatagtggattccattttggatgtcattggtgttaaggtgttattatttggtttggagatctggaccaataaaaacctcattgtagtagatgatgtaaggaaatctgtgcacctgtattgcaagtggaagtcggagaacattacgccccggatgcaacatgacacctcacatcttttcacaactctaggattaagagggttaagtggcataggagcttttagaggaatgtgtacaccacaccgtagttgtgcaattgttactttcatgaacaaaactttgggcactttttcaattgcagtggctcatcatctaggtcataatttgggcatgaaccatgatgaggatacatgtcgttgttcacaacctagatgcataatgcatgaaggcaacccaccaataactaaatttagcaattgtagttatggtgatttttgggaatatactgtagagaggacaaagtgtttgcttgaaacagtacacacaaaggacatctttaatgtgaagcgctgtgggaatggtgttgttgaagaaggagaagagtgtgactgtggacctttaaagcattgtgcaaaagatccctgctgtctgtcaaattgcactctgactgatggttctacttgtgcttttgggctttgttgcaaagactgcaagttcctaccatcagggaaagtgtgtagaaaggaggtcaatgaatgtgatcttccagagtggtgcaatggtacttcccataagtgcccagatgacttttatgtggaagatggaattccctgtaaggagaggggctactgctatgaaaagagctgtcatgaccgcaatgaacagtgtaggaggatttttggtgcaggcgcaaatactgcaagtgagacttgctacaaagaattgaacaccttaggtgaccgtgttggtcactgtggtatcaaaaatgctacatatataaagtgtaatatctcagatgtccagtgtggaagaattcagtgtgagaatgtgacagaaattcccaatatgagtgatcatactactgtgcattgggctcgcttcaatgacataatgtgctggagtactgattaccatttggggatgaagggacctgatattggtgaagtgaaagatggaacagagtgtgggatagatcatatatgcatccacaggcactgtgtccatataaccatcttgaatagtaattgctcacctgcattttgtaacaagaggggcatctgcaacaataaacatcactgccattgcaattatctgtgggaccctcccaactgcctgataaaaggctatggaggtagtgttgacagtggcccaccccctaagagaaagaagaaaaagaagttctgttatctgtgtatattgttgcttattgttttgtttattttattatgttgtctttatcgactttgtaaaaaaagtaaaccaataaaaaagcagcaagatgttcaaactccatctgcaaaagaagaggaaaaaattcagcgtcgacctcatgagttacctccccagagtcaaccttgggtgatgccttcccagagtcaacctcctgtgacgccttcccagagtcatcctcaggtgatgccttcccagagtcaacctcctgtgacaccctcccagagtcaacctcgggtgatgccttctcagagtcaacctcctgtgatgccttcccagagtcatcctcagttgacgccttcccagagtcaacctcctgtgacaccctcccagaggcaacctcagttgatgccttcccagagtcaacctcctgtgacgccctcctagagccaacctcagttgatgccttcccagagtcaacctcctgtgacgccctcccagagccaacctcgggtgacaccctcccagagtcaacctcatgtgacaccttaccggagtaaaagtggtaaacaaaagcaatcagtaccaattccaaaaactgtatccagaaaaggtacattaaaaaaataattcctagta

SEQ ID NO: 965 - DNA, 3152 bp, Homo sapiens
  source 1..3152: mol_type = unassigned DNA
aaaataaaagctctcctgatggcctgttcctgcacatttcctgaggacgccctcgatcacaagcaggttagagtacaaaacattctccctgcagtctcacgaactgtgaacaaaaactgaagtgaaaactcatagtgcataactcgtcaatactcctgtgatcgtataaccatcagcaagaaaacaaatttgattgagcccccatccagtcctctttgcgtggaatcagacctcttttgcagtggaaaggagcagagaatgtgactttcctgaacaacaggagcaagaatcaatgccagattctcttctctaaaaataatcaatttgttactacagtgctgcagctctgatggttcaactctgccaaaagatggatctttaatgattagcactacacactgaccaactcagaagaaggagccacaccacctgtgactccagccctgacttctgctctggaccagtgtttccataacagggacttcaaaatcactgtgatttgaagcctttttgaacatgaagatgttactcctgctgcattgccttggggtgtttctgtcctgttctggacacatccaggatgagcacccccaatatcacagccctccggatgtggtgattcctgtgaggataactggcaccaccagaggcatgacacctccaggctggctctcctatatcctgccctttggaggccagaaacacattatccacataaaggtcaagaagcttttgttttccaaacacctccctgtgttcacctacacagaccagggtgctatccttgaggaccagccatttgtccagaataactgctactatcatggttatgtggaaggggacccagaatccctggtttccctcagtacctgttttgggggttttcaaggaatattacagataaatgactttgcttatgaaatcaagcccctagcattttctaccacgtttgaacatctggtatacaagatggacagtgaggagaaacaattttcaaccatgagatccggatttatgcaaaatgaaataacatgccgaatggaatttgaagaaattgataattccactcagaagcaaagttcttatgtgggctggtggatccattttaggattgttgaaattgtagtcgtcattgataattatctgtacattcgttatgaaaggaacgactcaaagttgctggaggatctatatgttattgttaatatagtggattccattttggatgtcattggtgttaaggtgttattatttggtttggagatctggaccaataaaaacctcattgtagtagatgatgtaaggaaatctgtgcacctgtattgcaagtggaagtcggagaacattacgccccggatgcaacatgacacctcacatcttttcacaactctaggattaagagggttaagtggcataggagcttttagaggaatgtgtacaccacaccgtagttgtgcaattgttactttcatgaacaaaactttgggcactttttcaattgcagtggctcatcatctaggtcataatttgggcatgaaccatgatgaggatacatgtcgttgttcacaacctagatgcataatgcatgaaggcaacccaccaataactaaatttagcaattgtagttatggtgatttttgggaatatactgtagagaggacaaagtgtttgcttgaaacagtacacacaaaggacatctttaatgtgaagcgctgtgggaatggtgttgttgaagaaggagaagagtgtgactgtggacctttaaagcattgtgcaaaagatccctgctgtctgtcaaattgcactctgactgatggttctacttgtgcttttgggctttgttgcaaagactgcaagttcctaccatcagggaaagtgtgtagaaaggaggtcaatgaatgtgatcttccagagtggtgcaatggtacttcccataagtgcccagatgacttttatgtggaagatggaattccctgtaaggagaggggctactgctatgaaaagagctgtcatgaccgcaatgaacagtgtaggaggatttttggtgcaggcgcaaatactgcaagtgagacttgctacaaagaattgaacaccttaggtgaccgtgttggtcactgtggtatcaaaaatgctacatatataaagtgtaatatctcagatgtccagtgtggaagaattcagtgtgagaatgtgacagaaattcccaatatgagtgatcatactactgtgcattgggctcgcttcaatgacataatgtgctggagtactgattaccatttggggatgaagggacctgatattggtgaagtgaaagatggaacagagtgtgggatagatcatatatgcatccacaggcactgtgtccatataaccatcttgaatagtaattgctcacctgcattttgtaacaagaggggcatctgcaacaataaacatcactgccattgcaattatctgtgggaccctcccaactgcctgataaaaggctatggaggtagtgttgacagtggcccaccccctaagagaaagaagaaaaagaagttctgttatctgtgtatattgttgcttattgttttgtttattttattatgttgtctttatcgactttgtaaaaaaagtaaaccaataaaaaagcagcaagatgttcaaactccatctgcaaaagaagaggaaaaaattcagcgtcgacctcatgagttacctccccagagtcaaccttgggtgatgccttcccagagtcaacctcctgtgacgccttcccagagtcatcctcaggtgatgccttcccagagtcaacctcctgtgacaccctcccagagtcaacctcgggtgatgccttctcagagtcaacctcctgtgatgccttcccagagtcatcctcagttgacgccttcccagagtcaacctcctgtgacaccctcccagaggcaacctcagttgatgccttcccagagtcaacctcctgtgacgccctcctagagccaacctcagttgatgccttcccagagtcaacctcctgtgacgccctcccagagccaacctcgggtgacaccctcccagagtcaacctcatgtgacaccttaccggagtaaaagtggtaaacaaaagcaatcagtaccaattccaaaaactgtatccagaaaaggtacatt

SEQ ID NO: 966 - DNA, 3244 bp, Homo sapiens
  source 1..3244: mol_type = unassigned DNA
gtgacatcacatccactaaccaaatggggtggtgtgagtatctcctataaaataaaagctctcctgatggcctgttcctgcacatttcctgaggacgccctcgatcacaagcagcttgctggatgaataaaggaaagaaggtttatatacactaataatagaaatgttttgggatggttcatgatttcgaaaagcttcagagaaaataaagatgcttaatgttagagtacaaaacattctccctgcagtctcacgaactgtgaacaaaaactgaagtgaaaactcatagtgcataactcgtcaatactcctgtgatcgtataaccatcagcaagaaaacaaatttgattgagcccccatccagtcctctttgcgtggaatcagacctcttttgcagtggaaaggagcagtgctgcagctctgatggttcaactctgccaaaagatggatctttaatgattagcactacacactgaccaactcagaagaaggagccacaccacctgtgactccagccctgacttctgctctggaccagtgtttccataacagggacttcaaaatcactgtgatttgaagcctttttgaacatgaagatgttactcctgctgcattgccttggggtgtttctgtcctgttctggacacatccaggatgagcacccccaatatcacagccctccggatgtggtgattcctgtgaggataactggcaccaccagaggcatgacacctccaggctggctctcctatatcctgccctttggaggccagaaacacattatccacataaaggtcaagaagcttttgttttccaaacacctccctgtgttcacctacacagaccagggtgctatccttgaggaccagccatttgtccagaataactgctactatcatggttatgtggaaggggacccagaatccctggtttccctcagtacctgttttgggggttttcaaggaatattacagataaatgactttgcttatgaaatcaagcccctagcattttctaccacgtttgaacatctggtatacaagatggacagtgaggagaaacaattttcaaccatgagatccggatttatgcaaaatgaaataacatgccgaatggaatttgaagaaattgataattccactcagaagcaaagttcttatgtgggctggtggatccattttaggattgttgaaattgtagtcgtcattgataattatctgtacattcgttatgaaaggaacgactcaaagttgctggaggatctatatgttattgttaatatagtggattccattttggatgtcattggtgttaaggtgttattatttggtttggagatctggaccaataaaaacctcattgtagtagatgatgtaaggaaatctgtgcacctgtattgcaagtggaagtcggagaacattacgccccggatgcaacatgacacctcacatcttttcacaactctaggattaagagggttaagtggcataggagcttttagaggaatgtgtacaccacaccgtagttgtgcaattgttactttcatgaacaaaactttgggcactttttcaattgcagtggctcatcatctaggtcataatttgggcatgaaccatgatgaggatacatgtcgttgttcacaacctagatgcataatgcatgaaggcaacccaccaataactaaatttagcaattgtagttatggtgatttttgggaatatactgtagagaggacaaagtgtttgcttgaaacagtacacacaaaggacatctttaatgtgaagcgctgtgggaatggtgttgttgaagaaggagaagagtgtgactgtggacctttaaagcattgtgcaaaagatccctgctgtctgtcaaattgcactctgactgatggttctacttgtgcttttgggctttgttgcaaagactgcaagttcctaccatcagggaaagtgtgtagaaaggaggtcaatgaatgtgatcttccagagtggtgcaatggtacttcccataagtgcccagatgacttttatgtggaagatggaattccctgtaaggagaggggctactgctatgaaaagagctgtcatgaccgcaatgaacagtgtaggaggatttttggtgcaggcgcaaatactgcaagtgagacttgctacaaagaattgaacaccttaggtgaccgtgttggtcactgtggtatcaaaaatgctacatatataaagtgtaatatctcagatgtccagtgtggaagaattcagtgtgagaatgtgacagaaattcccaatatgagtgatcatactactgtgcattgggctcgcttcaatgacataatgtgctggagtactgattaccatttggggatgaagggacctgatattggtgaagtgaaagatggaacagagtgtgggatagatcatatatgcatccacaggcactgtgtccatataaccatcttgaatagtaattgctcacctgcattttgtaacaagaggggcatctgcaacaataaacatcactgccattgcaattatctgtgggaccctcccaactgcctgataaaaggctatggaggtagtgttgacagtggcccaccccctaagagaaagaagaaaaagaagttctgttatctgtgtatattgttgcttattgttttgtttattttattatgttgtctttatcgactttgtaaaaaaagtaaaccaataaaaaagcagcaagatgttcaaactccatctgcaaaagaagaggaaaaaattcagcgtcgacctcatgagttacctccccagagtcaaccttgggtgatgccttcccagagtcaacctcctgtgacgccttcccagagtcatcctcaggtgatgccttcccagagtcaacctcctgtgacaccctcccagagtcaacctcgggtgatgccttctcagagtcaacctcctgtgatgccttcccagagtcatcctcagttgacgccttcccagagtcaacctcctgtgacaccctcccagaggcaacctcagttgatgccttcccagagtcaacctcctgtgacgccctcctagagccaacctcagttgatgccttcccagagtcaacctcctgtgacgccctcccagagccaacctcgggtgacaccctcccagagtcaacctcatgtgacaccttaccggagtaaaagtggtaaacaaaagcaatcagtaccaattccaaaaactgtatccagaaaaggtacattaaaaaaataattcctagta

SEQ ID NO: 967 - DNA, 788 bp, Homo sapiens
  source 1..788: mol_type = unassigned DNA
actaaccaaatggggtggtgtgagtatctcctataaaataaaagctctcctgatggcctgttcctgcacatttcctgaggacgccctcgatcacaagcagcttgctggatgaataaaggaaagaaggtttatatacactaataatagaaatgttttgggatggttcatgatttcgaaaagcttcagagaaaataaagatgcttaatgttagagtacaaaacattctccctgcagtctcacgaactgtgaacaaaaactgaagtgaaaactcatagtgcataactcgtcaatactcctgtgatcgtataaccatcagcaagaaaacaaatttgattgagcccccatccagtcctctttgcgtggaatcagacctcttttgcagtggaaaggagcagagaatgtgactttcctgaacaacaggagcaagaatcaatgccagattctcttctctaaaaataatcaatttgttactacagtgctgcagctctgatggttcaactctgccaaaagatggatctttaatgattagcactacacactgaccaactcagaagaaggagccacaccacctgtgactccagccctgacttctgctctggaccagtgtttccataacagggacttcaaaatcactgtgatttgaagcctttttgaacatgaagatgttactcctgctgcattgccttggggtgtttctgtcctgttctggacacatccaggatgagcacccccaatatcacagccctccggatgtggtgattcctgtgaggataactggcaccaccaga

SEQ ID NO: 968 - DNA, 555 bp, Homo sapiens
  source 1..555: mol_type = unassigned DNA
acatccactaaccaaatggggtggtgtgagtatctcctataaaataaaagctctcctgatggcctgttcctgcacatttcctgaggacgccctcgatcacaagcagtgctgcagctctgatggttcaactctgccaaaagatggatctttaatgattagcactacacactgaccaactcagaagaaggagccacaccacctgtgactccagccctgacttctgctctggaccagtgtttccataacagggacttcaaaatcactgtgatttgaagcctttttgaacatgaagatgttactcctgctgcattgccttggggtgtttctgtcctgttctggacacatccaggatgagcacccccaatatcacagccctccggatgtggtgattcctgtgaggataactggcaccaccagaggcatgacacctccaggctggctctcctatatcctgccctttggaggccagaaacacattatccacataaaggtcaagaagcttttgttttccaaacacctccctgtgttcacctacacagaccagggtgctatcct

SEQ ID NO: 969 - DNA, 632 bp, Homo sapiens
  source 1..632: mol_type = unassigned DNA
gtgacatcacatccactaaccaaatggggtggtgtgagtatctcctataaaataaaagctctcctgatggcctgttcctgcacatttcctgaggacgccctcgatcacaagcagcttgctggatgaataaaggaaagaaggtttatatacactaataatagaaatgttttgggatggttcatgatttcgaaaagcttcagagaaaataaagatgcttaatgttagagtacaaaacattctccctgcagtctcacgaactgtgaacaaaaactgaagtgaaaactcatagtgcataactcgtcaatactcctgtgatcgtataaccatcagcaagaaaacaaatttgattgagcccccatccagtcctctttgcgtggaatcagacctcttttgcagtggaaaggagcagtgctgcagctctgatggttcaactctgccaaaagatggatctttaatgattagcactacacactgaccaactcagaagaaggagccacaccacctgtgactccagccctgacttctgctctggaccagtgtttccataacagggacttcaaaatcactgtgatttgaagcctttttgaacatgaagatgttactcctgctgcattgccttggggtgtttctgt

SEQ ID NO: 970 - DNA, 3010 bp, Homo sapiens
  source 1..3010: mol_type = unassigned DNA
aaaagctctcctgatggcctgttcctgcacatttcctgaggacgccctcgatcacaagcaggttagagtacaaaacattctccctgcagtctcacgaactgtgaacaaaaactgaagtgaaaactcatagtgcataactcgtcaatactcctgtgatcgtataaccatcagcaagaaaacaaatttgattgagcccccatccagtcctctttgcgtggaatcagacctcttttgcagtggaaaggagcagtgctgcagctctgatggttcaactctgccaaaagatggatctttaatgattagcactacacactgaccaactcagaagaaggagccacaccacctgtgactccagccctgacttctgctctggaccagtgtttccataacagggacttcaaaatcactgtgatttgaagcctttttgaacatgaagatgttactcctgctgcattgccttggggtgtttctgtcctgttctggacacatccaggatgagcacccccaatatcacagccctccggatgtggtgattcctgtgaggataactggcaccaccagaggcatgacacctccaggctggctctcctatatcctgccctttggaggccagaaacacattatccacataaaggtcaagaagcttttgttttccaaacacctccctgtgttcacctacacagaccagggtgctatccttgaggaccagccatttgtccagaataactgctactatcatggttatgtggaaggggacccagaatccctggtttccctcagtacctgttttgggggttttcaaggaatattacagataaatgactttgcttatgaaatcaagcccctagcattttctaccacgtttgaacatctggtatacaagatggacagtgaggagaaacaattttcaaccatgagatccggatttatgcaaaatgaaataacatgccgaatggaatttgaagaaattgataattccactcagaagcaaagttcttatgtgggctggtggatccattttaggattgttgaaattgtagtcgtcattgataattatctgtacattcgttatgaaaggaacgactcaaagttgctggaggatctatatgttattgttaatatagtggattccattttggatgtcattggtgttaaggtgttattatttggtttggagatctggaccaataaaaacctcattgtagtagatgatgtaaggaaatctgtgcacctgtattgcaagtggaagtcggagaacattacgccccggatgcaacatgacacctcacatcttttcacaactctaggattaagagggttaagtggcataggagcttttagaggaatgtgtacaccacaccgtagttgtgcaattgttactttcatgaacaaaactttgggcactttttcaattgcagtggctcatcatctaggtcataatttgggcatgaaccatgatgaggatacatgtcgttgttcacaacctagatgcataatgcatgaaggcaacccaccaataactaaatttagcaattgtagttatggtgatttttgggaatatactgtagagaggacaaagtgtttgcttgaaacagtacacacaaaggacatctttaatgtgaagcgctgtgggaatggtgttgttgaagaaggagaagagtgtgactgtggacctttaaagcattgtgcaaaagatccctgctgtctgtcaaattgcactctgactgatggttctacttgtgcttttgggctttgttgcaaagactgcaagttcctaccatcagggaaagtgtgtagaaaggaggtcaatgaatgtgatcttccagagtggtgcaatggtacttcccataagtgcccagatgacttttatgtggaagatggaattccctgtaaggagaggggctactgctatgaaaagagctgtcatgaccgcaatgaacagtgtaggaggatttttggtgcaggcgcaaatactgcaagtgagacttgctacaaagaattgaacaccttaggtgaccgtgttggtcactgtggtatcaaaaatgctacatatataaagtgtaatatctcagatgtccagtgtggaagaattcagtgtgagaatgtgacagaaattcccaatatgagtgatcatactactgtgcattgggctcgcttcaatgacataatgtgctggagtactgattaccatttggggatgaagggacctgatattggtgaagtgaaagatggaacagagtgtgggatagatcatatatgcatccacaggcactgtgtccatataaccatcttgaatagtaattgctcacctgcattttgtaacaagaggggcatctgcaacaataaacatcactgccattgcaattatctgtgggaccctcccaactgcctgataaaaggctatggaggtagtgttgacagtggcccaccccctaagagaaagaagaaaaagaagttctgttatctgtgtatattgttgcttattgttttgtttattttattatgttgtctttatcgactttgtaaaaaaagtaaaccaataaaaaagcagcaagatgttcaaactccatctgcaaaagaagaggaaaaaattcagcgtcgacctcatgagttacctccccagagtcaaccttgggtgatgccttcccagagtcaacctcctgtgacgccttcccagagtcatcctcaggtgatgccttcccagagtcaacctcctgtgacaccctcccagagtcaacctcgggtgatgccttctcagagtcaacctcctgtgatgccttcccagagtcatcctcagttgacgccttcccagagtcaacctcctgtgacaccctcccagaggcaacctcagttgatgccttcccagagtcaacctcctgtgacgccctcctagagccaacctcagttgatgccttcccagagtcaacctcctgtgacgccctcccagagccaacctcgggtgacaccctcccagagtcaacctcatgtgacaccttaccggagtaaaagt

(The sequence listing continues in the following parts.)
